United States Patent Application Publication US 2009/0100536 A1 - sequence listing, part 5

SEQ ID NO: 17820 - protein, 259 aa, Archaeoglobus fulgidus DSM 4304
MPEDILVDIKRDYVLSKLRDNERIDGRGFDEFRKVEIIPNVIEKAEGSALVKLGDTQVVVGVKMQPGEPYPDTPDRGVIIVNAELVPLASPTFEPGPPDENSIELARVVDRGIRESEAVDLSKLVIEEGEKVWIVFVDIHALDDDGNLLDASALAAIAALMNTKVPAERFDLGEDYLLPVRDLPVSVTSLIVGNKYLVDPSREEMSVGDTTLTITTDKDDNVVAMQKSGGYLLDEKLFDELLDVSINCARKLREKFKEI

SEQ ID NO: 17821 - protein, 275 aa, Sulfolobus solfataricus
MSSTPSNQNIIPIIKKESIVSLFEKGIRQDGRKLTDYRPLSITLDYAKKADGSALVKLGTTMVLAGTKLEIDKPYEDTPNQGNLIVNVELLPLAYETFEPGPPDENAIELARVVDRSLRDSKALDLTKLVIEPGKSVWTVWLDVYVLDYGGNVLDACTLASVAALYNTKVYKVEQHSNGISVNKNEVVGKLPLNYPVVTISVAKVDKYLVVDPDLDEESIMDAKISFSYTPDLKIVGIQKSGKGSMSLQDIDQAENTARSTAVKLLEELKKHLGI

SEQ ID NO: 17822 - protein, 260 aa, Thermoplasma acidophilum
MVKESAEILSEIRKNYILSTMKGGKRIDGRLPDEFRELTIIENYIPRANGSAYVALGNTRVVAGVKIEAGEPFPDTPDQGVLTTNVELLPIAFPSFEAGPPNDLAIEVSRVVDRGIRESKMISPEKLVIEQGKKVWIVFLDINVLDYDGNLIDASTIAAVAALRNAVVPASKEGGEDFKLPVSSTPISVTMVKIGDTLVCDPSLEEDQICGGRITVTTTEDGHIRAMQKGEIGAFTVEDVKKAVKMSLEVGKKLREKYFR

SEQ ID NO: 17823 - protein, 240 aa, Thermoplasma acidophilum
MKGGKRIDGRLPDEFRELTIIENYIPRANGSAYVALGNTRVVAGVKIEAGEPFPDTPDQGVLTTNVELLPIAFPSFEAGPPNDLAIEVSRVVDRGIRESKMISPEKLVIEQGKKVWIVFLDINVLDYDGNLIDASTIAAVAALRNAVVPASKEGGEDFKLPVSSTPISVTMVKIGDTLVCDPSLEEDQICGGRITVTTTEDGHIRAMQKGEIGAFTVEDVKKAVKMSLEVGKKLREKYFR

SEQ ID NO: 17824 - protein, 274 aa, Pyrococcus abyssi
MSDNEIVAGIMRDHIINLLKEGKRIDDRGFEDYRPIEIEVGVIEKAEGSALVKLGSTQVLVGIKTSLGEPFPDTPNMGVMTTNVELVPLASPTFEPGPPDERAIELARVIDRGIRESKALNLEKMVIVPGKIVRVVFIDVHVLDHDGNLMDAIGIAAIAALLNARVPKVRYNEETGEVETLDETEPLPVEKIPVPVTFAKIGNILVVDPSLDEELVMDGKITITTDETGHISAVQKSEGGAFKLEEVMYAVETAFKKAEEIRKLILEAVEKAKQ

SEQ ID NO: 17825 - protein, 278 aa, Plasmodium falciparum 3D7
MSSLNYIEDSINCNIRIDGRTLLTYRSIEINKNILVSGDGSSSVINEENNVICGIKLSLITPDVDTYDEGNVNLQIDCPASVAANRIKKDHLQTMTTIIYNLCIKNNINKKILCILPGKFAWSVDINVMVLNAGGGLLDIISIAIYVALKDTFFPIVKPKKEIEEENTFHEISNKDYQLEIVENEHVNFPYENIPICISIGEINNKYIYDMSKVEEELVQNIFVVAITSKGKCVAFHKLYGISMEISSILNITENSSKISHTLFDKIHQALDKIHANM

SEQ ID NO: 17826 - protein, 477 aa, Plasmodium falciparum 3D7
MIICNNNVNHFWKNIKKNIRLDGRTFEDSRNVCINFLKDYGHVEISIGFTKVICKITSEIVKPHDRKLKEGILKINLDIDNFIEDNENSDNMSDECLEIKNIIDRVLKTSNIINFESLCIIPGKKVWCICINIMVIENDGNLTDACYLSAYCGLVHFKNHQVRVIKNGDIIIDKEEINYSPLSILNSPIVTTFAYYEEHDVCLIDPCLHEEEFMSSKISIALNKNGNLISLLKPGGIPLACSHIMESIEIAKKRILTILKILEDTLEEDKNIRSYLTKRNLHVKYSSAPVTIRYDNSFKLKPDISLERYTKNTLIFEDTIKKIEQYIQYNQVQECLNNMNVKLEENDQEEIETCTLKGEGNLNNPNFIDPMRNTNLLNPTDITIIKRQEFVDNHYDANNNKYNTQANKTFKKELIDFSNLLTQNHKKSNNLSNNQKDISEQHDNSQESSDDASTIRSDESSDIDFSVAINQNIKKKK

SEQ ID NO: 17827 - protein, 286 aa, Arabidopsis thaliana
MGLSLGEQHFIKGGIAQDLRTDGRKRLTYRPIYVETGVIPQANGSARVRIGGTDVIASVKAEIGRPSSLQPDKGKVAVFIDCSPTAEPTFGGRGGEELSSELALALQRCLLGGKSGAGAGINLSSLLIKEGKVCWDLYIDGLVISSDGNLLDALGAAIKAALTNTAIPKVNVSAEVADDEQPEIDISDEEYLQFDTSSVPVIVTLTKVGTHYIVDATAEEESQMSSAVSISVNRTGHICGLTKRSGSGLDPSVILDMISVAKHVTETLMSKLDSEISAAEACEDES

SEQ ID NO: 17828 - protein, 293 aa, Arabidopsis thaliana
MGLSLGEQHFIKGGIAQDLRTDGRKRLTYRPIYVETGVIPQANGSARVRIGGTDVIASVKAEIGRPSSLQPDKGKVAVFIDCSPTAEPTFGGRGGEELSSELALALQRCLLGGKSGAAIHVLVPGAGINLSSLLIKEGKVCWDLYIDGLVISSDGNLLDALGAAIKAALTNTAIPKVNVSAEVADDEQPEIDISDEEYLQFDTSSVPVIVTLTKVGTHYIVDATAEEESQMSSAVSISVNRTGHICGLTKRSGSGLDPSVILDMISVAKHVTETLMSKLDSEISAAEACEDES

SEQ ID NO: 17829 - protein, 297 aa, Arabidopsis thaliana
MGLSLGEQHFIKGGIAQDLRTDGRKRLTYRPIYVETGVIPQANGSARVRIGGTDVIASVKAEIGRPSSLQPDKGKVAVFIDCSPTAEPTFGGRGGEELSSELALALQRCLLGGKSGAGLQSSIHVLVPGAGINLSSLLIKEGKVCWDLYIDGLVISSDGNLLDALGAAIKAALTNTAIPKVNVSAEVADDEQPEIDISDEEYLQFDTSSVPVIVTLTKVGTHYIVDATAEEESQMSSAVSISVNRTGHICGLTKRSGSGLDPSVILDMISVAKHVTETLMSKLDSEISAAEACEDES

SEQ ID NO: 17830 - protein, 291 aa, Glycine max
  unsure (1)..(291): unsure at all Xaa locations
MVGLSLGETHFIQGGIAQDLRCDGRKRLTYRPISVETGVIPQTNGSARVRMGATDVIASVKAELGKPSLLQPDKGKVSIYVDCSSTAEPAFEGRGGDELAAELSNALQRCLLGGKSGAGAGIDLSSLIVVEGKICWDLYIDGLVVSSDGNLLDALGTAIKAALSNTGIPRVQVAAGTSNDEHPEVDVSDEEFLQFDTSRVPVIVTLTKVGRHYIVDATSEEESQMSSAVSISVNRQGHICGITKRGGVGLDPSIILDMISVAKHVSEQLINKLDSEIASAEAEEESXQRST

SEQ ID NO: 17831 - protein, 294 aa, Glycine max
  unsure (1)..(294): unsure at all Xaa locations
MVGLSLGETHFIQGGIAQDLRCDGRKRLTYRPISVETGVIPQTNGSARVRMGATDVIASVKAELGKPSLLQPDKGKVSIYIDCSSTAEPAFEGRGGDELAAELSNAPQRCLLGGSCGALIXFPSGARIGLSSLIVVEGKICWDLYIDGLLVNSDGNLLDALIEXSKAALSNTGIPRVQVAAGTSNDEQPEVDVSNEEFLQFDTSGVPVIVTLAKVGTWEXHYIVDATSEEESQISSAVXSVNRQGHICGITKRGGVGLDPSTILQLFXVTRLNYGKFVSEIVASELCGPDLSFY

SEQ ID NO: 17832 - protein, 104 aa, Glycine max
  unsure (1)..(104): unsure at all Xaa locations
MVGLSLGEKHFIQGGIGQDLRCDGRKRFTYKPISVETEVIPQTNGSARVRMGATDVIASAKAVLGKPSLLQPDKXKVSIYIDCSSTAEPAFEGRRGDELAAELX

SEQ ID NO: 17833 - protein, 90 aa, Glycine max
  unsure (1)..(90): unsure at all Xaa locations
XIVTLTKVGRHYIVDATSEEESQMSSGVSISVNRQGHICGITKRGGVGLDPSIILDMISVAKHVSEQLINKLDSEIASAEADEESXHRST

SEQ ID NO: 17834 - protein, 197 aa, Oryza sativa
  unsure (1)..(197): unsure at all Xaa locations
RXAWAAIDLSSLIVVDGKVCWDLYIDGLVVSSDGNLLDALAAAIKVALSDTGIPKVNVSLSATTDEEPEVNVSDEEFLQFDTSSVPVIVTLTKVGKHYIVDATSEEESQMSSAVSVSVNRHGQIRGLTKRGGAGLDPSVIFDMISVAKHVSRQFISVLDSETLAAEAAEXRGRRAEVLIIDMPSLQCIYRFQFGSQR

SEQ ID NO: 17835 - protein, 124 aa, Oryza sativa
  unsure (1)..(124): unsure at all Xaa locations
MAGLXEGEKHFIRGGIAQDLRTDGRRRVEIQAISAETGAIPQAYGSAXRVRLGATEVIATVKAELRKPSILHPDQGKDSIFDECSPTAAPMFEGRGSEESSAELCVALQRCLLRGKSGAGAAIX

SEQ ID NO: 17836 - protein, 236 aa, Triticum aestivum
  unsure (1)..(236): unsure at all Xaa locations
MVGLSEGEKHFIRGGIAQDLRADGRTRLQFRALTVETGIIPQANGSARVRMGATEVIASVKAELGKPTILHPDKGKVSIYVDCSPTAAPMFEGRGSEELSAELSVALQRCLLGGKSGAGAAIDLSSLIVVEGKACWDLYIDGLVVSSDGDLLDALAAAIKVALSDTGIPKVNVSLNNETDGEPEVDISDEEFLQFDTSGVPVIITLTKVGKHYIVHATSEEESHISSAVSVSVNSX

SEQ ID NO: 17837 - protein, 291 aa, Schizosaccharomyces pombe
MSRHLETSLNNKEFVLNSLEKGLRLDGRQLSDFRSLEIQFGKEYGQVDVSFGHTRVMARITTEITKPYTDRPFDGIFSITTELTPLAYSAFEAGRVSDQEIVISRLIEKAVRRSNALDTESLCIISGQKCWHVRASVHFINHDGNLVDAACIAVIAALCHFRRPELTVVGEEVTVHPVEERVPVPLSILHMPICVTFSFFNNGELAIVDATLEEEDLCNGSMTITLNKNREVCQIYKAGGIIIDPSKIISCAKTAFDIAVSVCSVIQQALDEDLRKKETQYLGGSAENERS

SEQ ID NO: 17838 - protein, 270 aa, Schizosaccharomyces pombe
MKTVSGVKQLSFTPSIFKKITPEQYLSHLLNQDVRSDGRSVSEFREIVINDNCISTANGSAIIRAGENVFVCGIKAEIAEPFENSPNEGWIVPNLELSPLCSSKFKPGPPSDLAQVVSQELHQTLQQSNLINLQSLCIFEKKAAWVLYADIICLNYDGSAFDYAWAALFAALKTVKLPTAVWDEDLERVICASTLTRPVQLSTEVRSFSWSVFDDKLLADPTDEEEDLSTEFLTIMLNSSKNIVKIIKLGGTHIQPLLLKKCIEVARSKF

SEQ ID NO: 17839 - protein, 299 aa, Schizosaccharomyces pombe
MQLSLPELSYTHKSITEFEPAIRNDGRSIDQLRPLSGQVDVLPGTNGSARVKWASSVEIVIGVKAEVGDATPEGGKYVASVEISPSVSIQNRETDEIPSFLTSALQDLLNALAVDYLKFTPSKAWIIHVDAVVILSSSPYENILSALSLAAYLALQTTRLPKISTPNVTDITIGSTKYEPSEEYDVDSEWENALPLQGLELMSVIILVSSIDQVIIVDPTIEESSVAQVTYAIGVQASGAISYTRVVGTGGGYASTGRAITVERYIELLETASTVGTKLLNASSDILSFKGLGFFDILP

SEQ ID NO: 17840 - protein, 305 aa, Saccharomyces cerevisiae
MAKDIEISASESKFILEALRQNYRLDGRSFDQFRDVEITFGKEFGDVSVKMGNTKVHCRISCQIAQPYEDRPFEGLFVISTEISPMAGSQFENGNITGEDEVLCSRIIEKSVRRSGALDVEGLCIVAGSKCWAVRADVHFLDCDGGFIDASCIAVMAGLMHFKKPDITVHGEQIIVHPVNEREPVPLGILHIPICVTFSFFNPQDTEENIKGETNSEISIIDATLKEELLRDGVLTVTLNKNREVVQVSKAGGLPMDALTLMKCCHEAYSIIEKITDQILQLLKEDSEKRNKYAAMLTSENAREI

SEQ ID NO: 17841 - protein, 265 aa, Saccharomyces cerevisiae
MSLSVAEKSYLYDSLASTPSIRPDGRLPHQFRPIEIFTDFLPSSNGSSRIIASDGSECIVSIKSKVVDHHVENELLQVDVDIAGQRDDALVVETITSLLNKVLKSGSGVDSSKLQLTKKYSFKIFVDVLVISSHSHPVSLISFAIYSALNSTYLPKLISAFDDLEVEELPTFHDYDMVKLDINPPLVFILAVVGNNMLLDPAANESEVANNGLIISWSNGKITSPIRSVALNDSNVKSFKPHLLKQGLAMVEKYAPDVVRSLENL

SEQ ID NO: 17842 - protein, 260 aa, Thermoplasma volcanium
MVKESAEILSEIRKNYILTTMKGGKRIDGRLPDEFREITIIENYVPRANGSAYVALGKTRVVAGVKIEAGEPFPDTPDQGVLTTNVELLPIAFPSFEAGPPNDLAIEVSRVVDRGIRESKMISPDKLVIEQGKKVWIVFLDINVLDYDGNLIDACTIAAVSALRNAIVPASREGGEDFKLPVVNTPISVTMVKIGDTLVCDPSLEEDQICGGRITVTTTEDGHIRAMQKGEIGVFTLDDVKKAIKMSLKVGKNIREKYFR

SEQ ID NO: 17843 - protein, 297 aa, Neurospora crassa
MPREAEPSANEKAFLLKALQDEQIRLDGREFDQYRPLELTFGDEYGVANVSLGKTKILAKASAEVTVPFADRPLDGIFTIATELSPMAAPHFEVNRPTETEVLLSRLLEKTVRRSGALDTESLCLVAGQKCWSVRVDVHVLSHDGNLTDAACFAVVAALRHFRKPDTSMENGVLTVYTPAEREPVPLGWLHSPFCVTWSFFGEEGETALLDADWMEEQVRVASVTISLNRHGEICQIAKLGGVPVEAVALLQCTSVALTKVKEFSTYLDDKLAEDAKRRDKGGFMAELRAENDRIVG

SEQ ID NO: 17844 - protein, 274 aa, Pyrococcus horikoshii
MSDNEIVAGIMRDHIINLLKEGKRIDDRGFEDYRPIEIEVGIIEKAEGSALVKLGSTQVLVGIKTTLGEPFPDTPNMGVMTTNVELVPLASPTFEPGPPDERAIELARVTDRGIRESRALNLEKMVIVPGKIVRVVFIDVHVLDHDGNLMDAIGIASIAALLNAKVPKVEYNEETGEVEILEEKEPLPVERIPIPVTFAKIGNILVVDPSLEEELVMDGRLTVTTDETGHISAVQKGEGGAFKLEEVMYAVETAFKKAEEIRKIVLEAIKKSGE

SEQ ID NO: 17845 - protein, 276 aa, Aeropyrum pernix
MSITPHRLPVAPVIVREAYLSLLRKGWRPGDRDLKTPRNVKIETGIIEKAEGSALVKLGKTQVIAGVKAGVGAPFKDTPNQGVLTVHAEFVPLASPVFEPGPPDENAIELARVVDRSLREVGAVDLESLVIRPGEKVWVLWVDLYIIDHDGNLFDASMLATMAVLLTARLPRYEESETGEIIISKEGEGEELKVKTRVVTVTTAKIDRYIVVDPNIEEEAVSDVRLVTAVDENGRIVGLQKTGMGSLTEADIETMIGYSLEASKVYFKALEEAIKP

SEQ ID NO: 17846 - protein, 312 aa, Caenorhabditis elegans
MEVHLSDDEKLFLITGAEANIRNDGRSCQDFRQIILERGVLSGTNGSCRVQLGQTTDVLAGIKLELESYDAETEKEPKQPINFNVDFSANASSQFAGKGGDEYAEELSAAFQAAYSKALDIMPNLAKTQLADGYRWKINVDISVLQWDGSVSDAISIAIIGALSDLEFPEGDVAPDDGGKVRIVLKRPKVAGNVRDENVQVAMWKLDVMRCPLLLTISKIGTANLVDCTPEEECCIRSQLLVGLAAIADSSENNEPNYDVTCVKQVGGGLLEMESIQEMLELAAKSVGGLYGALAKRLKNEEMRKPGHSFLL

SEQ ID NO: 17847 - protein, 305 aa, Caenorhabditis elegans
MEVHLSDDEKLFLITGAEANIRNDGRSCQDFRQIILERGVLSGTNGSCRVQLGQTTDVLAGIKLELESYDAETEKEPKQPINFNVDFSANASSQFAGKGGDEYAEELSAAFQAAYSKALDIMPNLAKTQLADGYRWKINVDISVLQWDGSVSDAISIAIIGALSDLEFPEGDVAPDDGGKVRIVLKRPKVAGNVRDENVQVAICPLLLTISKIGTANLVDCTPEEECCIRSQLLVGLAAIADSSENNEPNYDVTCVKQVGGGLLEMESIQEMLELAAKSVGGLYGALAKRLKNEEMRKPGHSFLL

SEQ ID NO: 17848 - protein, 434 aa, Caenorhabditis elegans
MRVQPVTNCEKAVILEALKIGKRFDFRSLEEFRDVKLVVGAEVGTAICTIGNTKVMAAVSAEIAEPSSMRPHKGVINIDVDLSPMANYANEHDRLGSKGMELIRLLELIIRDSRCIDVEALCIRAGKEIWKIRVDVRILDEDGSLLDCACLAAITALQHFRRPNVTLEPHHTLIYSEYEKAPVPLNIYHMPICTTIGLLDKGQIVVIDPTDKETACLDGSIVVACNKRREVCALHQSTNLILSTKQIERCVKLAMARAEALTAVVSDVIKQDQIERSAFKRPDGFAITTPSLILTAGTTASRQIRAPVIKTEPESFTQRSLYQPSVILNENPLSVGSVKQEDVDEETLLAEQLTTIQNSVGQVEVTEKQTVAVSSRKREVEEVNDLLDGLDDDDEEEEVQTMTLGSETVLNDVPMEEAPDAEDSLVNAKKKKKK

SEQ ID NO: 17849 - protein, 617 aa, Caenorhabditis elegans
MRVQPVTNCEKARFDFRSLEEFRDVKLVVGAEVGTAICTIGNTKVMAAVSAEIAEPSSMRPHKGVINIDVDLSPMANYANEHDRLGSKGMELIRLLELIIRDSRCIDVEALCIRAGKEIWKIRVDVRILDEDGSLLDCACLAAITALQHFRRPNVTLEPHHTLIYSEYEKAPVPLNIYHMPICTTIGLLDKGQIVVIDPTDKETACLDGSIVVACNKRREVCALHQSTNLILSTKQIERCVKLAMARAEALTAVVSDVIKQDQIERSAFKRPDGFAITTPSLILTAGTTASRQIRAPVIKTEPESFTQRSLYQPSVILNENPLSVGSVKQEDVDEETLLAEQLTTIQNSVGQVEVTEKQTVAVSSRKREVEEVNDLLDGLDDDDEEEEVQTMTLGSETVLNDVPMEEAPDAEDSLVNAKKKKKNGIPTIFTPVPPHEKALIAEQSLRRFRTSVAKTPSKSDMSSFQESTAADSKQIADPHVLPRMALIRVYFMQNLFTTFELATDRSLQTLLRIVLNAISKEIRNEFSFYVFASPYDVIWKRPRCEVMKTPPSDNIFRQILVPSQMNLTLSELFLETKTDGLELMNIYLFVKNMTDENGSVDGMQSRKSWKYQQVIN

SEQ ID NO: 17850 - protein, 296 aa, Drosophila melanogaster
MAYVALSEAEKTYILHGVEDDFRCDGRSRRDYRPMDLETGLVSNASGSARLRLANTDILVGVKTEIDVPNPLTPEFGKLEFFVDCSANATPEFEGRGGSDLAQELILSLQNAYESPLAFNYRTLCLIPGQQCWKLYIDILILECGGNLHDAVSLAAKAALFNTKLPRVTATMLDAGITDLIISDNPYDCTRIGIETVPLLVTVCKIGDYVLVDPSAEEEVCSTVSMVVSVSMRNGQAFLSGTHLTGGGAMHRDTMRNCLELGLAIGEHLDRLLTKMLNLEQQRVGLKRPQIVGFLK

SEQ ID NO: 17851 - protein, 281 aa, Plasmodium yoelii yoelii
MSSLKYIEEGINSNIRVDGRTLLTYRTIEINKSILVSADGSSSVMNEENNVICGIKLSLLPPEPHSIDEGFVNLQIDCPASVASNRIKKEHLQIMTSIIYDLCIKNNIDKKKLCVLPSKFVWGIDINVMVLNGGGGLLDIISIAIYVALNDMNIPVVKAPKKIDELNMFHNTKSKEYELEIVENEKLPFPCENIPICISIGEINNKYIYDMSKIEEELVENVFVVAVTSSGKCVAFHKLYGISMEVSSILNMSENSVKISQNLFKKINEAIDKIQANTIHV

SEQ ID NO: 17852 - protein, 391 aa, Plasmodium yoelii yoelii
MKTCKNNTNFFWCNLKNKLRLDGRNFEDSRNVSIYFLGDYGNVEVSIGNTKVVCKITSEIVKPYDKKPNEGIIKINLDVESFNTYNNDISKITDECLEIKNLIERIFKASNILNFESLCIIPYKKVWCLLINITVIENDGNLYDSCYLSAYSALLHFRNNNVNIDNTGNVIIDEEEVNYTSLSVHNSPILTTFAYFNFEEICLIDPSLYEEEFMSSKLSIAINKNENLISILKPGGLPISYDTILQGIELAKKRVKSILKILEDALKEDNDLRNNLKKKNLHIKYSSNPVHIKYDGEDIVEKSLDVTINQMVINNLNIEKIVKKYEQYILSNGENINSIIDKNNIEENKILNNNLTLNKQYDIDQELRRIKEENIIKSKIIFIVFLTIIPI

SEQ ID NO: 17853 - protein, 276 aa, Xenopus laevis
MAAGFKTVEPLEYYRRFLKEACRPDGRELTEFRTTTINVGSITTADGSALVKLGNCTVLCGVKAELAAPPADSPDKGYVVPNVDLTPLCSSQFRPGPPGEEAQVASQFMADVIDNSQMLLKEDLCIAHGKLAWVLYCDLICLDYDGNLLDTCMCALVAALQNVRLPSVKINEETGLAEVNLKTKCALKILKHPVATSFALFDDTSLLVDPTGEEESLASGLLTVVTDEDERLCATRKPGGSALSAEKLQECISRAITRHKEVTNLLQEALASVKSE

SEQ ID NO: 17854 - protein, 290 aa, Homo sapiens
ASVTLSEAEKVYIVHGVQEDLRVDGRGCEDYRCVEVETDVVSNTSGSARVKLGHTDILVGVKAEMGTPKLEKPNEGYLEFFVDCSASATPEFEGRGGDDLGTEIANTLYRIFNNKSSVDLKTLCISPREHCWVLYVDVLLLECGGNLFDAISIAVKAALFNTRIPRVRVLEDEEGSKDIELSDDPYDCIRLSVENVPCIVTLCKIGYRHVVDATLQEEACSLASLLVSVTSKGVVTCMRKVGKGSLDPESIFEMMETGKRVGKVLHASLQSVLHKEESLGPKRQKVGFLG

SEQ ID NO: 17855 - protein, 291 aa, Homo sapiens
MASVTLSEAEKVYIVHGVQEDLRVDGRGCEDYRCVEVETDVVSNTSGSARVKLGHTDILVGVKAEMGTPKLEKPNEGYLEFFVDCSASATPEFEGRGGDDLGTEIANTLYRIFNNKSSVDLKTLCISPREHCWVLYVDVLLLECGGNLFDAISIAVKAALFNTRIPRVRVLEDEEGSKDIELSDDPYDCIRLSVENVPCIVTLCKIGYRHVVDATLQEEACSLASLLVSVTSKGVVTCMRKVGKGSLDPESIFEMMETGKRVGKVLHASLQSVLHKEESLGPKRQKVGFLG

SEQ ID NO: 17856 - protein, 260 aa, Ferroplasma acidarmanus
MPMDSSAVLSEIRKGFILESIKTGKRLDGRGLQDYREIKITENFVPKAAGSAMVEIGKTKVVAGIKVEEGDPFEDSPDSGVMALNIELLPMAFPTFESGPPSEQAIEYSRVVDRGIRESKMVDTSKLVIESGKRVWMIFVDIDVLNYDGNIIDAATLAAVTALKNTVVPASKIGQKDYSLPINATPVSITMVKIGDEIVCDPDLEEEQVSNGRITVTIAEDHNIHAMQKGDIGEFSLDEIRKAIKTSSDIGNRLRESYLR

SEQ ID NO: 17857 - protein, 339 aa, Mus musculus
MTDRSPFETDMLTLTRYVMEKGRQAKGTGELTQLLNSMLTAIKAISSAVRKAGLANLYGISGSVNVTGDEVKKLDVLSNSLVINMLQSSYSTCVLVSEENKEAVITAQERRGKYVVCFDPLDGSSNIDCLASIGTIFAIYRKTTEDEPSEKDALQPGRNIVAAGYALYGSATLVALSTGQGVDLFMLDPALGEFVLVEKDVRIKKKGKIFSLNEGYAKYFDAATAEYVQKKKFPEDGSEPYGARYVGSMVADVHRTLVYGGIFMYPANQKSPNGKLRLLYECNPVAYIIEQAGGMATTGTQPVLDVKPESIHQRVPLILGSPEDVQEYLSCVQRNQAGR

SEQ ID NO: 17858 - protein, 339 aa, Mus musculus
MTDRSPFETDMLTLTRYVMEKGRQAKGTGELTQLLNSMLTAIKAISSAVRKAGLANLYGISGSVNVTGDEVKKLDVLSNSLVINMLQSSYSTCVLVSEENKEAVITAQERRGKYVVCFDPLDGSSNIDCLASIGTIFAIYRKTTEDEPSEKDALQPGRNIVAAGYALYGSATLVALSTGQGVDLFMLDPALGEFVLVEKDVRIKKKGKIFSLNEGYAKYFDAATAEYVQKKKFPEDGSAPYGARYVGSMVADVHRTLVYGGIFMYPANQKSPNGKLRLLYECNPVAYIIEQAGGMATTGTQPVLDVKPESIHQRVPLILGSPEDVQEYLSCVQRNQAGR

SEQ ID NO: 17859 - protein, 354 aa, Mus musculus
MTDRSPFETDMLTLTRYVMEKGRQAKGTGELTQLLNSMLTAIKAISSAVRKAGLANLYGISGSVNVTGDEVKKLDVLSNSLVINMLQSSYSTCVLVSEENKEAVITAQERRGKYVVCFDPLDGSSNIDCLASIGTIFAIYRKTTEDEPSEKDALQPGRNIVAAGYALYGSRTLVALSTGQGVDLFMLDPALGEFVLVEKDVRIKKKGKIFSLNEGYAKYFDAATAEYVQKKKFPEDGSEPYGARYVGSMVADVHRTLVYGGIFMYPANQKSPNGKLRLLYECNPVAYIIEQAGGMATTGTQPVLDVKPESIHQRVPLILGPLRMCKSISAVCRETRQAGSEPEPMSPLPFVFVN

SEQ ID NO: 17860 - protein, 338 aa, Mus musculus
MANHAPFETDISTLTRFVMEQGRKAQGTGELTQLLNSLCTAIKAISSAVRQAGIAQLYGIAGSTNVTGDQVKKLDILSNDLVINMLKSSYATCVLVSEENTNAIIIEPEKRGKYVVCFDPLDGSSNIDCLVSIGTIFGIYRKKSTDEPSEKDALQPGRDLVAAGYALYGSATMLVLAMDCGVNCFMLDPSIGEFIMVDRDVKMKKKGNIYSLNEGYAKDFDPAINEYLQRKKFPPDGSAPYGARYVGSMVADIHRTLVYGGIFLYPANKKSPSGKLRLLYECNPIAYVMEKAGGLATTGDKDILDIVPTEIHQKAPVVMGSSEDVQEFLEIYRKHKAK

SEQ ID NO: 17861 - protein, 94 aa, Mus musculus
LQPGRDLVAAGYALYGSATMLVLAMDCGVNCFMLDPSIGEFIMVERDGKMKKKGNIYSLNEGYAKDFNPAILEYHQRQKFHEDGTAPYGTRYVG

SEQ ID NO: 17862 - protein, 339 aa, Rattus norvegicus
MTDRSPFETDMLTLTRYVMEKGRQAKGTGELTQLLNSMLTAIKAISSAVRKAGLANLYGIAGSVNVTGDEVKKLDVLSNSLVINMLQSSYSTCVLVSEENKEAVITAKERRGKYVVCFDPLDGSSNIDCLASIGTIFAIYRKTTEDEPSEKDALQPGRNIVAAGYALYGSATLVALSTGQGVDLFMLDPALGEFVLVEKDIRIKKKGKIFSLNEGYAKYFDAATAEYVQKKKFPEDGSAPYGARYVGSMVADVHRTLVYGGIFMYPANQKSPNGKLRLLYECNPVAYIIEQAGGMATTGTQPVLDVKPESIHQRVPLILGSPEDVQEYLSCVQRNQAGR

SEQ ID NO: 17863 - protein, 363 aa, Rattus norvegicus
MVDHAPFETDISTLTRFVLEEGRKAGGTGEMTQLLNSLCTAIKAISSAVRQAGIAQLYGIAGSTNVTGDQVKKLDILSNDLVINMLKSSYATCVLVSEEDTHAIIIEPEKRGKYVVCFDPLDGSSNIDCLASIGTIFGIYRKTSANEASEKDALQPGRNLVAAGYALYGSATMLVLAMNCGVNCFMLDPSIGEFILVDRDVKIKKKGNIYSINEGYAKDFDPAINEYIQRKKFPPDNSAPYGARYVGSMVADVHRTLVYGGIFLYPANKKNPSGKLRLLYECNPIAYVMEKAGGLATTGNEDILDIVPTEIHQKAPVIMGSTEDVQEFLEIYNKDKAKSRPSLPLPQSRARESPVHSICDELF

SEQ ID NO: 17864 - protein, 363 aa, Rattus norvegicus
MVDHAPFETDISTLTRFVLEEGRKAGGTGEMTQLLNSLCTAIKAISSAVRQAGIAQLYGIAGSTNVTGDQVKKLDILSNDLVINMLKSSYATCVLVSEEDTHAIIIEPEKRGKYVVCFDPLDGSSNIDCLASIGTIFGIYRKTSANEPSEKDALQPGRNLVAAGYALYGSATMLVLAMNCGVNCFMLDPSIGEFILVDRDVKIKKKGNIYSINEGYAKDFDPAINEYIQRKKFPPDNSAPYGARYVGSMVADVHRTLVYGGIFLYPANKKNPSGKLRLLYECNPIAYVMEKAGGLATTGNEDILDIVPTEIHQKAPVIMGSTEDVQEFLEIYNKDKAKSRPSLPLPQSRARESPVHSICDELF

SEQ ID NO: 17865 - protein, 349 aa, Nostoc sp. PCC 7120
MAKASESLDLSVNESTDKALDRDCTTLSRHVLQQLQSFSADAQDLSALMNRIALAGKLVARRLSRAGLMEGVLGFTGEVNVQGESVKKMDVYANDVFISVFKQSGLVCRLASEEMDEPYYIPENCPIGRYTLLYDPIDGSSNTDTNLSLGSIFSIRQQEGDDSDGQAKDLLTNGRKQIAAGYILYGPSTMLVYTMGTGVHSFTLDPSLGEFILSEENIRIPDHGAVYSVNEGNFWQWEESMREYIRYVHRTEGYTARYSGAMVSDIHRILVQGGVFLYPGTIQNPEGKLRLLYESAPLAFLIQQAGGRATTGLVDILDVVPKKLHQRTPLIIGSKEDVAKVESFIQNGH

SEQ ID NO: 17866 - protein, 331 aa, Rhodobacter capsulatus
MAIELEGLGLSPELADVMTRLARVGADLARTIARNGVETDLAAGVGTNAGGDGQKALDVMADDAFREALTGTAVAYYASEEQDEVVTLGKGTLALAIDPLDGSSNIDVNVSIGTIFSIFPATDDPNTSFLRKGSEQIAGGYIIYGPQCALVCSFGRGVHHWVLDLDSRSFKRLPDIKALPQDTSEYAINASNYRHWPSPIRAFIDDLVAGAEGPRGRNFNMRWIASLVAETHRILMRGGVFLYPGDERKGYARGRLRHVYECAPIAFLITQVGGGATDGCEDILSALPDKLHARTPFVFGCAAKVARVTAYHDLPGQETSAPFNTRGLFRS

SEQ ID NO: 17867 - protein, 418 aa, Rhodobacter sphaeroides
MEERHAEGFLQVPDLAVDCRRRQTEARGPARQRGAARHRHEGAQLLQGDRIEPHHFQIPEQNFYLIKFHKIRSAASWAHVAEEMPVKPFPTHPDAIPAELQDVMDRLGSVAIEVANRIARGGIDEDLAGLCGTNTDGDGQKALDVIADDAFRVALEGSAVRFYASEEQDTAVTLNEAGTLALAIDPLDGSSNIDTNLSVGTIFAIWPAAATAEASFLRLGSELIAAGYVIYGPQVCMMVSFGKGTQKYVLDPGSRSFVLVDRAVKVPPSSTEFAINASNYRHWPKPIRAYIDDCVAGTEGPRGRNFNMRWLASLVAETHRILARGGVFLYPRDSRKGYEQGRLRYLYECAPIAFVITQAGGGATDGENPILGQTPSRLHARTPFVFGSAEKVARITAYHDLPEQETSALFGNRGLFRS

SEQ ID NO: 17868 - protein, 333 aa, Rhodobacter sphaeroides
MKPFPTHPDAIPAELQDVMDRLGSVAIEVANRIARGGIDEDLAGLCGTNTDGDGQKALDVIADDAFRVALEGSAVRFYASEEQDTAVTLNEAGTLALAIDPLDGSSNIDTNLSVGTTFAIWPAAPRPNPSFLRLGSELIAAGYVIYGPQVCMMVSFGKGTQKYVLDPGSRSFVLVDRAVKVPPSSTEFAINASNYRHWPKPIRAYIDDCVAGTEGPRGRNFNMRWLASLVAETHRILARGGVFLYPRDSRKGYEQGRLRYLYECAPIAFVITQAGGGATDGENPILGQTPSRLHARTPFVFGSAEKVARITAYHDLPEQETSALFGNRGLFRS

SEQ ID NO: 17869 - protein, 331 aa, Rhodobacter sphaeroides
MAIELEDLGLSPDVADVMQRLARVGAGIARIISRNGLERDLGAGVGTNAGGDGQKALDVIADDAFRAALEGSAVAYYASEEQDEVVTLGEGSLALAIDPLDGSSNIDVNVSIGTIFSIFPAAAGPEASFLRPGTEQIAGGYIIYGPQCALVCSFGQGVQHWVLDLDAGIFRRMPDIRPLPAETSEFAINASNYRHWPQPIRAFVDDLVAGAEGPRGKNFNMRWIASLVAETHRILMRGGVFLYPGDERKGYERGRLRHVYECAPIAFLIANVGGGATDGCADILTALPDRLHARTPFVFGCASKVARVAAYHDLACEETSALFGSRGLFRS

SEQ ID NO: 17870 - protein, 369 aa, Rhodopseudomonas palustris
MTDRLTSSAQRSSRNHLVALRCGGVIMDQGQTLSVLLDSYAVDPQKKAVAAAVGAIAAGSIEISELIGQGALAGITGAAHGGSNADGDVQKDLDVKAEQIIVKSLKDVPYAALASEESDTLLDGDPNAPISIAYDPLDGSSNIDTNMTVGTIFSIIPNQPGVKPFTAAGSCQIAAGFVVYGPQTSLVLTLGDGVNIFTLDRKAKVYRLIRERVKVPADTAEYAVNASNHRHWEQPIRDFVDECIAGADGPRAKDFNMRWIGSLVAEVYRILTRGGVFLYPGDNRPGYGNGRLRLLYETHPMSFVMEQAGGAASTGRERVLDLTAKTIHQRSPLIMGSIDKVKRIELLHTDPSAASRSAPLFARRGLFRV

SEQ ID NO: 17871 - protein, 369 aa, Rhodospirillum rubrum
MSVLSQDRPRERPPMLATDRTTLAQFLVEECRGRAGDDSELLGLLLDVAQACKTISKMTAMGSLAGVHGYNGDVNPQGENQARLDLMSNQAFVRATERTGHAAGLASEEMEEVLGFPESYARGTLLLVFDPLDGSSNIDINGTVGSIFSILPMPRPGEAPQTADFLQSGRQQVAAGYALYGPSTMFVLTIGSGVHGFTLDPLLGDFILTHPSMTVIPESGEFAINSSNSRFWEPPIRAYVDELLAGRSGPRSKDYNMRWIAALVADVHRILLRGGIYLYPRDTKTPDLAGRLRLLYEAAPVAFLMEQAGGRCTTGTRTMLDLVPGSLHERVPLIFGSAVEVERVETLYREPQRREFATPLFNQRGLFRD

SEQ ID NO: 17872 - protein, 344 aa, Synechococcus sp. PCC 7942
MAQSTTSETHTRDLDRDCTTLSRHVLEQLQSFSPEAQDLAALMQRIGLAAKLIARRLSHAGLVDDALGFTGEINVQGEAVKRMDVYANQVFISVFRQSGLVCRLASEEMEKPYYIPENCPIGRYTLLYDPLDGSANVDVDLNVGSIFAVRRQEFYDESHEAKDLLQPGDRQIAAGYVLYGASTLLVYSMGQGVHVFVLDPSLGEFVLAQSDIQLPNSGQIYSVNEGNFWQWPEGYRQYIREMHRREAYSGRYSGALVADFHRILMQGGVFLYPETVKNPTGKLRLLYEAAPMAFLAEQAGGKASDGQKPILLRQPQALHERCPLIIGSAADVDFVEACLAESVP

SEQ ID NO: 17873 - protein, 347 aa, Synechocystis sp. PCC 6803; identical to SEQ ID NO: 463

SEQ ID NO: 17874 - protein, 338 aa, Ralstonia metallidurans
MTRISLTRYLVEEQRKHNTIEPELRLLIEVVARACKAISNAVSKGALAGVLGSAGTGNVQGETQQKLDVIANEVLLDANEWGGHLAAMASEEMDSFYEIPNRYPKGEYLLLFDPLDGSSNIDVNVSIGTIFSVLHMHKPGQTVTEHDFMQPGTQQVAAGYAVYGPQTTLVLTVGNGVHMFTLDREAGSFVLTQSDVMIPEDTKEFAINMSNMRHWAPPVRRYIDECLAGDEGPRGKNFNMRWIASMVADVHRILTRGGVFMYPWDKREPEKPGKLRLMYEANPMAFLVEQAGGAATNGQQRILDVEPTKLHQRVSVILGSKNEVERVTRYHQEDAAKA

SEQ ID NO: 17875 - protein, 289 aa, Ralstonia metallidurans
  unsure (1)..(289): unsure at all Xaa locations
MPLSHRQTLTRYLIEERRRCXPRATRRTQRADPRCGAGMQGAGPRSVSSREXXRATALSDGSAAPTGGGINVQGEVQKPLDVQSNEMFIRMNEWNGQLAGMASEEMEEPYLIPSSYPRGKYLLVFDPLDGSSNIDVNVSIGSIFSILRAPADVVASGRDVTEADFLQPGAAQVAAGYTIYGPTTQLVLTVGNGVAAFTLDPNLGEFLLTRSDIRVPEQTQEFAINSSNSRFWEPPVKRYVDECLAGKTGPRGKDFNMRWVASMVAEAHRILMRGGVFMYPRDTKDPAKP

SEQ ID NO: 17876 - protein, 196 aa, Ralstonia metallidurans
MIATACKVIATAASRGALAGVLGSAEHENVQGEVQKKLDVISNAILVHATERGGHLVALASEEMDTIYPIPAAFPRGKYLLVFDPLDGSSNIDANISVGAIFSVLRSPDPEVPPTLEHFLQAGAGQVCAGYALYGPATMLVLTTGQGTHGFTLDRDVGEFILTHPMLRIPAATQEFAINTSRGLLVFSAISDGTQS

SEQ ID NO: 17877 - protein, 339 aa, uncultured cyanobacterium
MAQSTTSETHTRDLDRDCTTLSRHVLEQFQSFSPEAQDLAALMQRIGLAAKLIARRLSHAGLVDDALGFTGEINVQGEASKRMDVYANQVFISVFRQSGLVCRLASEEMEKPYYIPENCPIGRYTLLYDPLDGSANVDVDLNVGSIFAVRRQEFYDESHEAKDLLQPGDRQIAAGYVLYGASTLLVYSMGQGVHVFVLDPSLGEFVLAQSDIQLPNSGQIYSVNEGNFCSGPKVSPVHPGNASPRRLQRRYSGALVADFHRILMQGGVFLYPETVKNPTGKLRLLYEAPPMAFLAEQAGGKASDGQKPILLRQPQALHRRCPLIIGSAADVDFVDSLLG

SEQ ID NO: 17878 - protein, 324 aa, Neisseria meningitidis MC58
MDTLTRFLPEHLQQNQLPEALGGVLLSVVSACTEINAKVRLGALAGVLGMAGTGNIQGEDQKKLDVIANNIMIDTLKANSAVAGLASEEEDTFVNAGENGRYLVLFDPLDGSSNIDVNISVGTIFSILEKPEGALATESFLQTGRQQLAAGYVLYGPQTQLVFTFGHGVYMFTLNAENEFVLTKENPKVPESTKEFAINMSNRRHWLPPVQQYIDELLAGETGTRGKNYNMRWVASMVAEIHRILMRGGVFMYPQDKRDPAKPGKLRLMYEANPMSLILEQAGASASNAYQAMLDIQPENLHQRVAVFMGSSEEVAYLDRLHAK

SEQ ID NO: 17879 - protein, 324 aa, Neisseria meningitidis Z2491
MDTLTRFLPEHLQQNQLPEALGGVLLSVVSACTEINAKVRLGALAGVLGMAGTGNIQGEDQKKLDVIANNIMIDTLKANPAVAGLASEEEDSFVSAGENGRYLVLFDPLDGSSNIDVNISVGTIFSILEKPEGALATESFLQTGRQQLAAGYVLYGPQTQLVFTFGHGVYMFTLNAENEFVLTKEKPKVPESTKEFAINMSNRRHWLPPVQQYIDELLAGETGTRGKNYNMRWVASMVAEIHRILMRGGVFMYPQDKRDPSKPGKLRLMYEANPMALILEQAGASASNARQDILGIRPESLHQRVAVIMGSSEEVDYLNRLHSK

SEQ ID NO: 17880 - protein, 422 aa, Cyanidium caldarium
EFGTRKDVQVYFIQVLLYLYKEECQEITTAKDIFLIRWISIKMIAVQPQPKKTPVAEYLQTSQDTPTSLTRYLLEVAKQNKDMGDMVALINGIQFACKKIASLVGKAGVTDLMGIYQQGIVNVHGEEQKKLDVLSNEVLKNALKYSGKMAVIASEEEDVPIMVEESYSGNYVVVFDPLDGSSNLDAGLPTGTIFGVFQQQFSCLIHDYEESIDNMELACLQNTLQPGRRLIAAGYCIYSSSTMLVLSLGNGLHCFTLDTEVGEFVLTRANIQIPQRGNIYSFNESNFYQWDKGVQDYIERLKKGNNQTNCRYSARYVGSMVADVHRTILYGGIFGYPADKKNVSGKLRLVYECAPMAYLVEQAGGKATTGIENILDLTPKDIHERKPLILGSPADIEEFLQVYGMSRVDREDMHMWDNLSSL

SEQ ID NO: 17881 - protein, 338 aa, Burkholderia fungorum
MALQRRTTLTKYLIEQQRETNNLPADLRLLIEVVARACKAISYHVSKGALGDALGTAGSENVQGEVQKKLDILSNEILLEANEWGGNLAGMASEEMEQFFPIPANYPKGEYLLVFDPLDGSSNIDVNVSIGTIFSVLRCPDGQQPTEQSFLQPGTQQVAAGYAVYGPQTVLVLTTGNGVNCFTLDRELGSWVLTQSDMRIPVETREYAINASNERHWYPPVQQYIGELKDGKEGSRQSDFNMRWIASMVADVHRILNRGGIFMYPADKRTPDKPGKLRLMYEANPMAFIVEQAGGAATNGEKRILDIQPKSLHERVAVFLGSKNEVDRVTRYHLETKK

SEQ ID NO: 17882 - protein, 378 aa, Burkholderia fungorum
MQDGRTTLSKFLIDTLDRQPCSTETARNAGLSALLIDVAAAIKSISAMLTKGALGGNYGSAQSINTHGEEQKKLDVATNEIFVQQCEWDGLLAAMVSEEMESVYAIPPGYPRGDYLLAFDPLDGSSNIDINGVVGSIFSVLRNGEGNGNANEKNGSDPRGTVGESAFLRPGCEQVAAGYAVYGPSTMLVLSVGNGTHGFTLEREIGNFVLTHSNIRIPEDTVEFAINASNERFWEPPVRRYVQECKDGRSGCRASDFNMRWIASMVAEVHRILMRGGVFMYPRDSKTPAMEGRLRLLYEANPMSFLVEQAGGLSITGRERILDVVPRALHGRVPVILGSKHEVERIGRYHGEYDRGEDQPFTSPLFSRRSLFLPGFTA

SEQ ID NO: 17883 - protein, 313 aa, Rhizobium sp. TAL1145
MTDIREWTSTVGLENELGEVLSGLANACATIARTLRTAPLAQLSGSAGSLNVQGEAQKPLDIISNEVFVNACRELAQISLAVSEEEEDPIPISATGSYAVVFDPLDGSSNLDVNVTVGSIFSVVSATTPKHILPGGRPQHIAGFASYGPSTDLTVLAKGRVARFTLDASDTWRLVELDMRLPDRFPEIAINAARADSWDDVIRGFVNDAFHGNEIRYNARWVASLVAETQRILSRGGLFLYPADSSGRGRLRLLYEARPIAAIVEAAGGRCSTGFMPILEVNAETLHDRVPLIFGGASQVEALEAAYRADKEN

SEQ ID NO: 17884 - protein, 332 aa, Escherichia coli O157:H7 EDL933
MKTLGEFIVEKQHEFSHATGELTALLSAIKLGAKIIHRDINKAGLVDILGASGAENVQGEVQQKLDLFANEKLKAALKARDIVAGIASEEEDEIVVFEGCEHAKYVVLMDPLDGSSNIDVNVSVGTIFSIYRRVTPVGTPVTEEDFLQPGNKQVAAGYVVYGSSTMLVYSTGCGVHAFTYDPSLGVFCLCQERMRFPEKGKTYSINEGNYIKFPNGVKKYIKFCQEEDKSTNRPYTSRYIGSLVADFHRNLLKGGIYLYPSTASHPDGKLRLLYECNPMAFLAEQAGGKASDGKERILDIIPETLHQRRSFFVGNDHMVEDVERFICEFPDA

SEQ ID NO: 17885 - protein, 331 aa, Saccharum sp.
MTITRHVLNEQSRNPESRGDFTILLSHIVLGCKFVASAVNKAGLAQLIGLAGETNVQGEEQKKLDVLSNEVFVKALVSSGRTCVLVSEEDEETTFVDPKLRGKYCVCFDPLDGSSNIDCGVSIGTIFGIYMIKDKDNVTLSDVLQPGKDMLAAGYCMYGSSCTLVLSTGTGVNGFTLDPSLGEFILTHPDIKIPKKGKIYSVNEGNAKNWDVPVAKFVEKCKYPKDGSPPKSLRYIGSMVADVHRTLLYGGVFLYPADQKSPNGKLRVLYEVFPMSFLMEQAGGQSFTGKERALDLVPTKIHERSPIFLGSYDDVEEIKALYAEQAKSSSA

SEQ ID NO: 17886 - protein, 336 aa, Pseudomonas putida KT2440
MSRVTLSRYLIEQTRSNNTPADLRFLIEVVARACKEISHHVSKGALGGVLGSMGTENVQGEVQKKLDVISNDILLEANEWGGHLAGMASEEMDNAYQIPGRYPKGAYLLVFDPLDGSSNIDVNVSVGTIFSVLRCPNQYLSQNESLNEEAFLQPGTEQVAAGYAIYGPQTMLILTLGNGVKGFTLDRELGSFVLTHENIRVPETTAEFAINMSNQRHWEAPVQRYVGELLAGETGPLKKNYNMRWIASMVADVHRILTRGGLFMYPRDAREPSKPGKLRLMYEANPMSFIIEQAGGASTNGYDRILDIKPESLHQRVSVILGSKEEVERVTAYHKE

SEQ ID NO: 17887 - protein, 341 aa, Beta vulgaris
MDHAADATRTDLMTITRFVLNEQSKRPESRGDFTILMSHIVLGCKFVCSAVNKAGLAKLIGLAGETNIQGEEQKKLDVLSNEVFIKALISSGRTCILVSEEDEEATFVEPSLRGKYCVVFDPLDGCSNIDCGVSIGTIFGIYMVKDLNNATLDDVLQPGKNMVAAGYCMYGSSCTLVMSTGSGVNGFTHDPSLGEFILTHPDIKIPKKGKIYSVNEGNAKNWDGPTTKYVEKCKFPKDGSSPKSLRYIGSMVADVHRTLLYGGIFMYPGDKKSPNGKLRVLYEVFPMSFLMEQAGGQAFTGEQRALDLVPKNIHDRSPVFLGSYDDVEDIKALYAAEQKNA

SEQ ID NO: 17888 - protein, 329 aa, Beta vulgaris
MTITRFVLNEQSKRPESRGDFTILMSHIVLGCKFVCSAVNKAGLAKLIGLAGETNIQGEEQKKLDVLSNEVFIKALISSGRTCILVSEEDEEATFVEPSLRGKYCVVFDPLDGCSNIDCGVSIGTIFGIYMVKDLNNATLDDVLQPGKNMVAAGYCMYGSSCTLVMSTGSGVNGFTHDPSLGEFILTHPDIKIPKKGKIYSVNEGNAKNWDGPTTKYVEKCKFPKDGSSPKSLRYIGSMVADVHRTLLYGGIFMYPGDKKSPNGKLRVLYEVFPMSFLMEQAGGQAFTGEQRALDLVPKNIHDRSPVFLGSYDDVEDIKALYAAEQKNA

SEQ ID NO: 17889 - protein, 355 aa, Emericella nidulans
MTTNSTGNGGAVGQENINTDIVTLSRFFTEEQTKVPEATGDFTLLCHALQFSFKSIAYYIRRASLINLTGLAGSSNTTGDDQKKLDVIGNDLFVSAMRTSGKCRILVSEEEEEAIIFDEHPNARYAVVCDPIDGSSNLDAGVSVGTIFGIFRLPDDILGPGKKVTAKDVLLPGTEMVAAGFTMYGASAQLVITMKNGGVNGFTLENSLGEFILTHPNMKLPPSRAIYSVNEGNSMYWDDWCNAYFDSLKRPGEGKKPYSARYIGSMVADAYRTLLYGGVFAYPADSKSPKGKLRILYECAPMAMVFENAGGKAVNSRMERLLSVQPESIHDKSGVFLGSRDEVQKVIDTYNKYKK

SEQ ID NO: 17890 - protein, 343 aa, Anopheles gambiae str. PEST
ESASVAIMTQQGPAFDSNCMTLTRFVLQEQKKYKHATGDLSQLLNCIQTAIKAISSAVRKAGIAKLQGISGDTNVQGEQVKKLDVLSNEIFINMLKSSYATCLLVSEENDNVIEIETDKRGKYVVSFDPLDGSSNIDCLVSIGSIFAITKQVKENTTPSEQDALQPGNKIVAAGYALYGSATMIVISLGNGVHGFMYDPSIGEFVLTDYNMRIPERGNIYSINEGYASTWDESVLNYVKDKKDPAKGKPYGARYVGSMVADVHRTIKYGGIFIYPATAAAKNGKLRLLYECNPMAYLVTQAGGKAYATKGKEILDVMPTSIHQRSPIYLGSKLDVEEAISYIK

SEQ ID NO: 17891 - protein, 372 aa, Yersinia pestis KIM
MELPMNQSYLWATLLTLAVLCINKSIFNRRFRDCVMKTLGEFIVEKQLDFSHATGELTALLSAIKLGAKIIHRDINKAGLVDILGASGVSNIQGEDQMKLDLFANEKLKAALKARGEVAGIASEEEDDIVIFDGGRAENAKYVVLMDPLDGSSNIDVNVSVGTIFSIYRRITPFGTPITEEDFLQPGTKQVTAGYVVYGSSTMLVYTTGYGVHAFTYDPSLGVFCLSHEKVRYPATGCMYSINEGNYIKFPLGVKKYIKYCQEQDEATKRPYTSRYIGSLVADFHRNLLKGGIYIYPSTASHPQGKLRLLYECNPMAFLAEQAGGKATDGVNRILDIVPEKLHQRAPFFVGTKSMVEDAEGFIAKFPDEEAK

SEQ ID NO: 17892 - protein, 337 aa, Magnetospirillum magnetotacticum
MPYKRITLTHFLLQEQRRLGGSGSFTALMTDIIFACKMISHEVNRGALAGNLGVAGSENVQGEEQKKLDVLANDIFLHMNALGGSYAGMASEELEDVHAVHGAADGKYLLLFDPLDGSSNIDVNISVGSIFSILKLPEGADAGSKDAFLQPGVKQVAAGYALYGSSTMMVLTTGNGVNGFTLDNNVGMFLLTHPNMTIPADTKEFAINASRERFWEPPVKRYIDECRQGKEGPRGKDFNMRWVASMVAEVHRILCRGGVFLYPADTENMKKGGKLRLMYEANPMAFIVEQAGGAATTGRGRMMEVQPTGLHQRVPVILGSKTEVERIGAYHTEYDAK

SEQ ID NO: 17893 - protein, 374 aa, Leptospira interrogans serovar lai str. 56601
MSFHFQTFYGIFSLEFTDPQKNSVGIIFLEESMSVHPTQTLSLSQYLIEEQLKLPQATGDFTALMSHLVYAAKIVSREVRKAGLLENILGATETVNVQGETQMKLDEYADKVFNHTLTRSGHLCILGSEEHEETVPVPNGYKIGKYTIAIDPLDGSSNIDANVSIGTIFSVHLRKSPAGTPGTLSDLLQQGSGQRAAGYVLYGSSTMLILCTGKGVSGFTLDPSCGEFILSHPDMQIPETGGIYSINEGNYNYWSDEVKNYIRDIKSIEGGRKPQSGRYIGSLVADFHRNLLKGGIFLYPNDTKSTKYPNGKLRLLYEAAPMAFIAEQAGGMAVTVYGERILDLTPKELHERTTLVVGSKKEVEHFLKFAPKKS

SEQ ID NO: 17894 - protein, 338 aa, Xanthomonas campestris pv. campestris str. ATCC 33913
MSRPSLTRFLIEEQHAGRIDPELRQLITIVSRACKRISIAVSKGALGGVLGDAGTGNVQGEAQKKLDVLSNDILLEANAWGGHLAACASEEMDHSQPVPDQYPSGDFLLLFDPLDGSSNIDVNVSVGTIFSVLRAPKGTEKPGDEHFLQPGTQQVAAGYCIYGPSTMLVLTLGHGTHAFTLEREEGSFLLTQADMRVPEDTAEFAINMSNQRHWEPAMQAYVGDLLAGKDGARGKDFNMRWIASMVADVHRILTRGGIFIYPWDKKDAAKPGKLRLMYEANPMGMLVEQAGGAATTGRERILDIQPTQLHQRVPVFLGSKNEVAEATRYHVEFDKAQG

SEQ ID NO: 17895 - protein, 336 aa, Xanthomonas axonopodis pv. citri str. 306
MSRPSLTRFLIEEQHAGRIDAELRQLITIVSRACKRISIAVSKGALGGVLGDAGTGNVQGEAQKKLDVLSNDILLEANAWGGHLAACASEEMDHSQPVPDQYPSGDFLLLFDPLDGSSNIDVNVSVGTIFSVLRAPKGTEKPGDEHFLQPGTQQVAAGYCIYGPSTMLVLTLGHGTHAFTLEREEGSFLLTQANMRVPEDTAEYAINMSNQRHWEPAMQAYVGDLLAGKDGARGKDFNMRWIASMVADVHRILTRGGIFIYPWDKKDPSKPGKLRLMYEANPMSMLVEQAGGAATTGRERILDIQPTQLHQRVPVFLGSKNEVAEATRYHLDADKA

SEQ ID NO: 17896 - protein, 336 aa, Caulobacter crescentus CB15
MGRSAFGSRTRMTAFVDLAARLAAEPADAALKDVVLTIAETCAQISRVVASGALSGSLGAAGSTNVQDEEQKKLDVITNDMLSDALKACGPVAGLASEELEEVEPTGRVGGYLVTFDPLDGSSNIDVNVSVGTIFSVLPAPAGHAPTEGDFLQPGRNQVAAGYAVYGPQTMLVVTLSGGVNGFTLSADGRWLLTHPDLAIKPDTAEFAINMSNQRHWAPAVRRYIDGCLQGKDGARGKNFNMRWVASMVADVHRIMMRGGVFMYPWDAREPDKPGKLRLMYEANPMSLLAERAGGKSIEGLNEILDINPAKLHQRVPVVLGSANEVEVIRAEMRAG

SEQ ID NO: 17897 - protein, 280 aa, Campylobacter jejuni subsp. jejuni NCTC 11168
MQEVISYIQKAVLEISNALKFPDTSYSQNQNFTGDTQLKFDVLSDEIITKTLSQCSSIKAIISEEKDEILTLNERANFIVAYDPLDGSSLMDVNFAIGSIFAIYEEKASAKNLRAALYSMYGARLELVICKDQPKLYRLNANNEFIFIKDLRMNEKGKINATGGTQKFWEEKHAKFIKSLFDEGYRLRYSGAMVSDINQILLKGGGIFSYPATQDAPNGKLRAFFEVFPLAFIIEKAGGKTTNGKNRSLLELEFDKIHATTPCFFGSEYEISKLLKAYNE

SEQ ID NO: 17898 - protein, 333 aa, Chlorobium tepidum TLS
MNKLTTIESHFLQLQKRYPEINSEVTDLLNDVAFAAKLVRREVVRAGLADILGLAGSTNVQGEEVKKLDLFANERLINAIGQHGRFAIMGSEENEEIIKPPKFESGEYVLLFDPLDGSSNIDVNVSVGTIFSIYRLKSGEPSQASLEDCLQKGADQIAAGYVIYGSSVMMVYTTGHGVHGFTYDQTVGEFLLSHENITTPEHGKYYSVNEGSWQEFNDGTKRFLDYLKEEDKATGRPYSTRYIGSFVADFHRNLLTGGVFVYPATKKHKNGKLRLMYEANPMAFICEQAGGRATDGYRRILDIEPKELHQRTPLYIGSKNDVLIAEEFEQGKR

SEQ ID NO: 17899 - protein, 348 aa, Thermosynechococcus elongatus BP-1
MTDYAAHQQALDRDCLTLSRHVLQQLQSFDAAAQDLSALMNRIALAGKLIARRLSRAGLMEGVLGFTGAVNIQGEDVKKMDVYANEVFIAAFKQSGLVCRLASEEMAQPYYIPENCPIGRYTLLYDPLDGSSNVDINLNVGSIFAIRQQEGTDLDSTAADLLQDGHQQIAAGYILYGPSTMLVYSLGKGTHVFVLDPSLGEFILAIENLQIPASGAIYSVNEGNFWAWEEPIRNYVRHVHRQPGYSARYSGALVADIHRILMEGGVFLYPGTQKNPAGKLRLLYEAAPIAFLVEQAGGKASTGTQPLLDVVPDHLHMRTPLIVGSPENVALVESFIQQTPAQPTVTQV

SEQ ID NO: 17900 - protein, 353 aa, Shigella flexneri 2a str. 301
MRLFVKIVAVALLHKHCRESFMKTLGEFIVEKQHEFSHATGELTALLSAIKLGAKIIHRDINKAGLVDILGASGAENVQGEVQQKLDLFANEKLKAALKARDIVAGIASEEEDEIVVFEGCEHAKYVVLMDPLDGSSNIDVNVSVGTIFSIYRRVTPVGTPVTEEDFLQPGNKQVAAGYVVYGSSTMLVYTTGCGVHAFTYDPSLGVFCLCQERMRFPEKGKTYSINEGNYIKFPNGVKKYIKFCQEEDKSTNRPYTSRYIGSLVADFHRNLLKGGIYLYPSTASHPDGKLRLLYECNPMAFLAEQAGGKASDGKERILDIIPETLHQRRSFFVGNDHMVEDVERFIREFPDA

SEQ ID NO: 17901 - protein, 353 aa, Escherichia coli CFT073
MGLFVKIVAVALLHKHCRESFMKTLGEFIVEKQHEFSHATGELTALLSAIKLGAKIIHRDINKAGLVDILGASGAENVQGEVQQKLDLFANEKLKAALKARDIVAGIASEEEDEIVVFEGCEHAKYVVLMDPLDGSSNIDVNVSVGTIFSIYRRVTPVGTPVTEEDFLQPGNKQVAAGYVVYGSSTMLVYTTGCGVHAFTYDPSLGVFCLCQERMRFPEKGKTYSINEGNYIKFPNGVKKYIKFCQEEDKSTNRPYTSRYIGSLVADFHRNLLKGGIYLYPSTASHPDGKLRLLYECNPMAFLAEQAGGKASDGKERILDIIPETLHQRRSFFVGNDHMVEDVERFIREFPDA

SEQ ID NO: 17902 - protein, 322 aa, Microbulbifer degradans 2-40
MQNLQGMLRDQRVAQDLQEVIFSIELACKDIAKKVQLGALAGVLGATESENVQGETQKKLDVISNDILKASLAANSNVLALASEEEDNVVAANAGGRYVVAFDPLDGSSNIDINGQIGTIFTIFEALDGVAANSGKHFLQQGNKQVCAGYVLYGASTLMVITVDGPTSCLTLDPATQTFSLTNTALQVPDQTQEFAVNLANERFWLPKFKSYVADLKLGEEGVRGKRFNMRWNASMVGDVHRVLMRGGIFMYPSDTRNPKQPAKLRLLYEANPMALLIERAGGKAFNETQRILDVTPCALHERIAVILGSEQEVATCLEYLN

SEQ ID NO: 17903 - protein, 354 aa, Trichodesmium erythraeum IMS101
MVNTQAREDLHIRLEETQLLDRDCTTLSRHVLQQLHFSPDAQDISSLMNRIGLAGKLIARRLTRAGLLEDTLGFTGTVNVQGESVKKMDIYANDVFISVFKQSGLVCRLASEEMEKPYYIPENCPIGRYTLLYDPLDGSSNLDTNLNVGSIFSVRQQEGNDENGLAQDLLQNGHKQIAAGYILYGPSTMLVYSIGQGVHAFTLDPSLGEFILVNENIKIPEHGPVYSVNEGNFWQWDDSMRDYIRYVHRHEGYTARYGGALVGDFHRILYQGGVFLYPGTVKKPEGKLRLLYESAPMGYLVEQAGGRASTGTEEILDVVADQLHQRTPLIIGSKEDVALVESFIKEQKRISNQG

SEQ ID NO: 17904 - protein, 271 aa, Trichodesmium erythraeum IMS101
GESVKKMDIYANDVFISVFKQSGLVCRLASEEMEKPYYIPENCPIGRYTLLYDPLDGSSNLDTNLNVGSIFSVRQQEGNDENGLAQDLLQNGHKQIAAGYILYGPSTMLVYSIGQGVHAFTLDPSLGEFILVNENIKIPEHGPVYSVNEGNFWQWDDSMRDYIRYVHRHEGYTARYGGALVGDFHRILYQGGVFLYPGTVKKPEGKLRLLYESAPMGYLVEQAGGRASTGTEEILDVVADQLHQRTPLIIGSKEDVALVESFIKEQKRISN

SEQ ID NO: 17905 - protein, 340 aa, Brucella suis 1330
MTLVGNFSPLVLVGDSDRVEAETVGAYLDGWAGHDKVRLATANAIKAILSGAGRLVGRIARGYLPGDPGKLVGVNSDQDQQKSIDVGSHNLFVELLIAAGVASILSEEADLPVAGKADGLVAVAIDPLDGSGNVGLGAPLGTIFSIFPADVEEPFLQPGNRQIAAGYVSYGNSVDLGFSVGEGVIFATLDPVSGQFHITRRNVKLPERTSDLAFNASVQRHLSAGMQAYVNDAFLGKDGPRGRNFNMRWLGAAVGDMHRIMQRGGLFFYVNDSRPGYEKGRLRLVYEANPIAFLAREAGGKATDGSRPILDIVPQTYHERSALVFGVAEELDILGEYFVK

SEQ ID NO: 17906 - protein, 336 aa, Pseudomonas syringae pv. syringae B728a
MSRVTLSRYLIEQTRSNNTPADLRFLIEVVARACKEISHAVSKGALGGVLGSMGTENVQGEVQKKLDVISNEILLEANEWGGHLAGMASEEMDNAYQIPGKYPKGAYLLVFDPLDGSSNIDINAPVGTIFSVLRCPNEYLSQNEALNEKAFLQPGTEQVAAGYAIYGPQTMLVLTLGDGVKGFTLDREMGSFVLTHEDITIPESTQEFAVNMSNQRHWEAPVQRYVSELLAGEDGPLKKNYNMRWVAAMVADVHRILTRGGLFMYPRDSREPSKPGKLRLMYEANPMSFLVEQAGGASTDGHQRILDIQPEGLHQRVAVYLGSKEEVERATAYHKA

SEQ ID NO: 17907 - protein, 336 aa, Pseudomonas fluorescens PfO-1
MSRVTLSRYLIEQTRSNNTPADLRFLIEVVARACKEISHAVSKGALGGVLGSMGTENVQGEVQKKLDVLSNEILLEANEWGGHLAGMASEEMDNAYQIPGKYPKGAYLLVFDPLDGSSNIDINAPVGTIFSVLRCPNEYLSQNEALDEKAFLQPGTQQVAAGYAIYGPQTMLVLTLGHGVKGFTLDREMGSFVLTHEDITIPESTQEFAINMSNQRHWEAPVQRYVSELLAGEEGPLKKNYNMRWVAAMVADVHRILTRGGLFMYPRDSREPSKPGKLRLMYEANPMSFLVEQAGGASTDGHQRILDIKPEGLHQRVAVFLGSKEEVARATAYHKE

SEQ ID NO: 17908 - protein, 338 aa, Desulfovibrio desulfuricans G20
MRQVTVTEHLLLHQTKSPAATGQFTALLYDLILAAKIISKSVNKAGLLDVLGGTGQVNVQGEHVQKLDEYANRVLIHRMERTGVLCAMASEENADLIRVPERFEAGDYILIFDPLDGSSNIDVNINVGTIFSILKRKPGASGSKDVTLGDVLQSGVEQVAAGYFLYGPSTMLVYSSGQGVHGFTLDPSVGEFLLSHPDIRYPEQGRIYSVNESYWHYWDEPTREVVSYFKGPDNPLGKPYSLRYVGSLVADFHRNLFYGGIFMYPMDYRLPEKPQGKLRLMCEASPLAFLAEQAGGRATDGTKRILDIVPGELHQRVPLFIGSAGDVDAVEAIYRRHS

SEQ ID NO: 17909 - protein, 336 aa, Pseudomonas aeruginosa PAO1
MSRVTLSRYLIEQTRSHNTPADLRFLIEVVARACKEISHAVSKGALGGVLGSMGTENVQGEVQKKLDVMSNEILLEANEWAGNLAGMASEEMDHPYQIPGRYPKGAYLLVFDPLDGSSNIDVNVSVGTIFSVLRCPNEYLNQNDTLREEAFLQPGTTQVAAGYAIYGPQTMLMLTLGNGVKGFTLDRELGSFVLTHDNISVPESTAEFAINMSNQRHWEAPVKRYVEELLAGKEGPLGKNYNMRWIASMVADVHRILTRGGVFMYPRDAREPEKPGKLRLMYEANPMSFIIEQAGGAATNGTQRILDIKPENLHQRVAVFLGSKQEVERITGYHAE

SEQ ID NO: 17910 - protein, 325 aa, Shewanella oneidensis MR-1
MQTLAQHLTSKAVNESLAQLILTLADTSKAISHAVRHGALAGVLGATEQENVQGETQKKLDIITNDMLKDALKADGTVRGLASEEEDHVVEVSANGQYLVCFDPLDGSSNIDINSLVGTIFSVLPAPQGELTEASFLQSGRNQLAAGYVLYGPSTMLALTTGQGVQLFTLHPETNEFLLTNATMSISPDTSEFAINMSNQRFWEAPMQTYIADLLLGKIGPREKSFNMRWIAAMVGDVHRVLSRGGIFTYPTDNKDPKKPYKLRLMYEANPMAFLVEQAGGKASTGYETILDIQPTQIHQRVAVILGSANEVDACLSYHGIDSRK

SEQ ID NO: 17911 - protein, 337 aa, Yersinia pestis CO92
MKTLGEFIVEKQLDFSHATGELTALLSAIKLGAKIIHRDINKAGLVDILGASGVSNIQGEDQMKLDLFANEKLKAALKARGEVAGIASEEEDDIVIFDGGRAENAKYVVLMDPLDGSSNIDVNVSVGTIFSIYRRITPFGTPITEEDFLQPGTKQVTAGYVVYGSSTMLVYTTGYGVHAFTYDPSLGVFCLSHEKVRYPATGCMYSINEGNYIKFPLGVKKYIKYCQEQDEATKRPYTSRYIGSLVADFHRNLLKGGIYIYPSTASHPQGKLRLLYECNPMAFLAEQAGGKATDGVNRILDIVPEKLHQRAPFFVGTKSMVEDAEGFIAKFPDEEAK

SEQ ID NO: 17912 - protein, 338 aa, Vibrio vulnificus CMCP6
MSGMRTLGEFIVEKQADFPHASGDLSSLLSSIRLAAKIVNREINKAGLVDITGAAGVENIQGEVQQKLDVYANEKFKSALEARDQVCGVASEEEDEAVAFNKELNKNAKYVVLMDPLDGSSNIDVNVSVGTIFSIYRRVSPIGTPPTQEDFLQPGHKQVAAGYIIYGSSTMLVYTTGNGVNGFTYDPSLGTFCLSHENMMIPQNGNIYSINEGNYIRFPMGVKKYIKYCQENVPEDGRPYTSRYIGSLVADFHRNLLKGGIYLYPSTQSHPQGKLRLLYECNPMAFLIEQAGGLASDGVNRILDLKPTELHQRVPFFVGSTNMVKKVEEFLEVYRDEA

SEQ ID NO: 17913 - protein, 336 aa, Pseudomonas syringae pv. tomato str. DC3000
MSRVTLSRYLIEQTRSNNTPADLRFLIEVVARACKEISHAVSKGALGGVLGSMGTENVQGEVQKKLDVISNEILLEANEWGGHLAGMASEEMDNAYQIPGKYPKGAYLLVFDPLDGSSNIDINAPVGTIFSVLRCPNEYLSQNEALNEKAFLQPGTEQVAAGYAIYGPQTMLVLTLGDGVKGFTLDREMGSFVLTHEDITIPETTQEFAVNMSNQRHWEAPVQRYVSELLAGEDGPLKKNYNMRWVAAMVADVHRILTRGGLFMYPRDSREPSKPGKLRLMYEANPMSFLVEQAGGASTDGHQRILDIQPEGLHQRVAVYLGSKEEVERATAYHKE

SEQ ID NO: 17914 - protein, 338 aa, Vibrio parahaemolyticus RIMD 2210633
MSGMRTLGEFIVEKQADFPHASGDLSSLLASIRLAAKIVNREINAAGLGDITGAVGTENVQGEAQQKLDVYANDKFKAALEARDQVCGVASEEEDEAVAFNKELNQNAKYVVLMDPLDGSSNIDVNVSVGTIFSIYRRVSPIGTPATEEDFLQPGHKQVAAGYVIYGSSTMLVYTTGNGVNGFTYDPSIGSFCLSHENMMIPEDGKIYSINEGNYIRFPQGVKKYIKYCQENVPEDGRPYTSRYIGSLVADFHRNLLKGGIYLYPSTQSHPQGKLRLLYECNPMAFLIEQAGGIASDGVNRIMDIKPTELHQRVPFFVGSKNMVRKVEEFLELHRDEE

SEQ ID NO: 17915 - protein, 345 aa, Bradyrhizobium japonicum USDA 110
MTGQLRLDDHLQRYSETAPHALAVATAVDAIAAAAIEIADLIGAGDLADASGLTTGRNSDGDVQRDLDVQADAILRRCLGKLSIAALASEEMREPQIGDRAARICVAIDPLDGSSNIDINMTVGTIFSILPAPDDLALAFHQRGSAQFAAGFVTYGPQTSLVLTLGDGVDIFTLDRKAGCFRLARSAIQISEAGEEFAINASNRRHWDPPVRAFIDECLAGVEGPANHDFNMRWVGSLVAEAYRILTRGGVFLYPSDARPGYGDGRLRLTYEAHPMAYIIEQAGGSASTGRERILDLSAQSLHQRVPLIMGSSNEVRRVEELHCDPLLVASISAPLFARRGFFRL

SEQ ID NO: 17916 - protein, 340 aa, Brucella melitensis 16M
MTLVGNFSPLVLVGDSDRVEAETVGAYLDGWAGHDKVRLATANAIKAILSGAGRLVGRIARGYLPGDPGKLVGVNSDQDQQKSIDVGSHNLFVELLIAAGVASILSEEADLPVAGKADGLVAVAIDPLDGSGNVGLGAPLGTIFSIFPADVEEPFLQPGNRQIAAGYVSYGNSVDLGFSVGEGVIFATLDPVSGQFHITRRNVKLPERTSDLAFNASVQRHLSAGMQAYVNDAFLGKDGPRGRNFNMRWLGAAVGDMHRIMQRGGLFFYVNDSRPGYEKGRLRLVYEANPIAFLAREAGGKATDGSRPILDIVPQTYHERSALVFGVAEEVDILGEYFVK

SEQ ID NO: 17917 - protein, 364 aa, Xanthobacter flavus
MLEPNADHRAAVAQAAGVAASRITLTVMLDEWAGADARRRAVADTVCALATGCASLAAAIAEGPLAGDLARTLSSGEAGEGQKALDVISNDIVIGALKAAPVAAVASEENDAPVLLDPTAPLLVAIDPLDGSSNIDTDISVGTIFAVFPRPEGADASEPSAFLQNGRDMLAAGYVIYGPHTAMMLTLGAGTWHFALDRAGLFRLVDAEVKVKEGAAEFAINMSNYHHWDVPVRDYVDDCLAGKKGPRERDFNMRWVASMVADAHRIFQRGGIYLYPGDGRKGYTHGRLRLLYEAFPVAFLMEQASGSATDGRGAILDLSATGLHQRVPFIFGSRDEVARVSRYHLEPNGHGERSPLFARRGLFI

SEQ ID NO: 17918 - protein, 314 aa, Geobacter metallireducens
MPFSEPGKTKFQVDLRRHLRNQGICDNLVHLICEIAEASKYVINAVRTGDLGVAGTSNLYGEEQLALDVLSDRIIKKRLIHSGVVCNIASEEMDEIFQAQADADGLYSVAYDPLDGSSLVDVNLAVGTIVSIYEGCNLLQKGRNQVAALYILYGPRVSMVYSVGRGVHEFTMNHLMEFTLSRENIVMQEEGNIYAPGGLRNKYQEGTEQFVRYLEEKGAKLRYSGGFVPDINQVIMKGKGIFMYPALNGSPNGKLRLLFELNAMAYLVENAGGAATDGKQPILDLEPHSLDQRAPVYIGCKADVVKAMEFVSRN

SEQ ID NO: 17919 - protein, 355 aa, Kluyveromyces lactis
MAGIKHRRDSAESINTDIITLSRFILDQQHLSAKNATGEFSMLLNSLQFAFKFISQTIRRAELVNLIGLAGASNSTGDQQKKLDVLGDEIFINAMKASGNVKVLVSEEQEDLIVFRNSPGKYAVCCDPIDGSSNLDAGVSVGTIVSLFKIHENQNGNSGEEDSEGTINDVARCGREMVAACYTMYGASTHLVLTTGAGVNGFTLDNNLGEFILTYPELRLPEQKSIYSINEGNTCYWEPTIADFIAKLKENSEENNGKPYSARYIGSMVADVHRTLLYGGLFSYPGDKKNPNGKLRLLYEAFPMAFLVEQAGGKAVNDRGERILDLVPQHIHDKSSIWLGSSGDVDKYLKHIGKL

SEQ ID NO: 17920 - protein, 344 aa, Nitrobacter vulgaris
MSQELTLQQRMDGEAGSDPLRQAVKEAVAALARAAVDISDLTCRGALAGITGQAQGRNTDGDIQKDLDVRADQIIRDALGKLPIAALASEEMADLDILNPAAPICVAFDPLDGSSNINTNMSVGTIFSIMPTPSDVNAAFRQAGSAQLAAGFVVYGPQTSLVLTLGRGVDIFTLDRADRVFKLTGSSVQIPTDANEFAINASNRRHWDLPVRAYIDECLAGADGPCGKNFNMRWIGSLVAEAFRILIRGGIFLYPGDARDGYEEGRLVVYEAHPMAFIVEQAGGGASTGRKRVLDIVPDSLHQRVPLIMGSIKNVQRLEHMHTVPDVALEANAPLFGNRGLFRV

SEQ ID NO: 17921 - protein, 359 aa, Hydrogenophilus thermoluteolus
MSWAHTPTLTQYLIEERRRYPQASGDFNALILDMARACKAIARQVAYGALAKSNHAVTTTINVQGEEQKPLDVISNECFMRLTEWGGYLAAMASEEMDEPYLIPEQYPRGRYLLLFDPLDGSSNIDVNVSVGSIFSVLRAPEGKTEITVDDFLQPGTQQVAAGYAIYGPTTMLVLTVGRGVVGFTLDPDFGEFMLTHPNIRIPESTKEFAINTSNARFWEPPVKRYVDECLKGKTGPRGKDFNMRWVASLVAETHRILSRGGVFLYPRDNKEPKKPGRLRLLYECNPIGMIVEQAGGRASTGYGPVLEVQPTELHQRIGFVFGSREEVERIEQYHNDPDASPVDLPLFAERTLFRDETL

SEQ ID NO: 17922 - protein, 338 aa, Ralstonia solanacearum
MKRINLTRYLIEEQREHNTIPAELRLLLEVVARACKAISHSVNKGALAGVLGSAGTGNVQGETQQKLDVIANEVLLEANEYGGNLAAMASEEMESFYEIPHRYPKGEYLLLFDPLDGSSNIDVNVSIGTIFSVLHMPKPGQTVTEADFMQPGVRQVAAGYAVYGPQTTLVLTVGNGVHMFTLDREVGSFILTNRDVKIPADTKEFAINMSNMRHWAPPVRRYIDECLAGTEGPRGKDFNMRWIASMVADVHRILTRGGIFMYPWDKREPGKAGKLRLMYEANPMAFLVEQAGGAATNGHQRILEIQPEKLHQRVAVILGSKNEVDRVTQYHREAQQTA

SEQ ID NO: 17923 - protein, 337 aa, Azotobacter vinelandii
MSRVTLSRYLIEQTRSHNTPADLRFLIEVVARACKEISHAVSKGALGGVLGSMGTENVQGEVQKKLDVMSNEILLEANEWGGHLAGMASEEMDSAYQIPGKYPKGAYLLVFDPLDGSSNIDVNVSVGTIFSVLRCPDQYLTQNDSLNEQAFLQPGTQQVAAGYAIYGPQTMLMLTLGNGVKGFTLDRELGSFVLTHDNLCVPETTAEFAINMSNQRHWEPPVKRYVDELLAGKTGPLDKDYNMRWIASMVADVHRILTRGGIFMYPRDAREPSKPGKLRLMYEANPMSFIIEQAGGAATNGTQRILDIQPESLHQRVAVFLGSKAEVERITDYHLEG

SEQ ID NO: 17924 - protein, 415 aa, Spinacia oleracea
MASIGPATTTAVKLRSSIFNPQSSTLSPSQQCITFTKSLHSFPTATRHNVASGVRCMAAVGEAATETKARTRSKYEIETLTGWLLKQEMAGVIDAELTIVLSSISLACKQIASLVQRAGISNLTGIQGAVNIQGEDQKKLDVVSNEVFSSCLRSSGRTGIIASEEEDVPVAVEESYSGNYIVVFDPLDGSSNIDAAVSTGSIFGIYSPNDECIVDSDHDDESQLSAEEQRCVVNVCQPGDNLLAAGYCMYSSSVIFVLTIGKGVYAFTLDPMYGEFVLTSEKIQIPKAGKIYSFNEGNYKMWDDKLKKYMDDLKEPGESQKPYSSRYIGSLVGDFHRTLLYGGIYGYPRDAKSKNGKLRLLYECAPMSFIVEQAGGKGSDGHQRILDIQPTEIHQRVPLYIGSVEEVEKLEKYLA

SEQ ID NO: 17925 - protein, 358 aa, Spinacia oleracea
AAVGEAATQTKARTRSKYEIETLTGWLLKQPMAGVIDAELTIVLSSISLACKQIASLVQRAGISNLTGIQGAVNIQGEDQKKLDVVSNEVFSSCLRSSGRTGIIASEEEDVPVAVEESYSGNYIVVFDPLDGSSNIDAAVSTGSIFGIYSPNDECIVDSDHDDESQLSAEEQRCVVNVCQPGDNLLAAGYCMYSSSVIFVLTIGKGVYAFTLDPMYGEFVLTSEKIQIPKAGKIYSFNEGNYKMWPDKLKKYMDDLKEPGESQKPYSSRYIGSLVGDFHRTLLYGGIYGYPRDAKSKNGKLRLLYECAPMSFIVEQAGGKGSDGHQRILDIQPTEIHQRVPLYIGSVEEVEKLEKYLA

SEQ ID NO: 17926 - protein, 335 aa, Agrobacterium rhizogenes
MTITPDIELGAYLLQRKIDPALASLIESIAASATVVADHLKEAAFQNHIGSAGTTNVQGEDQKLLDVLADRVFRETCGEAVSLAAYVSEEAEDVTWLKAPAAGDLILYVDPLDGSSNLEVNLSVGSIFAVSQVQADGDTNVLRKGRDYLCAGYAIYGPSTLFVITFGLGVVGFTLDPSDGQFKLTNARMRVPTETTEFAVNSSRQRFWDEPIRRYVDECLAGSAGPRGQDFNMRWTASMVADVHRILTRGGVFLYPADDSNRRAGGKLRLMYEANPMAFLIEAAGGAASTGTEDILRIQPQAHHQRVSVLLGSSNEIQRLVQFHQIHHSQEEIGS

SEQ ID NO: 17927 - protein, 328 aa, Wigglesworthia glossinidia endosymbiont of Glossina brevipalpis
MISLREFIFSNNVNKYISKEDLYSLFIIIELTSKIIHNYIILNNITRIKQEKIKKNIHGEHQTKLDLLSNKKFIDMIKTHYNIAGIASEEEAKFISFKQEKYGKYIFLIDPLDGSLSADCNTPVGTIFSLYCRVTPIGVEISEKDFLQPGNKQILSGYILYGSSTILVFTVKSGVHIFTYHPFFSTFFLSKKNFNYPKKNNIYSINEANYNNFSLGIKKYIMSCKSNNNISSRYTGSLVADFHRNLIKGGIYLYPNTKIYKHGKLRLMYECNPIALISSQANGSSSDGNINILDINPKILHQCSPFFVGTKSMVKLVNKFILGYYNHN

SEQ ID NO: 17928 - protein, 417 aa, Arabidopsis thaliana
MAASAATTTSSHLLLSSSRHVASSSQPSILSPRSLFSNNGKRAPTGVRNHQYASGVRCMAVAADASETKTAARKKSGYELQTLTGWLLRQEMKGEIDAELTIVMSSISLACKQIASLVQRAGISNLTGVQGAINIQGEDQKKLDVISNEVFSNCLRSSGRTGIIASEEEDVPVAVEESYSGNYVVVFDPLDGSSNIDAAVSTGSIFGIYSPNDECIVDDSDDISALGSEEQRCIVNVCQPGNNLLAAGYCMYSSSVIFVLTLGKGVFSFTLDPMYGEFVLTQENIEIPKAGRIYSFNEGNYQMWDDKLKKYIDDLKDPGPTGKPYSARYIGSLVGDFHRTLLYGGIYGYPRDAKSKNGKLRLLYECAPMSFIVEQAGGKGSDGHSRVLDIQPTEIHQRVPLYIGSTEEVEKLEKYLA

SEQ ID NO: 17929 - protein, 417 aa, Arabidopsis thaliana
MAATAATTTSSHLLLSSSRHVASSSQPSILSPRSLFSNNGKRAPTGVRNHQYASGVRCMAVAADAAETKTAARKKSGYELQTLTGWLLRQEMKGEIDAELTIVMSSISLACKQIASLVQRAGISNLTGVQGAVNIQGEDQKKLDVISNEVFSNCLRSSGRTGIIASEEEDVPVAVEESYSGNYVVVFDPLDGSSNIDAAVSTGSIFGIYSPNDECIVDDSDDISALGSEEQRCIVNVCQPGNNLLAAGYCMYSSSVIFVLTLGKGVFSFTLDPMYGEFVLTQENIEIPKAGRIYSFNEGNYQMWDDKLKKYIDDLKDPGPTGKPYSARYIGSLVGDFHRTLLYGGIYGYPRDAKSKNGKLRLLYECAPMSFIVEQAGGKGSDGHSRVLDIQPTEIHQRVPLYIGSTEEVEKLEKYLA

SEQ ID NO: 17930 - protein, 417 aa, Brassica napus
MAATAATTSSSHLLLSSSRHVAASSQPQILFQRSLFSGGKRSAAGKNHHASGGVRCMAVAADASAEAKPAAARKKSGYELQTLTGWLLRQEQKGEIDTELTIVMSSIAMACKQIASLVQRAGISNLTGVQGAVNIQGEDQKKLDVVSNEVFSNCLRSSGRTGIIASEEEDVPVAVEESYSGNYIVVFDPLDGSSNIDAAVSTGSIFGIYSPNDECIVDDSDDISSLGSEEQRCIVNVCQPGNNLLAAGYCMYSSSVIFVLTLGKGVFSFTLDPMYGEFVLTQENIEIPKAGKIYSFNEGNYQMWDEKLKKYIDDLKDPGPSGKPYSARYIGSLVGDFHRTLLYGGIYGYPRDAKSKNGKLRLLYECAPMSFIVEQAGGKGSDGHQRVLDIQPTEIHQRVPLYIGSKEEVEKLEKYLA

SEQ ID NO: 17931 - protein, 411 aa, Brassica napus
MAATAGATPSSHLLLSSSRHVAASPQPRILFPSLSGKRVAVGKNHHATGVRCMAVAADATAETKPAAKKKSGYELQTLTSWLLRQEMKGEIDTELTIVMSSIAMACKQIASLVQRAGISNLTGVQGAVNIQGEDQKKLDVVSNEVFSNCLRSSGRTGIIASEEEDVPVAVEESYSGNYVVVFDPLDGSSNIDAAVSTGSIFGIYSPNDECLPDSDDTSALGSEEERCIVNVCQPGNNLLAAGYCMYSSSVIFVLTLGKGVFAFTLDPMYGEFVLTQENIEIPKAGKIYSFNEGNYQMWDENLKKYIDDLKDPGPSGKPYSARYIGSLVGDFHRTLLYGGIYGYPRDAKSKNGKLRLLYECAPMSFIVEQAGGKGSDGHHRVLDIQPTEIHQRVPLYIGSKEEVEKLEKYLA

SEQ ID NO: 17932 - protein, 349 aa, Sinorhizobium meliloti
MSGATLEAYLASCTARGDDLSRDVAAVIQRLAKAALDIRKLVNQGALGTAFNGTHGGSNTDGDLQKDLDILCDDQFLTCLQGAPVACYASEELENPVLLDPSARLAVAIDPLDGSSNIDNNVSIGTIFSVLPAAKGPDVDPSQSFLQPGNRQLAAGFFIYGPQTALVLSLGKGTEIFIFSSRLGCFVEAYKSAIIPERAHEFAINMSNYRHWEEAIRLYVDDCLAGSEGPRERDFNMRWIASLVAETYRILIRGGIFLYPADGRKGYSQGRLRLVYEANPIAFIIENAGGAATTSIDRILDLVPENLHQRVPLVFGSRREVARITRYHVDPNMIGERAPLFGKRGLFRA

SEQ ID NO: 17933 - protein, 349 aa, Sinorhizobium meliloti
MSGATLEAYLASCTTHGDELSRDVAAVIQRLAKAALDIRKLVNQGALGTVFNGMHSGSNTDGDVQKDLDILCDDQFLSCLQGAPVACYASEELENPVLLDPAARLAVAIDPLDGSSNIDNNISIGTIFSVLPAAKGPDVDPSHSFLQPGNRQLAAGFFVYGPQTALVLSLGRGTDIFIFSSRLGCFVDAYKSVGIPDRANEFAINMSNYRHWEEAIRLYVDDCLAGSEGPRERDFNMRWIASLVAEAYRILVRGGIFLYPADSRKGYSHGRIRLVYEANPIAFIVENAGGSATTSVDRILDLVPESLHQRVPLVFGSRREVGRITRYHVDPNMIGERAPLFGKRGLFRA

SEQ ID NO: 17934 - protein, 202 aa, Sinorhizobium meliloti
MSGATLEAYLASCTARGDDLSRDVAAVIQRLAKAALDIRKLVNQGALGTAFNGTHGGSNTDGDLQKDLDILCDDQFLTCLQGAPVACYASEELENPVLLDPSARLAVAIDPLDGSSNIDNNVSIGTIFSVLPAAKGPDVDPSQSFLQPGNRQLAAGFFIYGPQTALVLSLGKGTEIFIFSSRLGCFVEAYKSAIIPERAHEF

SEQ ID NO: 17935 - protein, 410 aa, Glycine max
MVAMAAATASSQLIFSKPRSPSRLCPFQLCVFDTKQVLSSSSGRRRHVGGSGVRCMAVGEAATTETKKRSGYELQTLTNWLLKQEQAGVIDAELTIVLSSISMACKQIASLVQRANISNLTGVQGAVNVQGEDQKKLDVVSNEVFSNCLRSSGRTGIIASEEEDVPVAVEESYSGNYIVVFDPLDGSSNIDAAVSTGSIFGIYSPNDECLADIGDDPTLDTTEQRCVVNVCQPGSNLLAAGYCMYSSSIIFVLTLGNGVFVFTLDPMYGEFVLTQENLQIPRAGKIYAFNEGNYQLWDDKLKKYIDDLKDPGPSGKPYSARYIGSLVGDFHRTLLYGGIYGYPRDKKSKNGKLRLLYECAPMSFIVEQAGGKGSDGHQRILDIQPTEIHQRVPLYIGSVEEVEKVEKYLA

SEQ ID NO: 17936 - protein, 408 aa, Glycine max
MVAMAAATASTQLIFSKPCSPSRLCPFQLCVFDTKQVLSSGRRRHVGGSGVRCMAVGEAATTGTKKRSGYELQTLTNWLLKQEQAGVIDAELTIVLSSISMACKQIASLVQRANISNLTGVQGAVNVQGEDQKKLDVVSNEVFSNCLRSSGRTGIIASEEEDVPVAVEESYSGNYIVVFDPLDGSSNIDAAVSTGSIFGIYSPNDECLADIGDDPTLDTTEQRCVVNVCQPGSNLLAAGYCMYSSSIIFVLTLGNGVFVFTLDPMYGEFVLTQENLQIPRAGKIYAFNEGNYQLWDDKLKKYIDDLKDPGPSGKPYSARYIGSLVGDFHRTLLYGGIYGYPRDKKSKNGKLRLLYECAPMSFIVEQAGGKGSDGHQRILDIQPTEIHQRVPLYIGSVEEVEKVEKYLA

SEQ ID NO: 17937 - protein, 414 aa, Glycine max
  unsure (1)..(414): unsure at all Xaa locations
MVAMAAATASTQLIFSKPRSPSRLCPFQLCVFDTKQVLSSSSGRRRHVGGSGVRCMAVGEAATTGTKKRSGYELQTLTNWLLKQEQAGVIDAELTIVLSSISMACKQIASLVQRANISNLTGVQGAVNVQGEDQKKLDVVSNEVFSNCLRSSGRTGIIASEEEDVPVAVEESYSGNYIVVFDPLDGSSNIDAAVSTGSIFGIYSPNDECLADIGDDPTVSLLDTTEQRCVVXNVCQPGSNLLAAGYCMYSSSIIFVLTLGNGVFVFTLDPMYGEFVLTQENLQIPRAGKIYAFNEGNYQLWDDKLKKYIDDLKDPGPSGKPYSARYIGSLVGDFHRTLLYGGIYGYPRDKKSKNGKLRLLYECAPMSFIVEQAGGKGSDGHQRILDIQPTEIHQRVPLYIGSVEEVEKVEKYLA

SEQ ID NO: 17938 - protein, 412 aa, Glycine max
MELFATTMVAMAAATASTQLIFSKPCSPSRLCPFQLCVFDTKQVLSSGRRRHVGGSGVRCMAVGEAATTGTKKRSGYELQTLTSWLLKQEQAGVIDAELTIVLSSISMACKQIASLVQRANISNLTGVQGAVNVQGEDQKKLDVVSNEVFSNCLRSSGRTGIIASEEEDVPVAVEESYSGNYIVVFDPLDGSSNIDAAASTGSNFWIYSPNDECLADIDDDPTLDTTEQRCIVNVCQPGSNLLAAGYCMYSSSIIFVLTLGNGVFVFTLDPMYGEFVLTQENLQIPRAGKIYAFNEGNYQLWDEKLKKYIDDLKDPGQSGKPYSARYIGSLVGDFHRTLLYGGIYGYPRDKKSKNGKLRLLYECAPINFIVEQAGGKGTDGLQVLRLQGTEIHQRVPLYIGEEVEKVEKYLA

SEQ ID NO: 17939 - protein, 402 aa, Glycine max
MAAATASTQLIFSKPCSPSRLCPFQLCVFDTKQVLSSGRRRHVGGSGVRCMAVGEAATTGTKKRSGYELQTLTSWLLKQEQAGVIDAELTIVLSSISMACKQIASLVQRANISNLTGVQGAVNVQGEDQKKLDVVSNEVFSNCLRSSGRTGIIASEEEDVPVAVEESYSGNYIVVFDPLDGSSNIDAAASTGSNFWIYSPNDECLADIDDDPTLDTTEQRCIVNVCQPGSNLLAAGYCMYSSSIIFVLTLGNGVFVFTLDPMYGEFVLTQENLQIPRAGKIYAFNEGNYQLWDEKLKKYIDDLKDPGQSGKPYSARYIGSLVGDFHRTLLYGGIYGYPRDKKSKNGKLRLLYECAPINFIVEQAGGKGTDGLQVLRLQGTEIHQRVPLYIGEEVEKVEKYLA

SEQ ID NO: 17940 - protein, 407 aa, Pisum sativum
MAAATASSQLIFSKPYSPSRLCPFQLCVFDAKSVLSSSRRKHVNGSGVRCMAVKEATSETKKRSGYEIITLTSWLLQQEQKGIIDAELTIVLSSISMACKQIASLVQRANISNLTGTQGAVNIQGEDQKKLDVISNEVFSNCLRSSGRTGIIASEEEDVPVAVEESYSGNYIVVFDPLDGSSNLDAAVSTGSIFGIYSPNDECLPDFGDDSDDNTLGTEEQRCIVNVCQPGSNLLAAGYCMYSSSVIFVLTIGKGVFVFTLDPLYGEFVLTQENLQIPKSGKIYSFNEGNYKLWDENLKKYIDDLKEPGPSGKPYSARYIGSLVGDFHRTLLYGGIYGYPRDKKSKNGKLRLLYECAPMSFIVEQAGGKGSDGHQRVLDIQPTEIHQRVPLYIGSTEEVEKVEKYLA

SEQ ID NO: 17941 - protein, 381 aa, Pisum sativum
CVFDAKSVLSSSRRKHVNGSGVRCMAVKEATSETKKRSGYEIITLTSWLLQQEQKPIIDAELTIVLSSISMACKQIASLVQRANISNLTGTQGAVNIQGEDQKKLDVISNEVFSNCLRSSGRTGIIASEEEDVPVAVEESYSGNYIVVFDPLDGSSNLDAAVSTGSIFGIYSPNDECLPDFGDDSDDNTLGTEEQRCIVNVCQPGSNLLAAGYCMYSSSVIFVLTIGKGVFVFTLDPLYGEFVLTQENLQIPKSGKIYSFNEGNYKLWDENLKKYIDDLKEPGPSGKPYSARYIGSLVGDFHRTLLYGGIYGYPRDKKSKNGKLRLLYECAPMSFIVEQAGGKGSDGHQRVLDIQPTEIHQRVPLYIGSTEEVEKVEKYLA

SEQ ID NO: 17942 - protein, 357 aa, Pisum sativum
MAVKEATSETKKRSGYEIITLTSWLLQQEQKGIIDAELTIVLSSISMACKQIASLVQRANISNLTGTQGAVNIQGEDQKKLDVISNEVFSNCLRSSGRTGIIASEEEDVPVAVEESYSGNYIVVFDPLDGSSNLDAAVSTGSIFGIYSPNDECLPDFGDDSDDNTLGTEEQRCIVNVCQPGSNLLAAGYCMYSSSVIFVLTIGKGVFVFTLDPLYGEFVLTQENLQIPKSGKIYSFNEGNYKLWDENLKKYIDDLKEPGPSGKPYSARYIGSLVGDFHRTLLYGGIYGYPRDKKSKNGKLRLLYECAPMSFIVEQAGGKGSDGHQRVLDIQPTEIHQRVPLYIGSTEEVEKVEKYLA

SEQ ID NO: 17943 - protein, 407 aa, Pisum sativum
MAAATASSQLIFSKPYSPSRLCPFQLCVFDAKSVLSSSRRKHVNGSGVRCMAVKEATSETKKRSGYEIITLTSWLLQQEQKGIIDAELTIVLSSISMACKQIASLVQRANISNLTGTQGAVNIQGEDQKKLDVISNEVFSNCLRSSGRTGIIASEEEDVAVAVEESYSGNYIVVFDPLDGSSNLDAAVSTGSIFGIYSPNDECLPDFGDDSDDNTLGTEEQRCIVNVCQPGSNLLAAGYCMYSSSVAFVLTIGKGVFVFTLDPLYGEFVLTQENLQIPKSGEIYSFNEGNYKLWDENLKKYIDDLKEPGPSGKPYSARYIGSLVGDFHRTLLYGGIYGYPRDKKSKNGKLRLLYECAPMSFIVEQAGGKGSDGHQRVLDIQPTEIHQRVPLYIGSTEEVEKVEKYLA

SEQ ID NO: 17944 - protein, 357 aa, Pisum sativum
MAVKEATSETKKRSGYEIITLTSWLLQQEQKPIIDAELTIVLSSISMACKQIASLVQRANISNLTGTQGAVNIQGEDQKKLDVISNEVFSNCLRSSGRTGIIASEEEDVPVAVEESYSGNYIVVFDPLDGSSNLDAAVSTGSIFGIYSPNDECLPDFGDDSDDNTLGTEEQRCIVNVCQPGSNLLAAGYCMYSSSVIFVLTIGKGVFVFTLDPLYGEFVLTQENLQIPKSGKIYSFNEGNYKLWDENLKKYIDDLKEPGPSGKPYSARYIGSLVGDFHRTLLYGGIYGYPRDKKSKNGKLRLLYECAPMSFIVEQAGGKGSDGHQRVLDIQPTEIHQRVPLYIGSTEEVEKVEKYLA

SEQ ID NO: 17945 - protein, 357 aa, Pisum sativum
MAVKEATSETKKRSGYEIITLTSWLLQQEQKGIIDAELTIVLSSISMACKQIASLVQRANISNLTGTQGAVNIQGEDQKKLDVISNEVFSNCLRSSGRTGIIASEEEDVPVAVEESYSGNYIVVFDPLDGSSNLDAAVSTGSIFGIYSPNDESLPDFGDDSDDNTLGTEEQRCIVNVCQPGSNLLAAGYCMYSSSVIFVLTIGKGVFVFTLDPLYGEFVLTQENLQIPKSGKIYSFNEGNYKLWDENLKKYIDDLKEPGPSGKPYSARYIGSLVGDFHRTLLYGGIYGYPRDKKSKNGKLRLLYECAPMSFIVEQAGGKGSDGHQRVLDIQPTEIHQRVPLYIGSTEEVEKVEKYLA

SEQ ID NO: 17946 - protein, 357 aa, Pisum sativum
MAVKEATSETKKRSGYEIITLTSWLLQQEQKPIIDAELTIVLSSISMACKQIASLVQRANISNLTGTQGAVNIQGEDQKKLDVISNEVFSNCLRRSGRTGIIASEEEDVPVAVEESYSGNYIVVFDPLDGSSNLDAAVSTGSIFGIYSPNDECLPDFGDDSDDNTLGTEEQRCIVNVCQPGSNLLAAGYCMYSSSVIFVLTIGKGVFVFTLDPLYGEFVLTQENLQIPKSGKIYSFNEGNYKLWDENLKKYIDDLKEPGPSGKPYSARYIGSLVGDFHRTLLYGGIYGYPRDKKSKNGKLRLLYECAPMSFIVEQAGGKGSDGHQRVLDIQPTEIHQRVPLYIGSTEEVEKVEKYLA

SEQ ID NO: 17947 - protein, 168 aa, Oryza sativa (indica cultivar-group)
SSNIDCGVSIGTIFGIYMIKDKENVTLEDVLQPGKNMVAAGYCMYGSSCTLVLSTGNGVNGFTLDPSLGEFILTHPDIKIPKKGKIYSVNEGNAKNWDEPTAKFVEKCKFPKDGSSPKSLRYIGSMVADVHRTLLYGGVFLYPADKKSPNGKLRVLYEVFPMSFLMEQ

SEQ ID NO: 17948 - protein, 369 aa, Oryza sativa (japonica cultivar-group)
MDHEADAYRTDLMTITRYVLNEQSRNPEARGDLTILLSHIVLGCKFVASAVNKAGLAKLIGLAGETNVQASVPGNNCHLSQFLVSEIEIGEEQKKLDVLSNEVFVKALVSSGRTCVLVSEEDEEATFVDPALRGKYCVCFDPLDGSSNIDCGVSIGTIFGIYMIKDKENVTLEDVLQPGKNMVAAGYCMYGSSCTLVLSTGNGVNGFTLDPSLGEFILTHPDIKIPKKGKIYSVNEGNAKNWDEPTAKFVEKCKFPKDGSSPKSLRYIGSMVADVHRTLLYGGVFLYPADKKSPNGKLRVLYEVFPMSFLMEQAGGQSFTGKERALDLVPTKIHERSPIFLGSFEDVEEIKGLYAAQANVIVLRPGTAS

SEQ ID NO: 17949 - protein, 408 aa, Solanum tuberosum
MAASAATATATTSYLSALDKKTPFLFALDKKTPFLCPKSSTKRRSFNGGVKCMAIETTSGFTATKKRSGYELQTLTSWLLRQEQAGVIDAELTIVISSISMACKQIASLVQRAGISNLTGVQGAVNIQGEDQKKLDVVSNEVFSNCLRSSGRTGIIASEEEDVPVAVEESYSGNYIVVFDPLDGSSNIDAAVSTGSIFGIYNPNDECLADHGDDSTLDNIEQKCIVNVCQPGTNLLAAGYCMYSSSVIFVLTLGNGVFSFNLDPMYGEFVLTQENVQIPKSGKIYSFNEGNYQLWDDKLKKYIDDLKDPGPSGKPYSARYIGSLVGDFHRTLLYGGIYGYPRDQKSKNGKLRLLYECAPMSFIVEQAGGKGSDGHQRVLDIQPTEVHQRVPLYIGSTEEVEKLEKYLS

SEQ ID NO: 17950 - protein, 234 aa, Lactuca sativa
MDHAADAFRTDLMTITRFVLNEQSKHPESRGDFSILLSHIVLGCKFVCSAVNKAGLAKLIGLAGETNVQGEEQKKLDVLSNEVFVKALVSSGRTCILVSEEDEDAIIVEPSKRGRYCVVFDPLDGSSNIDCGVSIGTIFGIYMIKDGDEAILEDVLQPGKNMVAAGYCMYGSSCTLVLSTGSGVNGFTLDPSLGEFILTHADIKIPKKGKIYSVNEGNAKNWDGPTAKFVEKCK

SEQ ID NO: 17951 - protein, 409 aa, Triticum aestivum
MAAATTTASRPLLLSRQQAAASSLQCRLPRRPGSSLFAGQGQASTPNVRCMAVVDTPSAPAVAPARKRSSYDMITLTTWLLKQEQEGVIDNEMTIVLSSISTACKQIASLVQRAPISNLTGVQGATNVQGEDQKKLDVISNEVFSNCLRWSGRTGVIASEEEDVPVAVEESYSGNYIVVFDPLDGSSNIDAAVSTGSIFGIYSPSDECHIGDDATLDEVTQMCIVNVCQPGSNLLAAGYCMYSSSVIFVLTIGTGVYVFTLDPMYGEFVLTQEKVQIPKSGKIYSFNEGNYALWDDKLKKYMDSLKEPGTSGKPYSARYIGSLVGDFHRTMLYGGIYGYPSDQKSKNGKLRLLYECAPMSFIAEQAGGKGSDGHQRVLDIMPTEVHQRVPLYVGSVEEVEKVEKFLSSE

SEQ ID NO: 17952 - protein, 409 aa, Triticum aestivum
MAAATTTTSRPLLLSRQQAAASSLQCRLPRRPGSSLFAGQGQASTPNVRCMAVVDTASAPAPAAARKRSSYDMITLTTWLLKQEQEGVIDNEMTIVLSSISTACKQIASLVQRAPISNLTGVQGATNVQGEDQKKLDVISNEVFSNCLRWSGRTGVIASEEEDVPVAVEESYSGNYIVVFDPLDGSSNIDAAVSTGSIFGIYSPSDECHIGDDATLDEVTQMCIVNVCQPGSNLLAAGYCMYSSSVIFVLTIGTGVYVFTLDPMYGEFVLTQEKVQIPKSGKIYSFNEGNYALWDDKLKKYMDSLKEPGTSGKPYSARYIGSLVGDFHRTMLYGGIYGYPSDQKSKNGKLRLLYECAPMSFIAEQAGGKGSDGHQRVLDIMPTAVHQRVPLYVGSVEEVEKVEKFLSSE

SEQ ID NO: 17953 - protein, 409 aa, Triticum aestivum; identical to SEQ ID NO: 17952

SEQ ID NO: 17954 - protein, 411 aa, Triticum aestivum
  unsure (1)..(411): unsure at all Xaa locations
MAAATTTTSRPLRLSRQQAAASSLQCRNQPLSGSRPGVDSEQASPPNVRRMAVVDSGAAPEEEQLRQRSSXDMITLTXEQEGVIENEMTIVLSSISTACKQIASLVQRAPISNLTGVQGATNVQGEDQKKLDVISNEVFSNCLRWSGRTGVIASEEEDVPVAVEESYSGNYIVXAFDPLDGSSNIHAVESTGSIFRMYSLSDECHIGDDANCRRRXTLDELTQMCIVNVCQPGSNLLAAGYCMYSSSVIFVLTIGTGVYVFTLDPMYGEFVLTQEKVQIPKSGKIYSFNEGNYALWDDKLKKYMDSLKEPGTSGKPYSARYIGSLVGDFHRTMLYGGIYGYPSDQKSKNGKLRLLYECAPMSFIAEQAGGKGSDGHQRVLDIMPTAVHQRVPLYVGSVEEVEKVEKFLSSE

SEQ ID NO: 17955 - protein, 459 aa, Zea mays
  unsure (1)..(459): unsure at all Xaa locations
SRPGLGVSQNPTQPSTRKKTTSSHHHRQQEQRGETARVYVPPGAAAAMAAAATTSSSSHLLLLSRQQAASLRCRLSFLGQPRRPGRVTAQAXXAAKDVRCMAAVDTTAASTAAAETSRYEIVTLTTWLLQQERTGAIDNEMTIVLASISTACKQIAALVQRAPISNLTGVQGAVNVQGEDQKKLDVVSNEVFSNCLKSSGRTGVIASEEEDVPVAVEQSYSGNYIVVFDPLDGSSNIDAAVSTGSIFGIYNPNDECLADXSDDNDTLDSVEQRCIVNVCQPGSNLLAAGYCMYSSSVIFVLTVGTGVYVFTLDPMYGEFLLTQEKVHIPKAGKIYAFNEGNYALWDDXKLKLYMDSLKEPGDSGKPYSARYIGSLVGDFHRTLLYGGIYGYPRDKKSKNGKLRLLYECAPMSFIVEQAGGKGSDGHQRILDITPTEIHQRVPLYIGSVEEVDKVEKFLA

SEQ ID NO: 17956 - protein, 315 aa, Zea mays
  unsure (1)..(315): unsure at all Xaa locations
XAAAATSSSAPEFGPQVQIPKAGNLTGHQGAVNVQGEDQKKLDVVSNEVFSNCLKSSGRTGVIASEEEDVPVAVEQSYSGNYIVVFDPLDGSSNIDAAVSTGSIFGIYNPNDECLADVDDNDTLDSVEQRCIVNVCQPGSNLLAAGYCMYSSSVIFVLTVGTGVYVFTLDPMYGEFVLTQEKVQIPKAGKIYAFNEGNYALWDDKLKLYMDSLKEPGDSGKPYSARYIGSLVGDFHRTLLYGGIYGYPRDKKSKNGKLRLLYECAPMSFIVEQAGGKGSDGHQRILDITPTEIHQRVPLYIGSVEEVDKVEKFLA

SEQ ID NO: 17957 - protein, 300 aa, Zea mays
  unsure (1)..(300): unsure at all Xaa locations
MAAAATTSSSSHLLLLSRQQAASLRCRLSFLGQPRRPGRVTAQAPAAKDVRCMAAVDTAASAAAAETSPKSSSSYEIVTLTTWLLQQERTGAIDNEMTIVLASISTACKQIAALVQRAPISNLTGVQGAVNVQGEDQKKLDVVSNEVFSNCLKSSGRTGVIASEEEDVPVAVEQSYSGNYIVVFDPLDGSSNIDAAVSTGSIFGIYNPNDECLADVDDNDTLDSVEQRCIVNVCQPGSNLLAAGYCMYSSSVIFVLTVGTXXVYVFTLDPMYGEFVLTQEKVQIPKAGKIYAFHEGNYAX

SEQ ID NO: 17958 - protein, 188 aa, Zea mays
  unsure (1)..(188): unsure at all Xaa locations
XQRCIVNVCQPGSTCWPPGYCMYSSSVIFVLTVGTGVYVFTLDPMYGEFVLTQEKVQIPKAGKIYAFNEGNYALWDDKLKLYMDSLKEPGDSGKPYSARYIGSLVGDFHRTLLYGGIYGYPRDKKSKNGKLRLLYECAPMSFIVEQAGGKGSDGHQRILDITPTEIHQRVPLYIGSVEEVDKVEKFLA

SEQ ID NO: 17959 - protein, 341 aa, Musa acuminata
MDHEAEAHRTDLMTITRYVLNEQSRHQESRGDFTILLSHIVLGCKFVCSAVNKAGLAKLIGLAGETNVQGGSKRKLDVLSNEVFVKALISSGRTCILVSEEDEEATFVDPSLRGKYCVVFDPLDGSSNIDCGVSIGTIFGVYMVKDKDNVTLDEVLQPGKNMLAAGYCMYGSSCTLVLSTGSGVNGFTLDPSLGEFILTHPDIKIPKKGKIYSVNEGNAKNWDGPTTKYVEKCKFPKDGDSPKSLRYIGSMVADVHRTLLYGGIFLYPADKKSPNGKLRVLYEVFPMSFLMEQAGGQAFTGKQRALDLVPTKIHQRSPIFLGSYDEVEEIKALYAAEENTA

SEQ ID NO: 17960 - protein, 333 aa, Phytophthora infestans
MANQVDHSNPITLSRFILAEKEIQGNADLSVLFTSIELACKVIASSVRRAGLTGLYGLDGSENSTGDQVKKLDVLANDIFINSLKFSTKIEVMVSEEEEKPIVVQNDSSGTKYCIAFDPLDGSSNIDCNVSTGTIFAIYQRDASSEGGYKDILQPGSKLVSAGYCMYGSSTQLVLTWGKGVHCFTLDPTIGAFMLSHQDIRIPDEPKAIYSCNEGNYAQWDSATKAFVDECKTGSKAYAARYVGSMVSDIHRTILYGGIYLYPGSTKAKDGKLRLLYECNPMSFIVEQAGGMATTGTERILDLVPTDIHQRSPIFLGCKRDVERVIALYKEHN

SEQ ID NO: 17961 - protein, 347 aa, Schizosaccharomyces pombe
MKKDLDEIDTDIVTLSSFILQEQRRYNQKHKNEEGKPCIIQEASGELSLLLNSLQFSFKFIANTIRKAELVNLIGLSGIVNSTGDEQKKLDKICNDIFITAMKSNGCCKLIVSEEEEDLIVVDSNGSYAVTCDPIDGSSNIDAGVSVGTIFGIYKLRPGSQGDISDVLRPGKEMVAAGYTMYGASAHLLLTTGHRVNGFTLDTDIGEFILTHRNMKMPLQHSIYSINEGYTAFWDEKIARFIAHLKESTPDKKPYSARYIGSMVADMHRTILYGGLFAYPCSKGNNGKLRLLYECFPMAFLVEQAGGIAVNDKGDRILDLVPKTLHGKSSIWLGSKHEVEEYINFIK

SEQ ID NO: 17962 - protein, 344 aa, Schizosaccharomyces pombe
DLDEIDTDIVTLSSFILQEQRRYNQKHKNEEGKPCIIQEASGELSLLLNSLQFSFKFIANTIRKAELVNLIGLSGIVNSTGDEQKKLDKICNDIFITAMKSNGCCKLIVSEEEEDLIVVDSNGSYAVTCDPIDGSSNIDAGVSVGTIFGIYKLRPGSQGDISDVLRPGKEMVAAGYTMYGASAHLLLTTGHRVNGFTLDTDIGEFILTHRNMKMPLQHSIYSINEGYTAFWDEKIARFIAHLKESTPDKKPYSARYIGSMVADMHRTILYGGLFAYPCSKGNNGKLRLLYECFPMAFLVEQAGGIAVNDKGDRILDLVPKTLHGKSSIWLGSKHEVEEYINFIK

SEQ ID NO: 17963 - protein, 340 aa, Pichia anomala
MSHKASDEHHVDTDLITLSRFILTSQQKVAAQATGELTLLLNSLQFAFKFIANNIRKAELVNLMGLAGASNSTGDAQKKLDVIGDEIFINAMKASGNVKVLVSEEQEDLIVFDGPGNYAVVCDPIDGSSNIDAGVSVGTIFGIYKLLPGSKGSIKDVLRPGTEMVAAGYTMYGASAHLMLTTGQGVNGFTLDASLGEFILTHPNLTISDEKHIFSVNEGNTTYWTPEVQQFIADLKKPQFNGKPYSARYIGSMVADVHRTLLYGGLFAYPADAKSKAGKLRILYECFPMAFLFEQAGGKAVTDNGDRILELKPKAIHDRSGIWLGSKVEIDRFLKATGKI

SEQ ID NO: 17964 - protein, 348 aa, Saccharomyces cerevisiae
MPTLVNGPRRDSTEGFDTDIITLPRFIIEHQKQFKNATGDFTLVLNALQFAFKFVSHTIRRAELVNLVGLAGASNFTGDQQKKLDVLGDEIFINAMRASGIIKVLVSEEQEDLIVFPTNTGSYAVCCDPIDGSSNLDAGVSVGTIASIFRLLPDSSGTINDVLRCGKEMVAACYAMYGSSTHLVLTLGDGVDGFTLDTNLGEFILTHPNLRIPPQKAIYSINEGNTLYWNETIRTFIEKVKQPQADNNNKPFSARYVGSMVADVHRTFLYGGLFAYPCDKKSPNGKLRLLYEAFPMAFLMEQAGGKAVNDRGERILDLVPSHIHDKSSIWLGSSGEIDKFLDHIGKSQ

SEQ ID NO: 17965 - protein, 355 aa, Aspergillus oryzae
MSGHENNGAPPVGKEKINTDIVTLTRFLTEEQTKVPEATGDFTLLCHALQFSFKSIAYYIRCAFLINLTGLAGSSNTTGDDQKKLDVIGNDIFISAMRGSGKCRILVSEEEEEAIIFDEHPYARYAVVCDPIDGSSNLDAGVSVGTIFGIFKLPDSVLGPENKVSPKDLLLPGTEMVASGFTMYGASAQLVITMRNGGVNGFTLENSLGEFILTHPNMTLPAKRAIYSVNEGNSSYWEEWTNAYFHSLKFPPEGQKPYSARYIGSMVADAYRTLLYGGVFAYPADKKAPKGKLRILYECAPMAMLFENAGGLAVNSRMERLLGVVPEHIHDKSGVFLGSKDEVQKIIDTYNKYKK

SEQ ID NO: 17966 - protein, 364 aa, Ralstonia eutropha
MPEVQRMTLTQFLIEERRRYPDASGGFNGLILNVAMACKEIARAVAFGALGGLHGKASTQAGEEGAVNVQGEIQQKLDVLSNTTFLRVNEWGGYLAGMASEEMEAPYQIPENYPRGKYLLVFDPLDGSSNIDVNVSVGSIFSVLRAPEGADTVTEQDFLQPGSAQVAAGYALYGPTTMLVLTVGNGVNGFTLDPNLGEFFLTHPHLRVPPDTQEFAINASNSRFWEAPVQRYIGECMAGKSGPRGKDFNMRWIASMVAEAHRILMRGGVFMYPRDTKDPAKPGRLRLLYEANPIAFLMEQAGGRASTGRQTLMSVAPGALHQRIGVIFGSRNEVERIEGYHTNQTDPDLPSPLFNERSLFRASA

SEQ ID NO: 17967 - protein, 364 aa, Ralstonia eutropha
MPEVQRMTLTQFLIEERRRYPDASGGFNGLILNVAMACKEIARAVAFGALGGLHGKASNQAGEAGAVNVQGEIQQKLDVLSNTTFLRVNEWGGYLAGMASEEMEAPYQIPDHYPRGKYLLVFDPLDGSSNIDVNVSVGSIFSVLRAPEGASAVTEQDFLQPGSAQVAAGYALYGPTTMLVLTVGNGVNGFTLDPNLGEFFLTHPNLQVPADTQEFAINASNSRFWEAPVQRYIAECMAGKSGPRGKDFNMRWIASMVAEAHRILMRGGVFMYPRDSKDPAKPGRLRLLYEANPIAFLMEQAGGRASTGRQTLMSVAPGALHQRIGVIFGSRNEVERIEGYHTDQTDPDLPSPLFNERSLFRASA

SEQ ID NO: 17968 - protein, 206 aa, Ralstonia eutropha
LQPGSAQVAAGYALYGPTTMLVLTVGNGVNGFTLDPNLGEFFLTHPHLRVPPDTQEFAINASNSRFWEAPVQRYIGECMAGKSGPRGKDFNMRWIASMVAEAHRILMRGGVFMYPRDTKDPAKPGRLRLLYEANPIAFLMEQAGGRASTGRQTLMSVAPGALHQRIGVIFGSRNEVERIEGYHTNQTDPDLPSPLFNERSLFRASA

SEQ ID NO: 17969 - protein, 159 aa, Ralstonia eutropha
LQVPADTQEFAINASNSRFWEAPVQRYIAECMAGKSGPRGKDFNMRWIASMVAEAHRILMRGGVFMYPRDSKDPAKPGRLRLLYEANPIAFLMEQAGGRASTGRQTLMSVAPGALHQRIGVIFGSRNEVERIEGYHTDQTDPDLPSPLFNERSLFRASA

SEQ ID NO: 17970 - protein, 350 aa, Neurospora crassa
MSTFTTNGAGAENDGEKVNTHIVTLTRFLTEEQVKHKEATGDFTLLCHALQFSFKSIAYYIRRATLVNLTGLAGSSNTTGDEQKKLDVISNDLFIEAMRSSGKCALLVSEEEEHVIYFKDAKNARYAVACDPIDGSSNLDAGVSVGTIFAIHKLAEDSTGTKEDILKPGTELVAAGFTMYGASAQLVITMKGGSVNGFTLDQGVGEFILTHPNMTIPRKRSIYSVNEGNSLYWEDDVKAYFNSLKETQEDSGKPYSARYIGSMVADAYRTLLYGGMFAYPADKKSPKGKLRILYECAPMAMIFENAGGQAVDSKMNRMLEVVPEHIHDKAGIFMGSYDEVEKVKKYHGKA

SEQ ID NO: 17971 - protein, 331 aa, Candida albicans
MSGPVNSVSKQMNVDTDIITLTRFILQEQQTVAPTATGELSLLLNALQFAFKFIAHNIRRAELVNLIGVSGSANSTGDVQKKLDVIGDEIFINAMRSSNNVKVLVSEEQEDLIVFPGGGTYAVCTDPIDGSSNIDAGVSVGTIFGVYKLQEGSTGGISDVLRPGKEMVAAGYTMYGASAHLALTTGHGVNLFTLDTQLGEFILTHPNLKLPDTKNIYSLNEGYSNKFPEYVQDYLKDIKKEGYSLRYIGSMVADVHRTLLYGGIFAYPTLKLRVLYECFPMALLMEQAGGSAVTIKGERILDILPKGIHDKSSIVLGSKGEVEKYLKHVPK

SEQ ID NO: 17972 - protein, 320 aa, Candida albicans
MSGPVNSVSKQMNVDTDIITLTRFILQEQQTVAPTATGELSLLLNALQFAFKFIAHNIRRAELVNLIGVSGSANSTGDVQKKLDVIGDEIFINAMRSSNNVKVLVSEEQEDLIVFPGGGTYAVCTDPIDGSSNIDAGVSVGTIFGVYKLQEGSTGGISDVLRPGKEMVAAGYTMYGASAHLALTTGHGVNLFTLDTQLGEFILTHPNLKLPDTKNIYSLNEGYSNKFPEYVQDYLKDIKKEGYSLRYIGSMVADVHRTLLYGGIFAYPTLKLRVLYECFPMALLMEQAGGSAVTIKGERILDILPKGIHDKEFYCVGIQG

SEQ ID NO: 17973 - protein, 351 aa, Leishmania major
MDVRRTPTPTTLTQYIIKSQPPHSRGDFTLLMMAIQTSVKVIEKNIRRAGMKGMLGYIAGQSANATGDHQAKLDVISNIAFKAYLLSSTSVCVLGSEEEEQMIIAESGRRGDYLIFFDPLDGSSNIDANVSVGSIWGVWRLPKDTTINSVEDANAVIRMLKGTDMVSAGYAVYGSATNLVLTSGHGVDGFTLDPNIGEFILTHPHISIPKKRSIYSVNEGNYGKWEPWFKEYIDYLKMNKTTRYSARYIGSMVGDIHRTLLYGGIFCYPKDANQVEGKLRLLYEAAPMAMIVEQAGGKAVGSNGRILEQSITRLHQRTPVYFGSRQEVDLCMAFRDRNVKTEALAPTSSKL

SEQ ID NO: 17974 - protein, 350 aa, Trypanosoma brucei
MPDYSRVPSTLMQFLMHNQPKGSRGAFTLLMMAIQTSVKVIEMNIRSAGAQGLFGHLNDGRANATGDAQAKLDVVANNAFKAYLMSSASVSFMGSEEDESIVVVSSGQQGDYVVFFDPLDGSSNIDANISIGSVWGIWCLPKGTKVRTTKDALKVLPRLSGRYLVSSGYAMYGTATNLVITTGSGVNGFTLDTTVGEFIHTHPNITLPQSRPIYSVNEGNLRHWDAWFKQYLHHIKNEGEKAYTARYIGSMVADIHRTLLYGGIFCYPGDKKKPGGKLRLMYEAAPMAFLIEQAGGLALTGDGRLLDVVPKEIHQRAPVFMGSRREVELCMSFKQKYNDRGGVQRERSKL

SEQ ID NO: 17975 - protein, 179 aa, Naegleria fowleri
NIIAAGYAMYGSCTMIVNATKRGVNGYTLDPVSGDFVLTHPEMKVPKKGSIYSVNEGNHRTWNESTKEYALLKKGSDEKKPYSLRYVGSMVADVHRTIIKGGIFMYPADKASPSGKLRLLYECNPMSYIIEKAGGKSIAGLKGSMLDIVPTKIHQREPIYLGSTADVEEVEQIMKRHGL

SEQ ID NO: 17976 - protein, 381 aa, Toxoplasma gondii
MRQCFIDEDFRLSLRFLATTSTVFFRRHCHTMAASGHPIPELGEFIIANKEKLRNTGQESEMNRLLTAIKLAAKVVNREINKAGLADILGAAGNQNVQGEEQQKLDVFANHKFIQALVNREVVCGICTEEDDDFIEVNRDAHFVMLMDPLDGSSNIDVNVSVGTIFSIYQRVSPLGSPPELRDFLQPGNAQIAAGYVLYGSSTMLVMTTGDGVNGFTLDPSLGTFFLSHRGMRFPEKARIYSVNEGNYKAFPDGVKKFLEECHDDKTGPFSLRYIGSLVSDFHRNLLQGGIYMYPPTKKDKKGKLRLLYEANPMAFLAEQAGGKATDGFDRIMDIQPSELHQRVPLMIGTARLVDRVDALMVEHSPECRLHANCLVGKNSS

SEQ ID NO: 17977 - protein, 341 aa, Caenorhabditis elegans
MASETSQFGIETDSITLQRYVLQEQRKHADASGELTALLTNMLVAIKAIASATQKAGLAKLYGIAGATNVQGEEVKKLDVLSNELMINMLKSSYTTCLLVSEENDELIEVEEQRRGKYIVTFDPLDGSSNIDCLVSIGTIFGIYKKRGDGPATVDDVLKPGKEMVAAGYALYGSATMVVLSTGDGVNGFTLDPSIGEFILTHPNMKCKEKGSIYSLNEGYAQTWSKGFAEYIRTRKYPEAGKKAMGQRYVGSMVADVHRTILNGGIFLYPPTVSAPNGKLRLLYECNPMAYIIEQAGGLATTGKERILDIQPTQIHQRAPIILGSKLDVEEALEYLAKYDN

SEQ ID NO: 17978 - protein, 346 aa, Caenorhabditis elegans
MASETSQFGIETDSITLQRYVLQEQRKHADASGELTALLTNMLVAIKAIASATQKAGLAKLYGIAGATNVQGEEVKKLDVLSNELMINMLKSSYTTCLLVSEENDELIEVEEQRRGKYIVTFDPLDGSSNIDCLVSIGTIFGIYKKRGDGPATVDDVLKPGKEMVAAGYALYGSATMVVLSTGDGVNGFTLDPSIGEFILTHPNMKCKEKGSIYSLNEGYAQTWSKGFAEYIRTRKYPEAGKKAMGQRYVGSMVADVHRTILNGGIFLYPPTVSAPNGKLRLLYECNPMAYIIEQAGGLATTGKERILDIQPTQSRYSANTDSPTRSNHSRIETRRRGGSRISCQI

SEQ ID NO: 17979 - protein, 356 aa, Nostoc punctiforme
MAAENIKMAKTPESLESSINEITDRALDRDCTTLSRHVLQQLQSFSPDAQDLSALMNRIALAGKLVARRMSRAGLMEGVLGFTGEVNVQGESVKKMDVYANDVFISVFKQSGLVCRLASEEMENPYYIPENCPIGRYTLLYDPIDGSSNTDNNLSLGSIFAIRQQEGTDSDGKATDLLANGRKQLAAGYILYGPCTMLVYTIGKGVHSFVLDPSLGEFILTEENIRIPNHGSVYSVNEGNFWQWEESIREYIRYVHRTEGYSARYSGAMVSDIHRILVQGGVFLYPGTIQNPEGKLRLLYETAPLAFLIEQAGGRATTGLVNILDVVPKKLHQRTPLIIGSKEDVAKVESFIQNGH

SEQ ID NO: 17980 - protein, 349 aa, Nostoc punctiforme
MAKTPESLESSINEITDRALDRDCTTLSRHVLQQLQSFSPDAQDLSALMNRIALAGKLVARRMSRAGLMEGVLGFTGEVNVQGESVKKMDVYANDVFISVFKQSGLVCRLASEEMENPYYIPENCPIGRYTLLYDPIDGSSNTDNNLSLGSIFAIRQQEGTDSDGKATDLLANGRKQLAAGYILYGPCTMLVYTIGKGVHSFVLDPSLGEFILTEENIRIPNHGSVYSVNEGNFWQWEESIREYIRYVHRTEGYSARYSGAMVSDIHRILVQGGVFLYPGTIQNPEGKLRLLYETAPLAFLIEQAGGRATTGLVNILDVVPKKLHQRTPLIIGSKEDVAKVESFIQNGH

SEQ ID NO: 17981 - protein, 287 aa, Halobacterium sp. NRC-1
MADVIDAVFDAIADAAPEVRAGLPDHRATRDDQNASGDTQLEADVWADDLLFDRTESIEGVNWYASEERDAVVTVGDAEGGYAVALDPLDGSSNVKSNNPCGTVVGIYDQPLPAPGSSLVAAGFVLYGPTTTMVVARDDTVRESLVSETGATTDLGPVELPADPTVYGFGGRVPDWTPAFESFVRDVEDDLKLRYGGAMIADVNQVLVYGGVFGYPGMESAPDGKLRAQFEALPIAYIVETAGGASSDGTQSLLDVAPTRLHERTPTFVGTDDVIAALDAALPDHTN

SEQ ID NO: 17982 - protein, 336 aa, Vibrio cholerae
MQKMRTLGEFIVEKQHDFPHASGELSSLLASIRLAAKIVNREINKAGLADIIGASGNDNIQGEEQQKLDLYANEKFKAALEARDQVCGVASEEEDEAVAFSKELNKNAKYVVLMDPLDGSSNIDVNVSVGTIFSIYRRVSPVGTPPTQEDFLQPGNKQVAAGYVIYGSSTMLVYTTGNGVNGFTYDPSLGTFYLSHENMRIPENGKIYSINEGNYIRFPTGVKKYIKFCQENVPEEGRPYTSRYIGSLVADFHRNLLKGGIYLYPSTQSHPNGKLRLLYECNPMAFLIEQAGGLASDGARRIMDIKPTELHQRVPFFVGSKNMVHKVETFLETYPD

SEQ ID NO: 17983 - protein, 333 aa, Haemophilus influenzae Rd
MKTLSEFIVERQAEYPNAKGELSGILSSIRLLAKIIHRDINKAGLTNILGQSGIENVQGESQMKLDLFAHNTMKAALMAREEVAGFASEEEESFIAFDTERGRNAKYIILTDPLDGSSNIDVNVSVGTIFSIYRRVSPIGSPVTLEDFMQPGNKQVAAGYIVYGSSTMLVYTTGNGVNGFTYDPSIGTFCLSHENMQMPKEGKIYSINEGQYLKFPQGVKKYIKYCQEEDKATHRPYVSRYIGSLVADFHRNLLKGGIYIYPSATNYPNGKLRLLYEGNPIAFLAEQAGGVATDGYRRILDIEPTALHERVPLFVGSEDMVKKAQEMMEEFKE

SEQ ID NO: 17984 - protein, 334 aa, Drosophila melanogaster
MTQQRPAFDSNAMTLTRFVLQEQRKFKSATGDLSQLLNSIQTAIKATSSAVRKAGIAKLHGFAGDVNVQGEEVKKLDVLSNELFINMLKSSYTTCLMVSEENENVIEVEVEKQGKYIVCFDPLDGSSNIDCLVSIGSIFAIYRKKSDGPPTVEDALQPGNQLVAAGYALYGSATAIVLGLGSGVNGFTYDPAIGEFVLTDPNMRVPEKGKIYSINEGYAADWEDGVFNYIAAKKDPAKGKPYGARYVGSMVADVHRTIKYGGIFIYPATKSAPSGKLRLLYECVPMAYLMIQAGGLASDGKISILDIVPKKIHERSPIFLGSKSDVEEALSYLK

SEQ ID NO: 17985 - protein, 333 aa, Pasteurella multocida
MKTLGQFIVEKQAEYPNAKGELSGILSSIRLVAKVIHRDINKAGLTNNIIGTSGAENVQGETQMKLDLFAHNTMKQALISREEVAGFASEEEENFVAFDTERGRNAKYVILTDPLDGSSNIDVNVAVGTIFSIYRRVSPIGTPVTLADFMQPGNRQVAAGYIVYGSSTMLVYTTGNGVNGFTYDPSLGVFCLSHENIQIPANGKIYSINEGQYLKFPQGVKKYIKYCQEEDKATHRPYTSRYIGSLVSDFHRNMLKGGIYIYPSATNYPNGKLRLLYEGNPMAFLAEQAGGMASDGYQRILDIQPTELHQRVPLFLGSKEMVEKAQDFMKTFG

SEQ ID NO: 17986 - protein, 344 aa, Porteresia coarctata
MDHEADAYRTDLMTITRYVLNEQSRNPEARGDLTILLSHIVLGCKFVASAVNKAGLAKLIGLAGETNVQGEEQKKLDVLSNEVFVKALVSSGRTCVLVSEEDEEATFVDPALRGKYCVCFDPLDGSSNIDCGVSIGTIFGIYMIKDKDNVTLEDVLQPGKNMVAAGYCMYGSSCTLVLSTGNGVNGFTLDPSLGEFILTHPDIKIPKKGKIYSVNEGNAKNWDEPTAKFVEKCKFPKDGSSPKSLRYIGSMVADVHRTLLYGGVFLYPADKKSPNGKLRVLYEVFPMSFLMEQAGGQSFTGKERALDLVPTKIHERSPIFLGSFEDVEEIKGLYAAQAKLEHNH

SEQ ID NO: 17987 - protein, 132 aa, Cyprinus carpio
PLDGSSNIDCLASIGTIFAIYRKETDDEPSEKDALRSGRNIVAAGYALYGSATMLVLSTGQGVNCFMLDPAIGEFILVDQDVRIKKKGKIYSLNEGYAAHFYPDVTEYLQKKKFPEDGSSPYGGRYVGSMVA

SEQ ID NO: 17988 - protein, 161 aa, Esox lucius
IDCLASIGTIFAIYRKTTDNEPNEKDALQSGRHIVAAGYALYGSATMMVLSTGQGVNCFMLDPSIGEFILTDKNVKIKKRGKIYSLNEGYAQHFYPDVTDYLKKKKFPEDGSAPYGGRYVGSMVADVHRTLVYGGIFLYPANVKSPKGKLRLLYECNPMAF

SEQ ID NO: 17989 - protein, 132 aa, Oncorhynchus mykiss
PLDGSSNIDCLVSIGTIFAIYRKTTDDEPNERDALQSGRHIVAAGYALYGSATMMVLSTGQGVNCFMLDPSIGEFILTDKDVKIKKRGKIYSLNEGFAQHFYPDVTEYLKKKKYPEDGSAPYGGRYVGSMVA

SEQ ID NO: 17990 - protein, 332 aa, Escherichia coli K12
MKTLGEFIVEKQHEFSHATGELTALLSAIKLGAKIIHRDINKAGLVDILGASGAENVQGEVQQKLDLFANEKLKAALKARDIVAGIASEEEDEIVVFEGCEHAKYVVLMDPLDGSSNIDVNVSVGTIFSIYRRVTPVGTPVTEEDFLQPGNKQVAAGYVVYGSSTMLVYTTGCGVHAFTYDPSLGVFCLCQERMRFPEKGKTYSINEGNYIKFPNGVKKYIKFCQEEDKSTNRPYTSRYIGSLVADFHRNLLKGGIYLYPSTASHPDGKLRLLYECNPMAFLAEQAGGKASDGKERILDIIPETLHQRRSFFVGNDHMVEDVERFIREFPDA

SEQ ID NO: 17991 - protein, 173 aa, Xenopus laevis
VLSNDLVINMLKSSYGTCALVSEENKDVIIIPKDLRGKYIVCFDPLDGSSNIDCLASIGTIFAIYRKTTDTEPCEKDALQPGRNIVAAGYALYGSATLVALSTGQGVDCFMLDPALGEFVLVDKNVRIKKKGKIYSLNEGYAKYFDPAITEYLHNKKFPQDGSSPYSSRYVGS

SEQ ID NO: 17992 - protein, 122 aa, Xenopus laevis
IDCLASIGTIFAIYKKTSEGEPAEKDALQPGRNIVAAGYALYGSATMLVLATEFGVNCFMLDPAIGEFILVNQDVKIKKKGNIYSLNEGYAKYSDEAVTEYLQKKKFPEDGSSPYGARYVGS

SEQ ID NO: 17993 - protein, 248 aa, Dendronephthya klunzingeri
LKSSFQTCLLVSEENKTVIEVELDQQGKYIVYFDPLDGSSNIECLASIGSIFGIAKKPSESPMKQADALIPGRDFVAAGYALYGSATMVVLSTGNGVNGFTLDPSIGQFVLTDQDIRIKPRGKIYSINEGYYKYFDKETKDYIESVKFPKDGKAPYGARYVGSMVSDMHRLLVYGGIFMYPANSKSPEGKLRLMYECNPMAFIVSQAGGMATNGKIDILDIVPEIHERAPIAIGSTEDVKDYLTFVKK

SEQ ID NO: 17994 - protein, 340 aa, Zaocys dhumnades
MSDQSPFETDMITLNRYVMEKGRRVKGATGELTQLLNSTLTAIKAISSAVRKAGLAHMYGIAGSVNVTGDEQKKLDVLSNSLVINMLQSSYSTCVLVSEENKEALITPKEKRGKYVVCFDPLDGSSNIDCLASIGTIFAIYKKTTEDEPSEKDALQPGRNIVAAGYALYGSATLVALSTGQGVDSFMLDPGLGEFILVEKDVKIKKKGKIYSLNEGYAKYFDPAVTEYLHKKKFPEEGKSPYGARYVGSMVADVHRTLVYGGIFLYPANQKSPKGKLRLLYECNPIAFIIEQASGIATTGTEPVLDVKPESIHQRVPFVAGSPEDVQEYLAFVQKHQKSS

SEQ ID NO: 17995 - protein, 290 aa, Helicobacter pylori 26695
MDYKCFKGKHANIVIEIISLLEKGVKKAQEILEKPDAGSYTKLENSSGDTPIKADLALDKFLEENFLSLENIKSVFSEEKETPVTKENGSYLIAYDPLDGSSVMEANFLVGTIIGIYEKDYKAQNLAASLYVVFGHKIELVVALEEVYRYSFYQNKFHFIETIVLENKGKIVASGGNQKDFSLGLKKALEGFFAENYRLRYSGSMVADVHHVLVKKGGMFSYPQKKLRKLFEVFPLALMVEKAKGEAFYFDKGVKKRLLEQSVENYHEKSECYLASQHEAHILEKYLKGE

SEQ ID NO: 17996 - protein, 290 aa, Helicobacter pylori J99
MDYKRFKGKHANIVIEIISLLEKGVKKAQEILEKPDAGSYTQLENSSGDTPIKADLALDKFLEETFLSLENVKSVFSEEKETPVTKENGSYLIAYDPLDGSSVMEANFLVGTIIGVYEKDYKAQNLVASLYVVFGHKIELVVALEEVYRYAFYQNKFHFIETIVLENKGKIIASGGNQKDFSLGLKKALEGFFAENYRLRYSGSMVADVHHVLVKKGGMFSYPQKKLRKLFEVFPLALMVEKAKGEAFYFDKGVKKRLLDQSVESYHEKSECYLASPHEAQILEKHLKGE

SEQ ID NO: 17997 - protein, 166 aa, Gallus gallus
INMLQSSYSTCVLVTEENKEALITPKEKRGKYVVCFDPLDGSSNIDCLAPIGTIFAIYKKETDDEPSEKDALQPGRKIVAAGYALYGSATLVALSTGQGVDCFMLDPALGEFILVDRDVKIKKKGKIYSLNEGYAKYFDPAMTEYLKKKKFPEDGSSPYGARYVGS

SEQ ID NO: 17998 - protein, 168 aa, Gallus gallus
ILSNDLVINMLKSSFSTCVIVSEENKDAVIVEADRRGKYIVCIDPLDGSSNIDCLVSIGTIFGIYRKVSPDEPTGKDALQPGRNLVAAGYALYGSATMLVLATSAGGVNCFMLDPAIGEFILVDRDVKIKKKGNIYSLNEGYAKYFDAAVTEYLRKKKFPEDGSSPYG

SEQ ID NO: 17999 - protein, 332 aa, Salmonella enterica subsp. enterica serovar Typhi
MKTLGEFIVEKQHEFSQATGELTALLSAIKLGAKIIHRDINKAGLVDILGASCAENVQGEVQQKLDLFANEKLKAALKARDIVAGIASEEEDEIVVFEGCEHAKYVVLMDPLDGSSNIDVNVSVGTIFSIYRRVTPVGTPVTEEDFLQPGNKQVAAGYVVYGSSTMLIYTTGCGVHAFTYDPSLGVFCLCQERMRFPEKGKTYSINEGNYIKFPNGVKKYIKFCQEEDSSTSRPYTSRYIGSLVADFHRNLLKGGIYLYPSTASHPQGKLRLLYECNPMAFLAEQAGGKASDGKERILDIIPESLHQRRSFFVGNRHMVDDVERFIREYPDA

SEQ ID NO: 18000 - protein, 334 aa, Nitrosomonas europaea
MHTGTTLTQFIIEEQRHIAGASGDFTALLNDIVTAIKTISNAVNKGALIGVMGALDTENVQGETQKKLDVITNEIMIRNNEWAGHLSGMASEEMDDVYSIPSPYPLGKYLLVFDPLDGSSNVDLNISVGTIFSILRSPVPSRAASMEDFLQPGVKQVCAGYALYGSSTMLVLTTGHGVNGFTLDRDIGEFVLTHPNMRIPADTREFAINASNQRFWEAPVQRYVAECLAGSTGPRGRDFNMRWVASMVAEVHRILTRGGIFMYPRDTKDPSKPGRLRLMYEANPMSFIVEQAGGLSTTGYERILDVVPQDLHQRVPVILGSKNEVEVVLEYHNA

SEQ ID NO: 18001 - protein, 338 aa, Homo sapiens
MADQAPFDTDVNTLTRFVMEEGRKARGTGELTQLLNSLCTAVKAISSAVRKAGIAHLYGIAGSTNVTGDQVKKLDVLSNDLVMNMLKSSFATCVLVSEEDKHAIIVEPEKRGKYVVCFDPLDGSSNIDCLVSVGTIFGIYRKKSTDEPSEKDALQPGRNLVAAGYALYGSATMLVLAMDCGVNCFMLDPAIGEFILVDKDVKIKKKGKIYSLNEGYAKDFDPAVTEYIQRKKFPPDNSAPYGARYVGSMVADVHRTLVYGGIFLYPANKKSPNGKLRLLYECNPMAYVMEKAGGMATTGKEAVLDVIPTDIHQRAPVILGSPDDVLEFLKVYEKHSAQ

SEQ ID NO: 18002 - protein, 338 aa, Homo sapiens [sequence omitted]

SEQ ID NO: 18003 - protein, 337 aa, Homo sapiens
ADQAPFDTDVVTLTRFVMEEGRKARGTGELTQLLNSLCTAVKAISSAVRKAGIAHLYGIAGSTNVTGDQVKKLDVLSNDLVMNMLKSSFATCVLVSEEDKHAIIVEPEKRGKYVVCFDPLDGSSNIDCLVSVGTIFGIYRKKSTDEPSEKDALQPGRNLVAAGYALYGSATMLVLAMDCGVNCFMLDPAIGEFILVDKDVKIKKKGKIYSLNEAYAKDFDPAVTEYIQRKKFPPDNSAPYGARYVGSMVADVHRTLVYGGIFLYPANKKSPNGKLRLLYECNPMAYVMEKAGGMATTGKEAVLDVIPTDIHQRAPIILGSPDDVLEFLKVYEKHSAQ

SEQ ID NO: 18004 - protein, 337 aa, Homo sapiens
ADQAPFDTDVNTLTRFVMEEGRKARGTGELTQLLNSLCTAVKAISSAVRKAGIAHLYGIAGSTNVTGDQVKKLDVLSNDLVMNMLKSSFATCVLVSEEDKHAIIVEPEKRGKYVVCFDPLDGSSNIDCLVSVGTIFGIYRKKSTDEPSEKDALQPGRNLVAAGYALYGSATMLVLAMDCGVNCFMLDPAIGEFILVDKDVKIKKKGKIYSLNEAYAKDFDPAVTEYIQRKKFPPDNSAPYGARYVGSMVADVHRTLVYGGIFLYPANKKSPNGKLRLLYECNPMAYVMEKAGGMATTGKEAVLDVIPTDIHQRAPVILGSPDDVLEFLKVYEKHSGQ

SEQ ID NO: 18005 - protein, 338 aa, Homo sapiens [sequence omitted]

SEQ ID NO: 18006 - protein, 339 aa, Homo sapiens
MTDRSPFETDMLTLTRYVMEKGRQAKGTGELTQLLNSMLTAIKAISSAVRKAGLAHLYGIAGSVNVTGDEVKKLDVLSNSLVINMLQSSYSTCVLVSEENKDAIITAKEKRGKYVVCFDPLDGSSNIDCLASIGTIFAIYRKTSEDEPSEKDALQCGRNIVAAGYALYGSATLVALSTGQGVDLFMLDPALGEFVLVEKDVKIKKKGKIYSLNEGYAKYFDAATTEYVQKKKFPEDGSAPYGARYVGSMVADVHRTLVYGGIFLYPANQKSPKGKLRLLYECNPVAYIIEQAGGLATTGTQPVLDVKPEAIHQRVPLILGSPEDVQEYLTCVQKNQAGS

SEQ ID NO: 18007 - protein, 339 aa, Homo sapiens
MTDRSPFETDMLTLTRYVMEKGRQAKGTGELTQLLNSMLTAIKAISSAVRKAGLAHLYGIAGSVNVTGDEVKKLDVLSNSLVINMVQSSYSTCVLVSEENKDAIITAKEKRGKYVVCFDPLDGSSNIDCLASIGTIFAIYRKTSEDEPSEKDALQCGRNIVAAGYALYGSATLVALSTGQGVDLFMLDPALGEFVLVEKDVKIKKKGKIYSLNEGYAKYFDAATTEYVQKKKFPEDGSAPYGARYVGSMVADVHRTLVYGGIFLYPANQKSPKGKLRLLYECNPVAYIIEQAGGLATTGTQPVLDVKPEAIHQRVPLILGSPEDVQEYLTCVQKNQAGS

SEQ ID NO: 18008 - protein, 338 aa, Homo sapiens
MADQAPFDTDVNTLTRFVMEEGRKARGTGELTQLLNSLCTAVKAISSAVRKAGIAHLYGIAGSTNVTGDQVKKLDVLSNDLVMNMLKSSFATCVLVSEEDKHAIIVEPEKRGKYVVCFDPLDGSSNIDCLVSVGTIFGIYRKKSTDEPSEKDALQPGRNLVAAGYALYGSATMLVLAMDCGVNCFMLDPAIGEFILVDKDVKIKKKGKIYSLNEGYAKDFDPAVTEYIQRKKFPQIIQLLMGPGMWAPWWLMFIALWSTEGYFCTPLTRRAPMERLRLLYECNPMAYVMEKAGGMATTGKEAVLDVIPTDIHQRAPVILGSPDDVLEFLKVYEKHSAQ

SEQ ID NO: 18009 - protein, 337 aa, Sus scrofa
TDQAAFDTNIVTLTRFVMEEGRKARGTGEMTQLLNSLCTAVKAISTAVRKAGIAHLYGIAGSTNVTGDQVKKLDVLSNDLVINVLKSSFATCVLVSEEDKNAIIVEPEKRGKYVVCFDPLDGSSNIDCLVSIGTIFGIYRKNSTDEPSEKDALQPGRNLVAAGYALYGSATMLVLAMVNGVNCFMLDPAIGEFILVDRDVKIKKKGSIYSINEGYAKEFDPAITEYIQRKKFPPDNSAPYGARYVGSMVADVHRTLVYGGIFMYPANKKSPKGKLRLLYECNPMAYVMEKAGGLGTIGKEAVLDIVPTDIHQRAPIILGSPEDVTELLEIYQKHAAK

SEQ ID NO: 18010 - protein, 335 aa, Sus scrofa
TDQAAFDTNIVTLTRFVMEQGRKARGTGEMTQLLNSLCTAVKAISTAVRKAGIAHLYGIAGATNVTGDQVKKLDVLSNDLVINVLKSSFATCVLVTEEDKNAIIVEPEKRGKYVVCFDPLDGSSNIDCLVSIGTIFGIYRKNSTDEPSEKDALQPGRNLVAAGYALYGSATMLVLAMVNGVNCFMLDPAIGEFILVDRNVKIKKKGSIYSINEGYAKEFDPAITEYIQRKKFPPDNSAPYGARYVGSMVADVHRTLVYGGIFMYPANKKSPKGKLRLLYECNPMAYVMEKAGGLATTGKEAVLDIVPTDIHQRAPIILGSPEDVTELLEIYQKHA

SEQ ID NO: 18011 - protein, 337 aa, Sus scrofa
TDQAAFDTNIVTLTRFVMEQGRKARGTGEMTQLLNSLCTAVKAISTAVRKAGIAHLYGIAGSTNVTGDQVKKLDVLSNDLVINVLKSSFATCVLVTEEDKNAIIVEPEKRGKYVVCFDPLDGSSNIDCLVSIGTIFGIYRKNSTDEPSEKDALQPGRNLVAAGYALYGSATMLVLAMVNGVNCFMLDPAIGEFILVDRNVKIKKKGSIYSINEGYAKEFDPAITEYIQRKKFPPDNSAPYGARYVGSMVADVHRTLVYGGIFMYPANKKSPKGKLRLLYECNPMAYVMEKAGGLATTGKEAVLDIVPTDIHQRAPIILGSPEDVTELLEIYQKHAAK

SEQ ID NO: 18012 - protein, 335 aa, Sus scrofa
TDQAAFDTNIVTLTRFVMEQGRKARGTGEMTQLLNSLCTAVKAISTAVRKAGIAHLYGIAGSTNVTGDQVKKLDVLSNDLVINVLKSSFATCVLVTEEDKNAIIVEPEKRGKYVVCFDPLDGSSNIDCLVSIGTIFGIYRKNSTDEPSEKDALQPGRNLVAAGYALYGSATMLVLAMVNGVNCFMLDPAIGEFILVDRNVKIKKKGSIYSINEGYAKEFDPAITEYIQRKKFPPDNSAPYGARYVGSMVADVHRTLVYGGIFMYPANKKSPKGKLRLLYECNPMAYVMEKAGGLATTGKEAVLDIVPTDIHQRAPIILGSPEDVTELLEIYQKHA

SEQ ID NO: 18013 - protein, 337 aa, Sus scrofa
TDQAAFDTNIVTLTRFVMEEGRKARGTGEMTQLLNSLCTAVKAISTAVRKAGIAHLWGIAGSTNVTGDQVKKLDVLSNDLVINVLKSSFATCVLVSEEDKNAIIVEPEKRGKYVVCFDPLDGSSNIDCLVSIGTIFGIYRKNSTDEPSEKDALQPGRNLVAAGYALYGSATMLVLAMVNGVNCFMLDPAIGEFILVDRDVKIKKKGSIYSINEGYAKEFDPAITEYIQRKKFPPDNSAPYGARYVGSMVADVHRTLVYGGIFMYPANKKSPKGKLRLLYECNPMAYVMEKAGGLATTGKEAVLDIVPTDIHQRAPIILGSPEDVTELLEIYQKHAAK

SEQ ID NO: 18014 - protein, 338 aa, Sus scrofa
MTDQAAFDTNIVTLTRFVMEEGRKARGTGEMTQLLNSLCTAVKAISTAVRKAGIAHLYGIAGSTNVTGDQVKKLDVLSNDLVINVLKSSFATCVLVSEEDKNAIIVEPEKRGKYVVCFDPLDGSSNIDCLVSIGTIFGIYRKNSTDEPSEKDALQPGRNLVAAGYALYGSATMLVLAMVNGVNCFMLDPAIGEFILVDRDVKIKKKGSIYSINEGYAKEFDPAITEYIQRKKFPPDNSAPYGARYVGSMVADVHRTLVYGGIFMYPANKKSPKGKLRLLYECNPMAYVMEKAGGLATTGKEAVLDIVPTDIHQRAPIILGSPEDVTELLEIYQKHAAK

SEQ ID NO: 18015 - protein, 337 aa, Sus scrofa
TDQAAFDTNIVTLTRFVMEEGRKARGTGEMTQLLNSLCTAVKAISTAVRKAGIAHLYGIAGSTNVTGDQVKKLDVLSNDLVINVLKSSFATCVLVTEEDKNAIIVEPEKRGKYVVCFDPLDGSSNIDCLVSIGTIFGIYRKNSTDEPSEKDALQPGRNLVAAGYALYGSATMLVLAMVNGVNCFMLDPAIGEFILVDRDVKIKKKGSIYSINEGYAKEFDPAITEYIQRKKFPPDNSAPYGARYVGSMVADVHRTLVYGGIFMYPANKKSPKGKLRLLYECNPMAYVMEKAGGLATTGKEAVLDIVPTDIHQRAPIILGSPEDVTELLEIYQKHAAK

SEQ ID NO: 18016 - protein, 337 aa, Sus scrofa
TDQAAFDTNIVTLTRFVMEQGRKARGTGEMTQLLNSLCTAVAAISTAVRKAGIAHLYGIAGSTNVTGDQVKKLDVLSNDLVINVLKSSFATCVLVTEEDKNAIIVEPEKRGKYVVCFDPLDGSSNIDCLVSIGTIFGIYRKNSTDEPSEKDALQPGRNLVAAGYALYGSATMLVLAMVNGVNCFMLDPAIGEFILVDRNVKIKKKGSIYSINEGYAKEFDPAITEYIQRKKFPPDNSAPYGARYVGSMVADVHRTLVYGGIFMYPANKKSPKGKLRLLYECNPMAYVMEKAGGLATTGKEAVLDIVPTDIHQRAPIILGSPEDVTELLEIYQKHAAK

SEQ ID NO: 18017 - protein, 337 aa, Sus scrofa
TDQAAFDTNIVTLTRFVMEQGRKARGTGEMTQLLNSLCTAVKAISTAVRKAGIAHLYGIAGSTNVTGDQVKKLDVLSNDLVINVLKSSFATCVLVTEEDKNAIIVEPEKRGKYVVCFDPLDGSSNIDCLVSIGTIFGIYRKNSTDEPSEKDALQPGRNLVAAGYALYGSATMLVLAMVNGVNCFMLDPAIGEFILVDRNVKIKKKGSIYSINEGYAKEFDPAITEYIQRKKFPPDNSAPYGAAYVGSMVADVHRTLVYGGIFMYPANKKSPKGKLRLLYECNPMAYVMEKAGGLATTGKEAVLDIVPTDIHQRAPIILGSPEDVTELLEIYQKHAAK

SEQ ID NO: 18018 - protein, 337 aa, Sus scrofa domestica
TDQAAFDTNIVTLTRFVMEEGRKARGTGEMTQLLNSLCTAVKAISTAVRKAGIAHLYGIAGSTNVTGDQVKKLDVLSNDLVINVLKSSFATCVLVSEEDKNAIIVEPEKRGKYVVCFDPLDGSSNIDCLVSIGTIFGIYRKNSTDEPSEKDALQPGRNLVAAGYALYGSATMLVLAMVNGVNCFMLDPAIGEFILVDRDVKIKKKGSIYSINEGYAKEFDPAITEYIQRKKFPPDNSAPYGARYVGSMVADVHRTLVYGGIFMYPANKKSPKGKLRLLYECNPMAYVMEKAGGLATTGKEAVLDIVPTDIHQRAPIILGSPEDVTELLEIYQKHAAK

SEQ ID NO: 18019 - protein, 346 aa, Cytophaga hutchinsonii
MERNLSTVKTLVQFITESQKHVFGASGDLSKILNDIAVAAKIINREVNKAGLLDILGMEGGMNVQNEEVKKLDVYANDQFISALRSGGQCCAIASEENTDIIPIENNGHSKSNYVVLIDPLDGSSNIDVNVAIGSIFSIYRRVSESGPGETVDCMQVGNKQVAAGYIIYGSSTMMVYTTGDGVNGFTLDPSIGEFCLSHPNLKIPEDGFIYSVNEGNYADFPREIQEYIYYCKTPDFETSRPYSSRYIGSMVADFHRNLIKGGIFMYPATAKYPLGKLRLMYECNPLAFIVEQAGGKAIDGEGRILDIEPTNIHQRTGIIIGSKNMVEKVEAFIQMNVGLNVYRLK

SEQ ID NO: 18020 - protein, 332 aa, Salmonella typhimurium LT2
MKTLGEFIVEKQHEFSQATGELTALLSAIKLGAKIIHRDINKAGLVDILGASGAENVQGEVQQKLDLFANEKLKAALKARDIVAGIASEEEDEIVVFEGCEHAKYVVLMDPLDGSSNIDVNVSVGTIFSIYRRVTPVGTPVTEEDFLQPGNKQVAAGYVVYGSSTMLVYTTGCGVHAFTYDPSLGVFCLCQERMRFPEKGKTYSINEGNYIKFPNGVKKYIKFCQEEDSSTSRPYTSRYIGSLVADFHRNLLKGGIYLYPSTASHPQGKLRLLYECNPMAFLAEQAGGKASDGKERILDIIPESLHQRRSFFVGNRHMVDDVERFIREYPDA

SEQ ID NO: 18021 - protein, 337 aa, Ovis aries
MTDEAPFDTNIVTVTRFVMEEGRKARGTGEMTQLLNSLCTAVKAISTAVRKAGIAHLYGIAGTTNVTGDQVKKLDVLSNDLVVNVLKSSFATCVLVSEEDKHAIIVEPEKRGKYVVCFDPLDGSSNIDCLVSIGTIFGIYKKISKDDPSEKDALQPGRNLVAAGYALYGSATMLVLAMVNGVNCFMLDPAIGEFILVDRDVKIKKKGSIYSLNEGYAKDFDPALTEYVQRKKFPPDNSAPYGSRYVGSMVADVHRTLVYGGIFMYPADKKSPSGKLRLLYECDPMAYVIEKAGGMATTGKEAVLDIVPTDIHQKVPIILGSPEDVTEFLEIKKYTAK

SEQ ID NO: 18022 - protein, 337 aa, Oryctolagus cuniculus
ADKAPFDTDISTMTRFVMEEGRKAGGTGEMTQLLNSLCTAVKAISTAVRKAGIAHLYGIAGSTNVTGDQVKKLDVLSNDLVMNMLKSSFATCVLVSEEDKNAIIVEPEKRGKYVVCFDPLDGSSNIDCLVSIGTIFGIYRKKSTDEPSTKDALQPGRNLVAAGYALYGSATMLVLAGGSGVNSFMLDPAIGEFILVDKNVKIKKKGNIYSLNEGYAKDFDPAVTEYIQKKKFPPDNSSPYGARYVGSMVADVHRTLVYGGIFLYPANKKSPDGKLRLLYECNPMAFIMEKAGGMATTGKEAILDIVPTDIHQRAPVILGSPDDVQEFLEIYKKHAVK

SEQ ID NO: 18023 - protein, 339 aa, Oryctolagus cuniculus
MTDRSPFETDMLTLTRYVMEKGRQAKGTGELTQLLNSMLTAIKAISSAVRKAGLAHLYGIAGTVNVTGDEVKKLDVLSNALVINMLQSSYSTCVLVSEENKEAIITAKERRGKYVVCFDPLDGSSNIDCLASIGTIFAIYRKTTEDEPSDKDALQPGRNIVAAGYALYGSATLVALSTGQGVDLFMLDPALGEFVLVEKDVKIKKKGKIFSLNEGYAKYFDAATTEYVQKKKFPEDGSAPYGARYVGSMVADVHRTLVYGGIFLYPANQKSPKGKLRLLYECNPVAYIIEQAGGLATTGTQPVLDVKPESIHQRVPLILGSPDDVQEYLACVQKNQAGR

SEQ ID NO: 18024 - protein, 91 aa, Oryctolagus cuniculus
LQPGRNLVAAGYALYGSATMLVLATDSGVNCFMLDPAIGEFILVDKNVKIKKKGNIYSLNEGYAKDFDPAVTEYIQKKKFPPDNSSPYGAR

SEQ ID NO: 18025 - protein, 229 aa, Oryctolagus cuniculus
ADKAPFDTDISTMTRFVMEEGRKAGGTGEMTQLLNSLCTAVKAISTAVRKAGIAHLYGIAGSTNVTGBZVKKLDVLDMLKSAFATSVLVSEEDKNAIIVEPEKRGKYVSNFDPLVPIFGIYYRKKSTDALQGRSTDETSKSLVAAGYDTMVADVHRTLVYGGIFLYPADKKSPDGKLRLLYQCNMAFIMATTGKQAILDIVQTPDHRAPVILGSPDDVQQFLYKKHAVK

SEQ ID NO: 18026 - protein, 366 aa, Chlamydomonas sp. W80
MMATAGSSAAGARVSMRAASGIRASSSSRRAAVVVKAANVNIGDSLAEFLAVATPDTKLRQLMTSMSEATRTIAHKVRTASCGGTACVNSFGDEQLAVDMVADGILFEALKYSHVCSYACSEEVPEPVAMGGSGYSVAFDPLDGSSIVDTNFSVGTIFGVWPGDKLTGITGRDQAAAGMGVYGPRTVFVIAINGFPGTHEFLLQDDGKWLLVKSTEEIGEGKLFAPGNLRAIFDNPEYSKLVSYYLEEQYTLRYTGGMVPDVFQILVKEKGVFTNVTSPSTKAKLRLLFEVAPLALLIENAGGASSCDGLVCRALDVEVTAHEQRTQICYGSKGEVARFEKYMLGESSASLTLSRPSKRPCAERAR

SEQ ID NO: 18027 - protein, 389 aa, Chlamydomonas reinhardtii
MAAMMMRQKVAGAIAGERRSAVAPKMGRAATAPVVVASANASAFKGAAVTARVKASTRAARVQSRRTAVLTQAKIGDSLAEFLVEATPDPKLRHVMMSMAEATRTIAHKVRTASCAGTACVNSFGDEQLAVDMVADKLLFEALKYSHVCKLACSEEVPEPVDMGGEGFCVAFDPLDGSSSSDTNFAVGTIFGVWPGDKLTNITGREQVAAGMGIYGPRTVFCIALKDAPGCHEFLLMDDGKWMHVKETTHIGEGKMFAPGNLRATFDNPAYERLINFYLGEKYTLRYTGGIVPDLFQIIVKEKGVFTNLTSPTTKAKLRILFEVAPLALLIEKAGGASSCDGKAVSALDIPILVCDQRTQICYGSIGEVRRFEEYMYGTSPRFSEKVVA

SEQ ID NO: 18028 - protein, 341 aa, Spinacia oleracea
MDHAGDAMRTDLMTITRYVLNEQSKRPESRGDFTILLSHIVLGCKFVCSAVNKAGLAKLIGLAGETNIQGEEQKKLDVLSNEVFVKALTSSGRTCILVSEEDEEATFIEPSLRGKYCVVFDPLDGSSNIDCGVSIGTIFGIYMVKDFETATLEDVLQPGKNMVAAGYCMYGSSCTLVLSTGSGVNGFTLDPSLGEYILTHPDIKIPNKGKIYSVNEGNAKNWDGPTTKYVEKCKFPTDGSSPKSLRYIGSMVADVHRTLLYGGIFLYPGDKKSPNGKLRVLYEVFPMSFLMEQAGGQAFTGKQRALDLIPTKIHERSPVFLGSYDDVEDIKALYAAQEKTA

SEQ ID NO: 18029 - protein, 387 aa, Spinacia oleracea
METSMACCSRSIVLPRVSPQHSSALVPSSINLKSLKSSSLFGESLRMTTKSSVRVNKAKNSSLVTKCELGDSLEEFLAKATTDKGLIRLMMCMGEALRTIGFKVRTASCGGTQCVNTFGDEQLAIDVLADKLLFEALNYSHFCKYACSEELPELQDMGGPVDGGFSVAFDPLDGSSIVDTNFSVGTIFGVWPGDKLTGVTGRDQVAAAMGIYGPRTTYVLALKDYPGTHEFLLLDEGKWQHVKETTEINEGKLFCPGNLRATSDNADYAKLIQYYIKEKYTLRYTGGMVPDVNQIIVKEKGIFTNVISPTAKAKLRLLFEVAPLGFLIEKAGGHSSEGTKSVLDIEVKNLDDRTQVAYGSLNEIIRFEKTLYGSSRLEEPVPVGAAA

SEQ ID NO: 18030 - protein, 341 aa, Arabidopsis thaliana
MDHAADAHRTDLMTITRFVLNEQSKYPESRGDFTILLSHIVLGCKFVCSAVNKAGLAKLIGLAGETNIQGEEQKKLDVLSNDVFVNALVSSGRTSVLVSEEDEEATFVEPSKRGKYCVVFDPLDGSSNIDCGVSIGTIFGIYTLDHTDEPTTADVLKPGNEMVAAGYCMYGSSCMLVLSTGTGVHGFTLDPSLGEFILTHPDIKIPNKGNIYSVNEGNAQNWDGPTTKYVEKCKFPKDGSPAKSLRYVGSMVADVHRTLLYGGIFLYPADKKSPNGKLRVLYEVFPMSFLMEQAGGQAFTGKKRALDLVPEKIHERSPIFLGSYDDVEEIKALYAEEEKKN

SEQ ID NO: 18031 - protein, 404 aa, Arabidopsis thaliana
MQSLTLTRYPTPISPPRLNLYPLRQIAASVLSAPTAGINRRDMASRHQSTSFKPLAVGRNLTGDDDDGYCTLIDFAGSGGGEGKNVGEDLVVLLYHLQHACKRIASLVASPFNSSLGKLSVNSSSGSDRDAPKPLDIVSNDIVLSSLRNSGKVAVMASEENDSPTWIKDDGPYVVVVDPLDGSRNIDASIPTGTIFGIYNRLVELDHLPVEEKAELNSLQRGSRLVASGYVLYSSATIFCVTLGSGTHAFTLDHSTGEFVLTHQNIKIPTRGQIYSVNDARYFDWPEGLRKYIDTVRQGKGQNPKKYSARYICSLVADLHRTLLYGGVAMNPRDHLRLVYEGNPLAFLVEQAGGKSSDGKRGILSIQPVKLHQRLPLFLGSLEDVAELESYGDVQQTVNPGYEV

SEQ ID NO: 18032 - protein, 393 aa, Arabidopsis thaliana
METSIACYSRGILPPSVSSQRSSTLVSPPSYSTSSSFKRLKSSSIFGDSLRLAPKSQLKATKAKSNGASTVTKCEIGQSLEEFLAQATPDKGLRTLLMCMGEALRTIAFKVRTASCGGTACVNSFGDEQLAVDMLADKLLFEALRYSHVCKYACSEEVPELQDMGGPVEGGFSVAFDPLDGSSIVDTNFTVGTIFGVWPGDKLTGITGGDQVAAAMGIYGPRTTYVLAVKGFPGTHEFLLLDEGKWQHVKETTEIAEGKMFSPGNLRATFDNSEYSKLIDYYVKEKYTLRYTGGMVPDVNQIIVKEKGIFTNVTSPTAKAKLRLLFEVAPLGLLIENAGGFSSDGHKSVLDKTIINLDDRTQVAYGSKNEIIRFEETLYGTSRLKNVPIGVTA

SEQ ID NO: 18033 - protein, 393 aa, Arabidopsis thaliana
METSIACYSRGILPPSVSSQRSSTLVSPPSYSTSSSFKRLKSSSIFGDSLRLAPKSQLKATKAKSNGASTVTKCEIGQSLEEFLAQATPDKGLRTLLMCMGEALRTIAFKVRTASCGGTACVNSFGDEQLAVDMLADKLLFEALQYSHVCKYACSEEVPELQDMGGPVEGGFSVAFDPLDGSSIVDTNFTVGTIFGVWPGDKLTGITGGDQVAAAMGIYGPRTTYVLAVKGFPGTHEFLLLDEGKWQHVKETTEIAEGKMFSPGNLRATFDNSEYSKLIDYYVKEKYTLRYTGGMVPDVNQIIVKEKGIFTNVTSPTAKAKLRLLFEVAPLGLLIENAGGFSSDGHKSVLDKTIINLDDRTQVAYGSKNEIIRFEETLYGTSRLKNVPIGVTA

SEQ ID NO: 18034 - protein, 339 aa, Brassica napus
MDHEADAFRDLMTITRFVLNEQSKYPESRGDFTILLSNIVLGCKFVCSAVNKAGLAKLIGLAGDTNIQGEEQKKLDVLSNDVFVKALVSSGRTSVLVSEEDEEATFVESSKCGKYCVVFDPLDGSSNIDCGVSIGTIFGIYTMEHSDEPTTKDVLKPGNEMVAAGYCMYGSSCMLVLSTGTGVHGFTLDPSLGEFILTHPDIKIPKKGNIYSVNEGNAQNWDGPTTKYVERCKYPKDGSPAKSLRYVGSMVADVHRTLLYGGIFLYPADKKSPNGKLRVLYEVFPMAFLMEQAGGQAFTGKKRALDLVPKKIHERSPIFLGSYDDVEEIKALYAEEEKN

SEQ ID NO: 18035 - protein, 356 aa, Glycine max
  unsure (1)..(356): unsure at all Xaa locations
MDHSADAHRTDLMTITRFVLNEQSKHPESRGDFTILLSHIVLGCKFVCSAVSKAGLAKLIGLAGETNVQGEEQKKLDVLSNDVFIKALVSSGRTCILVSEEDEEATFVEASKRGKYCVVFDPLDGSSNIDCGVSIGTIFGIYLIKEDHEPTIEDVLQPGKNMLAAGYCMYGSSCTLVLSTGSGVNGFTLDPSLGEFILTHPDIKIPKKGKIYSVNEGNAKNWDDPTTKYVENCKYPRDGSSPKSLRYIGSMVADVHRTLLYGGIFLYPADKKSPNGKLRVLYEVFPMSFLMEQAGGQAFTGNQRALDLVPKKLHERSPIFLGSYEDVEEIKALYAAEEXSWKKAFFVFRYLQAIVI

SEQ ID NO: 18036 - protein, 356 aa, Glycine max
  unsure (1)..(356): unsure at all Xaa locations
MDHSADAQRTDLMTITRFVLNQQSNHPESRGDFSILLSHIVLGCKFLCSAVNKAGLAKLIGLAGETNVQGEEQKKLDVLSNDVFIKALVSSGRTCILVSEEDEEATFVEASKRGKYCVVFDPLDGSSNIDCGVSIGTIFGIYLIKEDHEPTIEDVLQPGKNMLAAGYCMYGSSCTLVLSTGSGVNGFTLDPSLGEFILTHPDIKIPKKGKIYSVNEGNAKNWDDPTTKYVENCKYPRDGSSPKSLRYIGSMVADVHRTLLYGGIFLYPADKKSPNGKLRVLYEVFPMSFLMEQAGGQAFTGNQRALDLVPKKLHERSPIFLGSYEDVEEIKALYAAEEXSWKKAFFVFRYLQAIVI

SEQ ID NO: 18037 - protein, 359 aa, Glycine max
  unsure (1)..(359): unsure at all Xaa locations
FGSRDHSADAQRTDLMTITRFVLNQQSNHPESRGDFSILLSHIVLGCKFLCSAVNKAGLAKLIGLAGETNVQGEEQKKLDVLSNDVFIKALVSSGRTCILVSEEDEEATFVEASKRGKYCVVFDPLDGSSNIDCGVSIGTIFGIYLIKEDHEPTIEDVLQPGKNMLAAGYCMYGSSCTLVLSTGSGVNGFTLDPSLGEFILTHPDIKIPKKGKIYSVNEGNAKNWDDPTTKYVENCKYPRDGSSPKSLRYIGSMVADVHRTLLYGGIFLYPADKKSPNGKLRVLYEVFPMSFLMEQAGGQAFTGNQRALDLVPKKLHERSPIFLGSYEDVEEIKALYAAEEXSWKKAFFVFRYLQAIVI

SEQ ID NO: 18038 - protein, 356 aa, Glycine max
  unsure (1)..(356): unsure at all Xaa locations
MDHSADAQRTDLMTITRFVLNEQSKHPESRGDFSILLSHIVLGCKFVCSAVNKAGLAKLIGLAGETNVQGEEQKKLDVLSNDVFIKALISSGRTCILVSEEDEEATFVEPSKRGKYCVVFDPLDGSSNIDCGVSIGTIFGIYLIKEDHEPTVEDVLQPGKNMLAAGYCMYGSSCTLVLSTGSGVNGFTLDPSLGEFILTHPDIKIPKKGKIYSVNEGNAKNWDDPTTKYVENCKYPRDGSSPKSLRYIGSMVADVHRTLLYGGIFLYPADKKSPNGKLRVLYEVFPMSFLMEQAGGQAFTGNQRALDLVPKKLHERSPIFLGSYEDVEEIKALYAAEEXSWKKAFFVFRYLQAIVI

SEQ ID NO: 18039 - protein, 341 aa, Glycine max
  unsure (1)..(341): unsure at all Xaa locations
MDHSADAQRTDLMTITRFVLNEQSKHPESRGDFSILLSHIVLGCKFVCSAVNKAGLAKLIGLAGETNVQGEEQKKLDVLSNDVFIKALVSSGRTCILVSEEDEEATFVEASKRGKYCVVFDPLDGSSNIDCGVSIGTIFGIYLIKEDHEPTIEDVLQPGKNMLAAGYCMYGSSCTLVLSTGSGVNGFTLDPSLGEFILTHPDIKIPKKGKIYSVNEGNAKNWDDPTTKYVENCKYPRDGSSPKSLRYIGSMVADVHRTLLYGGIFLYPADKKSPNGKLRVLYEVFPMSFLMEQAGGQAFTGNQRALDLVPKKLHERFPIFLGSYEDVEEIKALYSADEKXE

SEQ ID NO: 18040 - protein, 341 aa, Glycine max
  unsure (1)..(341): unsure at all Xaa locations
MDHSADAQRTDLMTITRFVLNEQSKHPESRGDFSILLSHIVLGCKFVCSAVNKAGLAKLIGLAGETNVQGEEQKKLDVLSNDVFIKALISSGRTCILVSEEDEEATFVEPSKRGKYCVVFDPLDGSSNIDCGVSIGTIFGIYLIKEDHEPTVEDVLQPGKNMLAAGYCMYGSSCTLVLSTGSGVNGFTLDPSLGEFILTHPDIKIPKKGKIYSVNEGNAKNWDGPTTMYVENCKYPKDGSSPKSLRYIGSMVADVHRTLLYGGIFLYPADKKSPNGKLRVLYEVFPMSFLMEQAGGQAFTGNQRALDLVPKKLHERSPIFLGSYEDVEEIKALYSADEKXE

SEQ ID NO: 18041 - protein, 330 aa, Glycine max
  unsure (1)..(330): unsure at all Xaa locations
MTITRFVLNIQDSQPESRGDFSILLSHIVLGCKFFCSAVSKAGLAKLIGLAGETNVQGEEXKKLDVLSNDVFIKALMSSGRTCILVSEEDEEATIVESSKRGKYCVVFDPLDGSSNIDCGVSIGTIFGVYAIKENHEPTIEDVLLPGKNMVAAGYCMYGSSCTLVLSTGAGVNGFTLDPSLGEFILTHPNIKIPKKGKIYSVNEGNAKNWDRPTATYVEKCKFPEDGSSPKSLRYIGSMVADVHRTLLYGGIFLYPADKKSPNGKLRVLYEVFPMSFLMEQAGGQSFTGKERALDLVPTKLHERSPIFLGSYDDVEEIKALYAAAEGEQE

SEQ ID NO: 18042 - protein, 266 aa, Glycine max
  unsure (1)..(266): unsure at all Xaa locations
XYIVCAFVDDGEIYFSXCILVSEEDEEATFVEASKRGKYCVVFDPLDGSSNIDCGVSIGTIFGIYLIKEDHEPTIEDVLQPGKNMLAAGYCMYGSSCTLVLSTGSGVNGFTLDPSLGEFILTHPDIKIPKKXGKIYSVNEGNAKNWDRPTATYVEKCKFPEDGSSPKSLRYIGSMVADVHRTLLYGGIFLYPADKXSPNGKLRVLYEVFPMSFLMEQAGGQSFTGKERALDLVPTKLHERSPIFLGSYDDVEEIKALYAAAEGEQE

SEQ ID NO: 18043 - protein, 245 aa, Glycine max
  unsure (1)..(245): unsure at all Xaa locations
XYIVCAFVDDGEIYFSXCILVSEEDEEATFVEASKRGKYCVVFDPLDGSSNIDCGVSIGTIFGIYLIKEDHEPTIEDVLQPGKNMLAAGYCMYGSSCTLVLSTGSGVNGFTLDPALGEFILTHPDIKIPKKGKIYSVNEGNAKNWDGPTTMYVENCKYPKDGSSPKSLRYIGSMVADVHRTLLYGGIFLYPADKKSPNGKLRVLYEVFPMSFLMEQAGGQAFTGNQRALDLVPKKLHERSPIFLX

SEQ ID NO: 18044 - protein, 356 aa, Glycine max
  unsure (1)..(356): unsure at all Xaa locations
XPETPGFEPNASVKNLSASSDDGFVTLTEYVGKEGMNVKDDLVVLLDHIQYACKKIAALVASPFNYSLGKQTALGSVGSDRDAPKPLDIVSNEIILSSLRKSGRVAVMASEENDAPTWISDDGPYVVVTDPLDGSRNIDASIPTGTIFGIYKRLEELDDLPTEDKAMLNSLQSGSRLIAAAYVLYSSATILCITFGSGTQAFTLDHSTGDFILTNPSIKIPPRGQIYSVNDARYFDWPEGLRQYIDTVRQGKGRYPKKYSARYICSLVADLHRTLLYGGVAMNPRDHLRLVYEANPLSFIVEQAGGRGSDGKNRILSLQPVKLHQRLPLFLGSLEDMEELESYGDIQQKVNPGYEV

SEQ ID NO: 18045 - protein, 400 aa, Glycine max
MQAAATTPLYQLVSFKPKLQTFPSKSQLCPLGTPFCRLGMASVSGFRLRPLRAVGGSSSSSASGDDGFVTLIEYVAKEGMNVKDDLVVLLDHIQYACKRIAALVASPFNYSLGKQTGHGSVGSDRDAPKPLDIVSNEIILSSLRKSRKVAVMASEENDAPTWISDDGPYVVVTDPLDGSRNIDASIPTGTIFGIYKRLEELDNLPTEEKAMLNSLQSGSKLIAAAYVLYSSATILCITFGSGTQAFTLDHSTGDFILTNPSIKIPPRGQIYSVNDARYFDWPEGLRQYIDTVRQGKGRYPKKYSARYICSLVADLHRTLLYGGVTMNPRDHLRLVYEANPLSFIVEQAGGRGSDGKNRILSLQPVKLHQRLPLFLGSLEDMEELESYGDIQQKVNPGYEV

SEQ ID NO: 18046 - protein, 400 aa, Glycine max
  unsure (1)..(400): unsure at all Xaa locations
MQAAATTPLYQLVSFKPKLQTFPSKSQLCPLGTPFCRLGMASVSGFRLRPLRAVGGSSSSSASGDDGFVTLIEYVAKEGMNVKDDLVVLLDHIQYACKRIAALVASPFNYSLGKQTALGSVGSDRDAPKPLDIVSNEIILSSLRKSGRVAVMASEENXAPTWISDDGPYVVVTDPLDGSRNIDASIPTGTIFGIYKRLEELDDLPTEDKAMLNSLQSGSRLIAAAYVLYSSATILCITFGSGTQAFTLDHSTGDFILTNPSIKIPPRGQIYSVNDARYFDWPEGLRQYIDTVRQGKGRYPKKYSARYICSLVADLHRTLLYGGVAMNPRDHLRLVYEANPLSFIVEQAGGRGSDGKNRILSLQPVKLHQRLPLFLGSLEDMEELESYGDIQQKVNPGYEV

SEQ ID NO: 18047 - protein, 257 aa, Glycine max
  unsure (1)..(257): unsure at all Xaa locations
MDHSADAHRTDLMTITRFVLNEQSKHPESRXGDFTILLSHIVLGCKFVCSAVSKAGLAKLIGLAGETNVQGEEQKKLDVLSNEVFIKALISSGRTCILVSEEDEEAIIVEPSKRGKYCVCFDPLDGSSNIDCGVSIGTIFGVYALYDVHEPTIEDVLLPGKNMVAAGYCMYGSSCTLVLSTGAGVNGFTLDPSLGEFILTHPNIKIPKKGKIYSVNEGNAKNWDRPTATYVEKCKFPEDGSSPKSLRYIGSHLKTLX

SEQ ID NO: 18048 - protein, 293 aa, Glycine max
  unsure (1)..(293): unsure at all Xaa locations
MEKEYLIIQYSPFMPSFAEIEINPCIITSEGSSMKKSRKVAVMASEENDAPTWISDNGPYVVVTDPLDGSRNIDASIPTGTIFGIYKRLEELDNLPTEEKAMLNSLQSGSKLIAAAYVLYSSATILCITFGSETQAFTLDHSTGDFILTNPSIKIPPXRGQIYSVNDARYFDWPEGLRQYIDPVRQGKGRYPKKYSARYICSLVXADLHRTLLYGGVTMNPRDHLRLVYEANPLSFIVEQAGGRGSDGKNRILSLQPVKLHQRLPLFLGSLEDMEELESYGDIQQKVNPGYEV

SEQ ID NO: 18049 - protein, 149 aa, Glycine max
  unsure (1)..(149): unsure at all Xaa locations
MDHQADTNRTDLMTITRFVLNEQSKYPESRGDFTILLSHIVLGCKFVCSAVNKAGLAKLIGLAGETNVQGEEQKKLDVLSNEVFVKALISSGRTCLLVSEEVEEAIFVPSSHRGKYIVVFDPLDGSSNIDXRVSIGTIFGIYMVKNEAE

SEQ ID NO: 18050 - protein, 387 aa, Glycine max
METGIACYTRGPFLPSVSSKHSPPSISPSFGLRSLKSSSLFGESLRVASKSTLKVSKTKNTSLVTRCEIGDSLEEFLTKATPDKGLIRLLVSMGEALRTISFKVKTASCGGTQCVNTFGDEQLAVDLLANQLLFEALNYSHFCKYACSEENPELLDMGGPVEGGFSVAFDPLDGSSIVDTNFTVGTIFGVWPGDKLTGITGRDQVAAAMGVLGPRTTYVLALKDFPGTHEFLLLDEGKWQHVKETTEIGEGKLFSPGNLRATSDNPDYAKLIDYYVNEKYTLRYTGGMVPDVNQIIVKEKGIFTNVSSPSAKAKLRLLFEVAPLGFLIEKAGGYSSDGHQSVLDKVISNIDDRTQVAYGSKNEIIRFEETLYGKSRLKGGVAVGAAA

SEQ ID NO: 18051 - protein, 97 aa, Glycine max
RYIESMVADIHRTWLNGGIFMYPADAKSPNGKLRLLYEVFPMSYLMEQAGGQAFTGKQRALDLIPKKIHERSPVFLGSYDDIEQMKELYAASKEDDA

SEQ ID NO: 18052 - protein, 398 aa, Glycine max
METGIACYTRGPFLPSVSSKHSPPSISPSFGLRSLKSSSLFGESLRVASKSTLKVSKTKNTSLVTRCEIGDSLEEFLTKATPDKGLIRLLVSMGEALRTISFKVKTASCGGTQCVNTFGDEQLAVDLLANQLLFEALNYSHFCKYACSEENPELLDMGGPVEGGFSVAFDPLDGSSIVDTNFTVGTIFGVWPGDKLTGITGRDQVAAAMGVLGPRTTYVLALKDFPGTHEFLLLDEGKWQHVKETTEIGEGKLFSPGNLRATSDNPDYAKLIDYYVNEKYTLRYTGGMVPDVNQIIVKEKGIFTKVTSPSAKAKLRLLFEVAPLGFLIEKAGGYSSDGHQSVLDKVINNIDDRTQVAYGSKNEIIRFEETLYGKSRLKDGVAVGASAPCVRPAIQNKL

SEQ ID NO: 18053 - protein, 387 aa, Glycine max; identical to SEQ ID NO: 18050

SEQ ID NO: 18054 - protein, 387 aa, Glycine max
  unsure (1)..(387): unsure at all Xaa locations
METGIACYTRGPFLPSVSSKHSPPSISPSFGLRSLKSSSLFGESLRVASKSTIKVSKTKNTSLVTRCEIGDSLEEFLTKATPDKGLIRLLVSMGEALRTISFKVKTASCGGTQCVNTFGDEQLAVDLLANQLLFEALNYSHFCKYACSEXXPELLDMGGSVEGGFSVAFDPLDGSSIVDTNFTVGTIFGVWPGDKLTGITGRDQVAAAMGVLGPRTTYVLALKDFPGTHEFLLLDEGKWQHVKETTEIGEGKLFSPGNLRATSDNPDYAKLIDYYVNEKYTLRYTGGMVPDVNQIIVKEKGIFTNVSSPSAKAKLRLLFEVAPLGFLIEKAGGYSSDGHQSVLDKVISNIDDRTQVAYGSKNEIIRFEETLYGKSRLKGGVAVGAAA

SEQ ID NO: 18055 - protein, 163 aa, Glycine max
  unsure (1)..(163): unsure at all Xaa locations
SAFAQRTDLMTITRFVLNQQSNHPESRGDFSILLSHIXVLGCKILCSVVNKAGLVKLIALAGETNVQGLFQKKLYVLCNDVFIKALVNRGRTCILVSEEYEEATFVEASMRGKYXVDLDPLNGSSNIDXCGDSIVTVFLLHICFSKSILHGDYVFPLNSPAIX

SEQ ID NO: 18056 - protein, 115 aa, Glycine max
  unsure (1)..(115): unsure at all Xaa locations
MDHAAEAQRTDLMTITRHALNEQGRHPESRGDFTILLSHIVLGCKFVASAVNKAGLAKLIGLAGETNVQGEEQKKLDVLSNEVFVKALVSSGRTCVLVSEENEXAIFVDAPSAGS

SEQ ID NO: 18057 - protein, 329 aa, Pisum sativum
MTITRFVLNEQSKRPESRGDFTILLSHIVLGCKFVCSAVNKAGLAKLIGLAGETNIQGEEQKKLDVLSNDVFIKALISSGRTCILVSEEDEEATFVEPSLRGKYCVVFDPLDGSSNIDCGVSIGTIFGIYMVKDNHAPTLDDVLQPGKNMLAAGYCMYGSSCTLVLSTGSGVNGFTLDPSLGEFILTHPDIKIPKKGKIYSVNEGNAKNWDGPTTKYVEKCKFPTDGSSPKSLRYIGSMVADVHRTLLYGGIFLYPADKKSPNGKLRVLYEVFPMSFLMEQAGGQSFTGKQRALDLIPTKIHERSPIFLGSYDDVEEIKALYAAEQKNA

SEQ ID NO: 18058 - protein, 341 aa, Pisum sativum
MDHAGDAMRTDLMTITRYVLNEQSKRPESRGDFTILLSHIVLGCKFVCSAVNKAGLAKLIGLAGETNIQGEEQKKLDVLSNEVFVKALTSSGRTCILVSEEDEEATFIEPSLRGKYCVVFDPLDGSFNIDCGVSIGTIFGIYMVKDFETATLEDVLQPGKNMVAAGYCMYGSSCTLVLSTGSGVNGFTLDPSLGEYILTHPDIKIPNKGKIYSVNEGNAKNWDGPTTKYVEKCKFPTDGSSPKSLRYIESMVANVHRTLLYGGIFLYPGDKKSPNGKLRVLYEVFPMSFLMEQAGGQAFTGKQRALDLIPTKIHERSPVFLGSYDDVEDIKALYAAQEKTA

SEQ ID NO: 18059 - protein, 392 aa, Oryza sativa (indica cultivar-group); identical to SEQ ID NO: 623

SEQ ID NO: 18060 - protein, 340 aa, Solanum tuberosum
MDHAADRHRTDLMTITRFVLNEQTKHPESRGDFSILLSHIVLGCKFVCTAVNKAGLAKLLGLAGETNVQGEDQKKLDVLSNEVFIKALVSSNRTCILVSEEDEEATFVRPANRGKYCVVFDPLDGSSNIDCGVSIGTIFGIYMIKDGHEPTLDDVLQPGMNMLAAGYCMYGSSCTLVLSTGSGVNGFTLDPSLGEFILTHPDIKIPKKGKIYSVNEGNAKNWDSPTSKYVQSCKYPADGSSPKSLRYIGSMVADVHRTLLYGGIFLYPGDKKSPNGKLRVLYEVFPMSFLMEQAGGQAFTGKQRALDLVPEKIHERSPIFLGSYDDVEEIKKLYAAEEQN

SEQ ID NO: 18061 - protein, 339 aa, Oryza sativa; identical to SEQ ID NO: 624

SEQ ID NO: 18062 - protein, 339 aa, Oryza sativa; identical to SEQ ID NO: 624

SEQ ID NO: 18063 - protein, 340 aa, Oryza sativa
  unsure (1)..(340): unsure at all Xaa locations
MDHEADAYRTDLMTITRYVLNEQSRNPEARGDLTILLSHIVLGCKFVASAVNKAGLAKLIGLAGETNVQGEEQKKLDVLSNEVFVKALVSSGXRTCVLVSEEDEEATFVDPALRGKYCVCFDPLDGSSNIDCGVSIGTIFGIYMIKDKENVTLEDVLQPGKNMVAAGYCMYGSSCTLVLSTGNGVNGFTLDPSLGEFILTHPDIKIPKKGKIYSVNEGNAKNWDEPTAKFVEKCKFPKDGSSPKSLRYIGSMVADVHRTLLYGGVFLYPADKKSPNGKLRVLYEVFPMSFLMEQAGGQSFTGKERALDLVPTKIHERSPIFLGSFEDVEEIKGLYAAQAK

SEQ ID NO: 18064 - protein, 406 aa, Oryza sativa; identical to SEQ ID NO: 460

SEQ ID NO: 18065 - protein, 407 aa, Oryza sativa
MAAAATTSSHLLLLSRQQAAASLQCGLSFRRQPGRLAGGSSAPSVRCMAAVDTASAPAATEASKKSSYEITTLTTWLLKQEQAGTIDGEMTIVLASISTACKQIASLVQRAPISNLTGVQGAVNVQGEDQKKLDVVSNEVFSNCLKSSGRTGVIASEEEDVPVAVEESYSGNYIVVFDPLDGSSNIDAAVSTGSIFGIYSPNDECLADIADDQNVLDQVEQRCIVSVCQPGSNLLAAGYCMYSSSVIFVLTIGTGVYVFTLDPMYGEFVLTQEKVQIPKAGKIYAFNEGNYALWDDKLKSYMDSLKEPGPSGKPYSARYIGSLVGDFHRTLLYGGIYGYPRDQKSKNGKLRLLYECAPMSFIVEQAGGKGSDGHQRILDIMPTEIHQRVPLYIGSVEEVEKVEKFLA

SEQ ID NO: 18066 - protein, 389 aa, Oryza sativa
MAAAATTSSHLLLLSRQQAAASLQCGLSFRRQPGRLAGGSSAPSVRCMAAVDTASAPAATEASKKSSYEITTLTTWLLKQEQAGTIDGEMTIVLASISTACKQIASLVQRAPISNLTGVQGAVFSNCLKSSGRTGVIASEEEDVPVAVEESYSGNYIVVFDPLDGSSNIDAAVSTGSIFGIYSPNDECLADIADDQNLDQVEQRCIVSVCQPGSNLLAAGYCMYSSSVIFVLTIGTGVYVFTLDPMYGEFVLTQEKVQIPKAGKIYAFNEGNYALWDDKLKSYMDSLKEPGPSGKPYSARYIGSLVGDFHRTLLYGGIYGYPRDQKSKNGKLRLLYECAPMSFIVEQAGGKGSDGHQRILDIMPTEIHQRVPLYIGSVEEVEKVEKFLA

SEQ ID NO: 18067 - protein, 374 aa, Oryza sativa
MAAAATTSSHLLLLSRQQAAASLQCGLSFRRQPGRLAGGSSAPSVRCMAAVDTASAPAATEASKKSSYEITTLTTWLLKQEQAGTIDGEMTIVLASISTACKQIASLVFSNCLKSSGRTGVIASEEEDVPVAVEESYSGNYIVVFDPLDGSSNIDAAVSTGSIFGIYSPNDECLADIADDQNLDQVEQRCIVSVCQPGSNLLAAGYCMYSSSVIFVLTIGTGVYVFTLDPMYGEFVLTQEKVQIPKAGKIYAFNEGNYALWDDKLKSYMDSLKEPGPSGKPYSARYIGSLVGDFHRTLLYGGIYGYPRDQKSKNGKLRLLYECAPMSFIVEQAGGKGSDGHQRILDIMPTEIHQRVPLYIGSVEEVEKVEKFLA

SEQ ID NO: 18068 - protein, 401 aa, Oryza sativa
  unsure (1)..(401): unsure at all Xaa locations
LSSLSLLPLHRAPLPPTSNYPPXRRLPLAPSSSPSSATRRSRAAXARLPGACRSSRRHGRGDRGGGDAAXTLLEYMGQAGAADDLVVLVAHVQSACKRIAALVASPGNAELSRGKAGGGVAVAAGRDAPKPLDELSNEIILSSLRRSGKVAVMASEENHLPIWVSNDSPYVVVTDPLDGSRNIEVSIPTGTIFGIYNRLAELDHLPEEERAQLNSLQSGTHLVASGYVLYSSATIFCISFGAGTHGFTLDHLTGEFVLTHPSIQIPPRGQIYSVNDARYFDWPEGLRKYIDTIRQGKGQHPKKYSARYVCSLVADFHRTLIYGGVAMNPRDHLRLVYEANPLSFLAEQAGGRGSDGKSRILSIQPVKLHQRLPLFLGGMEDMLELESYGDVQQKVNPGYEV

SEQ ID NO: 18069 - protein, 213 aa, Oryza sativa
IDCGVSIGTIFGIYMIKDKDNVTLDDVLQPGTDMLAAGYCMYGSSCTLVLSTGNGVNGFTLDPSLGEFILTHPNIKIPNRGKIYSVNEGSAKNWDAPTAKFVEKCKFPQDGSPSKSLRYIGSMVADVHRTLLYGGIFLYPADQKSPNGKLRVLYEVFPMSFLMEQAGGQAFTGKQRALELVPRKIHDRSPIFLGSYDDVEDIKALYASESIIG

SEQ ID NO: 18070 - protein, 331 aa, Oryza sativa
  unsure (1)..(331): unsure at all Xaa locations
XGRGDRGGGDAAXTLLEYMGQAGAADDLVVLVAHVQSACKRIAALVASPGNAELSRGKAGGGVAVAAGRDAPKPLDELSNEIILSSLRRSGKVAVMASEENHLPIWVSNDSPYVVVTDPLDGSRNIEVSIPTGTIFGIYNRLAELDHLPEEERAQLNSLQSGTHLVASGFGAGTHGFTLDHLTGEFVLTHPSIQIPPRGQIYSVNDARYFDWPEGLRKYIDTIRQGKGQHPKKYSARYVCSLVADFHRTLIYGGVAMNPRDHLRLVYEANPLSFLAEQAGGRGSDGKSRILSIQPVKLHQRLPLFLGGMEDMLELESYGDVQQKVNPGYEV

SEQ ID NO: 18071 - protein, 1141 aa, Oryza sativa
MAAATAAAETPPTLLEYMGQAGAADDLVVLVAHVQSACKRIAALVASPGNAELSRGKAGGGVAVAAGRDAPKPLDELSNEIILSSLRRSGKVAVMASEENHLPIWVSNDSPYVVVTDPLDGSRNIEVSIPTGTIFGIYNRLAELDHLPEEERAQLNSLQSGTHLVASGFGAGTHGFTLDHLTGEFVLTHPSIQIPPRGQIYSVNDARYFDWPEGLRKYIDTIRQGKGQHPKKYSARYVCSLVADFHRTLIYGGVAMNPRDHLRLVYEANPLSFLAEQAGGRGSDGKSRILSIQPVKLHQRLPLFLGGMEDMLELESYGDVQQKVNPGYEIMRSEDNVACEKRTGGPTGELCICKTDVFTCQVFCFCLRDYAVSLCNIAEKLGCISPVCTLLCNVVRLVRFKSSNKSNFYYEPCNFVKPLLTIELGWLTEQSKLEGISGRVIAMRRVAISRPVARRVNFNLMKPAAAAALLLPPPPPSSREGSAPQTRAEPRSTMSADSAAAGRDALLDELRALMAAHSPSLHALVVPSEDAHQSEYVSERDKRRQFVSGFTGSAGLALITMKEALLWTDGRYFLQAEQQLTNRWKLMRMGEDPPVEVWIADNLSDEAVIGINPWCISVDTAQRYEHAFSKKHQTLFQLSSDLVDEIWKDRPPVNALPVFVQPVEYAGCSVTEKLKELREKLQHEKARGIIIAALDEVAWLYNIRGNDVHYSPVVHSYSIVTLHSAFFYVDKRKVSVEVQNYMTENGIDIKDYNMVQSDASLLASGQLKGSAVNGSSHGENDMNENSKVWIDSNSCCLALYSKLDQYQVLMLQSPIALPKAVKNPVELDGLRKAHIRDGAAVVQYLAWLDKQMQENYGASGYFTEAKGSQKKEHMNVKLTEVSVSDKLEGFRASKEHFKGLSFPTISSVGPNAAVIHYKPEASSCAELDADKIYLCDSGAQYLDGTTDITRTVHFGKPSEHEKSCYTAVLKGHIALDTAVFPNGTTGHAIDILARTPLWRSGLDYRHGTGHGIGSYLNVHEGPHLISFRPSARNVPLQASMTVTDEPGYYEDGSFGIRLENVLIVKEANTKFNFGDKGYLAFEHITWTPYQTKLIDTTLLTPAEIEWVNAYHSDCRKILQPYLNEQEKEWLRKATEPIAASC

SEQ ID NO: 18072 - protein, 153 aa, Oryza sativa
IDCGVSIGTIFGIYMIKDKDNVTLDDVLQPGTDMLAAGYCMYGSSCTLVLSTGNGVNGFTLDPSLGEFILTHPNIKIPNRGKIYSVNEGSAKNWDAPTAKFVEKCKFPQDGSPSKSLRYIGSMVADVHRTLLYGGIFLYPADQKSPNGKLRVL

SEQ ID NO: 18073 - protein, 169 aa, Oryza sativa
  unsure (1)..(169): unsure at all Xaa locations
RTRAHIIGXSRNHSFTLDHLTGEFVLTHPSIQIPPRGQIYSVNDARYFDWPEGLRKYIDTIRQGKGQHPKKYSARYVCSLVADFHRTLIYGGVAMNPRDHLRLVYEANPLSFLAEQAGGRGSDGKSRILSIQPVKLHQRLPLFLGGMEDMLELESYGDVQQKVNPGYEV

SEQ ID NO: 18074 - protein, 131 aa, Oryza sativa
  unsure (1)..(131): unsure at all Xaa locations
XYSVNEGHAXNWDGPTTKYVKKCRFPKDGSFAKSLRYVGSMVADVHRTLLYGGIFLYPADKKSPNGKLRVLYEVFPMSFLMEQAGGQAFTGKKRALDLVPEKIHERSPIFLGSYEDVEEIKALYAAEEXKK

SEQ ID NO: 18075 - protein, 213 aa, Oryza sativa
  unsure (1)..(213): unsure at all Xaa locations
GRGDRGGGDAAHAARVHGPGWRGRRPRRPRGARPERVQAHRRARGVARERRAVAGEGGGWCGGGGRAGRAQAARRIVXGRGEIYSVNDARYFDWPEGLRKYIDTIRQGKGQHPKKYSARYVCSLVADFHRTLIYGGVAMNPRDHLRLVYEANPLSFLAEQAGGRGSDGKSRILSIQPVKLHQRLPLFLGGMEDMLELESYGDVQQKVNPGYEV

SEQ ID NO: 18076 - protein, 392 aa, Oryza sativa; identical to SEQ ID NO: 623

SEQ ID NO: 18077 - protein, 455 aa, Oryza sativa
MVRIELVSDGLLLAELADGCVGGSPHGFTPSHDLSGPVPVSSQIREPGLGAPRSSFAWQPRPAMETVAAASYTRGAATRSPACCAAMSFSQSYRPKAARPPSTFYGESLRVNTARSLPSGRQSKAASRAALSTRCEIGDSLEEFLTKATPDKNLIRLLICMGEAMRTISFKVRTASCGGTACVNSFGDEQLAVDMLADKLLFEALEYSHVCKYACSEEVPELQDMGGPVDGGFSVAFDPLDGSSIVDTNFTVGTIFGVWPGDKLTGVTGGDQVAAAMGIYGPRTTYIIALKDCPGTHEFLLLDEGKWQHVKDTTTIGEGKMFSPGNLRATFDNPEYDKLINYYVKEKYTLRYTGGMVPDVNQIIVKEKGIFTNVTSPTAKAKLRLLFEVAPLGFLIEKAGGYSSDGKQSVLDKVINNLDERTQVAYGSKNEIIRFEETLYGSSRLTAGATVGAAA

SEQ ID NO: 18078 - protein, 120 aa, Oryza sativa
  unsure (1)..(120): unsure at all Xaa locations
XRVRGRVGGRVGGRVGRTLLYGGVFLYPADKKSPNGKLRVLYEVFPMSFLMEQAGGQSFTGKERALGLVPTKVTERSPIFLGSFEDVEEIKGLYAAQAKXARFDRSGTIKGVRMDSLALL

SEQ ID NO: 18079 - protein, 356 aa, Triticum aestivum
  unsure (1)..(356): unsure at all Xaa locations
MDHAADTFRTDLMTITRHVLNEQSRHPESRGDLTILLSHIVLGCKFVASAVNKAGLAKLTGLAGETNVQGEEQKKLDVLSNEVFVNALVSSGRTCVLVSEEDEKATFVDAPLRGKYCVCFDPLDGSSNIDCGVSIGTIFGIYMIKDKDNATLEDVLQPGTDMIAAGYRMYRSSCTLVLSTGNGVNGFTLDPSLGEFILTHPNIKIPNKGKIYSVNEGNARNWDAPTAKYVERCKFPQDGSSPKSLRYIGSLVADVHRTLLYGGIFLYPADKKSPNGKLRVLYEVFPMSFLMEQAGGQSFTGKQRALEIVPAEIHQRSPIFLGSYDDVEEIKSLYALESSTAXSEYPKTHTHALHRV

SEQ ID NO: 18080 - protein, 347 aa, Triticum aestivum
  unsure (1)..(347): unsure at all Xaa locations
MDHAADTFRTDLMTITRHVLNEQSRHPESRGDLTILLSHIVLGCKFVASAVNKAGLAKLTGLAGETNVQGEEQKKLDVLSNEVFVNALVSSGRTCVLVSEEDEKATFVDPKLRGKYCVCFDPLDGSSNIDCGVSIGTIFGIYMIKNQDTVTLEDXVLQPGKDMIAAXGYCMYGRSCTLVLSTGXNGVNGFTLDPSLGEFIMTHPDIKIPPKGKIYSVNEGNAKNWDTPTAKYVEKCKYPTDGSSPKSFRYIGSMVADVHRTLLYGGIFLYPADKKSPSGKLRVMYEVFPMSFLMEEAGGQSFTGKGRSLDLIPTDIHERSPIFLGSSDDVEEIKALYAEEAKKEGSA

SEQ ID NO: 18081 - protein, 345 aa, Triticum aestivum
  unsure (1)..(345): unsure at all Xaa locations
MDHAADAQRTDLMTITRHALNEQGRHPESRGDFTILLSHIVLGCKFVASAVNKAGLAKLIGLAGETNVQCVLVSEENEAAIFVDAPLRGKYCVCFDPLDGSSNIDCGVSIGTIFGIYMIKDKDNATLEDVLQPGTDMIAAGYCMYGSSCTLVLSTGNGVNGFTLDPSLGEFILTHPNIKIPNKGKIYSVNEGNARNWDAPTAKYVERCKFPQDGSSPKSLRYIGSMVADVHRTLXYGGIFLYPADKKSPNGKLRALYEVFPMSFLMEQAGGQSFTGKHRALEIVPXEIHQRSPIFLGSYDDVEEIKXLYAAESSXAXXEYLKTHTHVPHRVAKRKGYVPRCDKTP

SEQ ID NO: 18082 - protein, 277 aa, Triticum aestivum
  unsure (1)..(277): unsure at all Xaa locations
RPVSGHHNDFVLVFPSRRLNLHSLFLSLFQNQSQCLPPTADKXSEKVNTNIVTLTRFLTEEQAKHPEATGDFTLLCHALQFSFKSIAYYIRRATLVNLTGLAGSSNITGDDQKKLDVISNDLFIEAMRSSGKCALLVSEEEDEIIYFKDASDARYAVACDPIDGSSNLDAGVSVGTIFAIHKLPEGSKGCKEDILKPGTELLAAGFTMYGASAQLVITMRGGTVNGFTLDNGVGEFILSHPNMRLPKSRDIYSCNEGNSLYWGXQTINYFNSLKXGS

SEQ ID NO: 18083 - protein, 186 aa, Triticum aestivum
  unsure (1)..(186): unsure at all Xaa locations
XQXGSRLVAAXYVLYSSATIFCISFGAGTHGFTLDRSTGEFVLTHPSMQIPPRGQIYSVNDARYFDWPEGLKKYIDTIRQGKGQHPKKYSARYVCSLVADFHRTIIYGGVAMNPRDHLRLVYEANPLSFLAEQAGGRGSDGKTRILSIQPVKLHQRLPLFLGSMEDMLELESYGDVQQKVNPGYDV

SEQ ID NO: 18084 - protein, 170 aa, Triticum aestivum
MDHAAEAQRTDLMTITRHALNEQGRHPESRGDFTILLSHIVLGCKFVASAVNKAGLAKLIGLAGETNVQGEEQKKLDVLSNEVFVKALVSSGRTCVLVSEENEAAIFVDAPLRGKYCVCFDPLDGSSNIDCGVSIGTIFGIYMIKDKDNATLEDVLQPGTDMIAAGYCMY

SEQ ID NO: 18085 - protein, 395 aa, Triticum aestivum
  unsure (1)..(395): unsure at all Xaa locations
METVAAAGYAHGAATRSPACCAAMSFSQSYRPKAARPATSFYGESLRANTARTSFPAGRQSKAASRAALTTRCAIGDSLEEFLTKATPDKNLIRLLICMGEAMRTIAFKVRTASCGGTACVNSFGDEQLAVDMLADKLLFEALEYSHVCKYACSEEVPELQDMGGPVEGGFSVAFDPLDGSSIVDTNFTVGTIFGVWPGDKLTXGVTXGGDQVAAAMGIYGPRTTFVVALKDCPGTHEFLLLDEGKWQHVKDTTSIGEGKMFSPGNLRATFDNPDYDKLVNYYVKEKYTLRYTGGMVPDVNQIIVKEKGIFTNVTSPTAKAKLRLLFEVAPLGFLIEKAGGHSSDGKQSVLDKVISVLDERTQVAYGSKNEIIRFEETLYGSSRLAASATVGATA

SEQ ID NO: 18086 - protein, 393 aa, Triticum aestivum
METVAAAGYAHGAATRSPACCAAMSFSQSYRPKAARPATSFYGESLRANTARTSFPAGRQSKAASRAALTTRCAIGDSLEEFLTKATPDKNLIRLLICMGEAMRTIAFKVRTASCGGTACVNSFGDEQLAVDMLADKLLFEALEYSHVCKYACSEEVPELQDMGGPVEGGFSVAFDPLDGSSIVDTNFTVGTIFGVWPGDKLTGVTGGDQVAAAMGIYGPRTTFVVALKDCPGTHEFLLLDEGKWQHVKDTTSIGEGKMFSPGNLRATFDNPDYDKLVNYYVKEKYTLRYTGGMVPDVNQIIVKEKGIFTNVTSPTAKAKLRLLFEVAPLGFLIEKAGGHSSDGKQSVLDKVISVLDERTQVAYGSKNEIIRFEETLYGSSRLAASATVGATA

SEQ ID NO: 18087 - protein, 393 aa, Triticum aestivum
METVAAAGYARGAATRSPACCAAMSFSQSYRPKAARPATSFYGESLRANTARTSFPAGRQSKAASRAALTTRCAIGDSLEEFLTKATPDKNLIRLLICMGEAMRTIAFKVRTASCGGTACVNSFGDEQLAVDMLADKLLFEALEYSHVCKYACSEEVPELQDMGGPVEGGFSVAFDPLDGSSIVDTNFTVGTIFGVWPGDKLTGVTGGDQVAAAMGIYGPRTTFVVALKDCPGTHEFLLLDEGKWQHVKDTTTIGEGKMFSPGNLRATFDNPDYDKLVNYYVKEKYTLRYTGGMVPDVNQIIVKEKGIFTNVTSPTAKAKLRLLFEVAPLGFLIEKAGGHSSDGKQSVLDKVISVLDERTQVAYGSKNEIIRFEETLYGSSRLAASATVGATA

SEQ ID NO: 18088 - protein, 77 aa, Triticum aestivum
  unsure (1)..(77): unsure at all Xaa locations
XHEKKSPSGKLRVMYEVFPMSFLMEEAGGQSFTGKGRSLDLIPTDIHERSPIFLGSSDDVEEIKALYAEEAKKAGSA

SEQ ID NO: 18089 - protein, 110 aa, Triticum aestivum
  unsure (1)..(110): unsure at all Xaa locations
MDHAADAQRTDLMTITRHALNEQGRHPESRGDFTILLSHIVLGCKFVASAVNKAGLAKLIGLAGETNVQGEEQKKLDVLSNEVFVKALVSSGRTCVLVSEENEAAIFVDX

SEQ ID NO: 18090 - protein, 383 aa, Triticum aestivum
  unsure (1)..(383): unsure at all Xaa locations
METVAAAGYARGAATRSPACCAAMSFSQSYRPKAARPATSFYGESLRANTARTSFPAGRQSKAASRAALTTRCAIGDSLEEFLTKATPDKNLIRLLICMGEAMRTIAFKVRTASCGGTACVNSFGDEQLAVDMLAVKLLLDSVEYSHVXKYACSEEGPELQDMAAPVEGAFMXXDTHLPGGTILGVCPGDKLTGVTGADQAAAAMGIYGPRTPFVVALKDCPDTQEFILIDEGKWQHVKDTRTIGERKEYSHGDKRATFDNHDYDNPVNYYVNEKYTLRYTGGMVPDVNQIIVKEKGIFTNVTSPTAKAKLRLLFEVAPLGFLIEKAGGHSSDGKQSVLDKVISVLDERTQVAYGSKNEIIRFEETLYGSSRLAASATVGATA

SEQ ID NO: 18091 - protein, 345 aa, Zea mays
MDHAADAHRTDLMTITRHVLNEQSRNPESRGDFTILLSHIVLGCKFVASAVNKAGLAQLIGLAGETNVQGEEQKKLDVLSNEVFVKALVSSGRTCVLVSEEDEEATFVDPKLRGRYCVCFDPLDGSSNIDCGVSIGTIFGIYIIKDKDNVTLEDVLQPGKNMLAAGYCMYGSSCTLVLSTGTGVNGFTLDPSLGEFILTHPDIKIPKKGKIYSVNEGNAKNWDAPVAKFVEKCKYPKDGSPPRSLRYIGSMVADVHRTLLYGGVFLYPADEKNPNGKLRILYEVFPMSFLMEQAGGQSFTGKERALDLVPTKIHDRSPIFLGSYDDVEEIKALYAEQAKSSSASS

SEQ ID NO: 18092 - protein, 362 aa, Zea mays
  unsure (1)..(362): unsure at all Xaa locations
MDHAAEAQRTDLMTITRHALNEQGRHPESRGDFTILLSHIVLGCKFVASAVNKAGLAKLIGLAGETNVQGEEQKKLHALSHEVFGEALVSSGRTCVLVSEENEAAIFVDAPLRGKYCVCFDPLDGSSNIDCGVSIGTIFGIYMVKDKDNVTLEDVLQPGTNMLAAGYCMYGSSCTLVLSTGNGVNGFTLDPSLGEFILTHPNIKIPKKGKIYSVNEGNAKNWDGPTAKFVEKCKYPEDGSPPRSLRYIGSMVADVHRTLLYGGIFLYPADQKSPNGKLRVLYEVFPMSFLMEQAGGQAFTGKQRALELAPAKLHDRSPVFLGSYDDVEEIKALYASMSNSGXPFCLRKRARSKAPYASESTA

SEQ ID NO: 18093 - protein, 366 aa, Zea mays
  unsure (1)..(366): unsure at all Xaa locations
MDHAADAHRTDLMTITRHVLNEQSRNPESRGDFTILLSHIVLGCKFVASAVNKAGLAQLIGLAGETNVQGEEQKKLDVLSNEVFVKALVSSGRTCVLVSEEDEEATFVDPKLRGRYCVCFDPLDGSSNIDCGVSIGTIFGIYMVKDKDNVTLEDVLQPGTNMLAAGYCMYGSSCTLVLSTGNGVNGFTLDPSLGEFILTHPHIKIPRKGKIYSVNEGNAKNWDGPTAKFVQKRKYPEDGSPPRSLRYIGSMVADVHRTLLYGGIFLYPADQKSPNGKLRYNKXVLYEVFPMSFLMEQAGGQAFTGKQRALELAPAKLHDRSPVFLGSYDDVEEIKALYASMSNSGXPFCLRKRARSKAPYASESTA

SEQ ID NO: 18094 - protein, 334 aa, Zea mays
  unsure (1)..(334): unsure at all Xaa locations
MDHAADAHRTDLMTITRHVLNEQSRNPESRGDFTILLSHIVLGCKFVASAVNKAGLAQLIGLAGETNVQGEEQKKLDVLSNEVFVKALVSSGRTCVLVSEEDEEATFVDPKLRGRYCVCFDPLDGSSNIDCGVSIGTIFGIYIIKDKDNVTLEDVLQPGKNMLAAGYCMYGSSCTLVLSTGTGVNGFTLDPSLGEFILTHPDIKIPKKGKIYSVNEGNAKNWDAPVAKFVEKCKYPKDGSPPRSLRYIGSMVADVHRTLLYGGVFLYPADEKNPNGKLRILYEVFPMSFLMEQAGGQSFTGKEXXSPIFLGSYDDVEEIKALYAEQAKSSSASS

SEQ ID NO: 18095 - protein, 243 aa, Zea mays
  unsure (1)..(243): unsure at all Xaa locations
MDHAAEAQRTDLMTITRHALNEQSRHPESRGDFTILLSHIVLGCKFVASAVNKAGLAKLIGLAGETNVQGEEQKKLDVLSNEVFVKALVSSGRTCVLVSEENEAAIFVDAPLRGKYCVCFDPLDGSSNIDCGVSIGTIFGIYMIKDKDNATLEDVLQPGTHMIAAGYCMYGSSCTLVLSTGNGVNGFTLDPSLGEFILTHPNIKIXNKGKIYSVNERNARNWDAPTAKYVERCKFPQDGSSPX

SEQ ID NO: 18096 - protein, 280 aa, Zea mays
  unsure (1)..(280): unsure at all Xaa locations
MDHAADAHRTDLMTITRHVLNEQSRNPESRGDFTILLSHIVLGCKFVASAVNKAGLAQLIGLAGETNVQGEEQKKLDVLSNEVFVKALVSSGRTCVLVSEEDEEXXVRDPSCVEVTDXXCELVLSTGTGVNGFTLDPSLGEFILTHPDIKIPKKGKIYSVNEGNAKNWDAPVAKFVEKCKYPKDGSPPRSLRYIGSMVADVHRTLLYGGVFLYPADEKNPNGKLRILYEVFPMSFLMEQAGGQSFTGKEXXSPIFLGSYDDVEEIKALYAEQAKSSSASS

SEQ ID NO: 18097 - protein, 193 aa, Zea mays
  unsure (1)..(193): unsure at all Xaa locations
XEAIFVDPALRGKYCVCFDPLDGSSNIDCGVSIGTIFGIYMVKDKDNVTLEDVLQPGTNMLAAGYCMYGSSCTLVLSTGNGVNGFTLDPSLGEFILTHPNIKIPRKGKIYSVNEGNAKNWDGPTAKFVEKCKYPEDGSPPRSLRYIGXVIHCSFSTVYTGVSQFAFFCGHELNVSEVLLRIIVLAQAKKKKKX

SEQ ID NO: 18098 - protein, 152 aa, Zea mays
  unsure (1)..(152): unsure at all Xaa locations
ADAHRTDLMTITRFVLNEQSKYPESRGDFTILLSHIVLGCKFVCSAVNKAGLAKLIGLAGETNIQGEEQKKLDVLSNDVFVNALVSSGRTSVLVSEEDEEATFVEPSKRGKYCVVFDPLDGSSNIDCGVSIGTIFGIYTLDHTDEPTTADVX

SEQ ID NO: 18099 - protein, 200 aa, Zea mays
TSSRRAGASFNLGADLTVLVAHIQSACKRIAALVASPGNAELSRAKARGGAMAAGRDAPKPLDELSNDIILSALQSSGKVAALASEENDLPIWISDGGPYVVVTDPLDGSRNIEVSIPTGTIFGIYNRLVEVDHLPLEERAQLNSLQSGTRLVAAGYVLYSSATILCITFGAGTHAFTLDWSTGEFILTHPSIQIPPRGN

SEQ ID NO: 18100 - protein, 152 aa, Zea mays
  unsure (1)..(152): unsure at all Xaa locations
MDHAADTFRTDLMTITRHVLNEQSRHPESRGDLTILLSHIVLGCKFVASAVNKAGLAKLTGLAGETNVQGEEQKKLDVLSNEVFVNALVSSGRTCVLVSEEDEKATFVDPKLRGKYCVCFDPLDGSSNIDCGVSIGTIFGIYMIXDPDTVTX

SEQ ID NO: 18101 - protein, 146 aa, Zea mays
  unsure (1)..(146): unsure at all Xaa locations
XALAVQVSLILIPGQIYAVNNARYSDWPEVLTXFIDTLRQRXGQHPKKYSARYVCSLVADFHRTLIYGGVAMNPRDHLRLVYEANPLSFLAEQAGGRGSDGKNRILTIQPVKLHQRLPLFLGSMDDMLELESYGDVQQKVNPGYEV

SEQ ID NO: 18102 - protein, 403 aa, Zea mays
  unsure (1)..(403): unsure at all Xaa locations
ALLPSSSARATAHLKAMEIVATRSPACCAAVSFSQSYRPKASRPPTTFYGESVRVNTARXXLSARRQSKAASRAALSARCEIGDSLEEFLTKATPDKNLIRLLICMGEAMRTIAFKVRTASCGGTACVNSFGDEQLAVDMLANKLLFEALEYSHVCKYACSEEVPELQDMGGPVEGGFSVAFDPLDGSSIVDTNFTVGTIXFGVWPGDKLTGVTGGDQVAAAMGIYGPRTTYIVALKDCPGTHEFLLLDEGKWQHVKDTTTIGEGKMFSPGNLRATFDNPEYDKLINYYVKEKYTLRYTGGMVPDVNQIIVKEKGIFTNVTSPTAKAKLRLLFEVAPLGFLMEKAGGYSSDGKQSVLDRVINELDERTQVAYGSKNEIIRFEETLYGSSRLAASATATARALI

SEQ ID NO: 18103 - protein, 130 aa, Zea mays
  unsure (1)..(130): unsure at all Xaa locations
RLKHSIITRGPLSVPEPQIVISSXXSHAEFYAVXRFVDKCKYPEDGSPPRSLRYIGSMVADVHRTLLDGGIFLYPADQKSPDGKLRVLYEVFPMSFLMEQAGGQAFTGKQRVCFSFPFSDPNPQLKNLDX

SEQ ID NO: 18104 - protein, 78 aa, Zea mays
  unsure (1)..(78): unsure at all Xaa locations
XTRXXGIYGYPRDKKSKNGKLRLLYECAPMSFIVEQAGGKGSDGHQRILDITPTEIHQRVPLYIGSVEEVDKVEKFLA

SEQ ID NO: 18105 - protein, 77 aa, Zea mays
RNAKNWDGPTAKFVEKCKYPEDGSPPRSLRYIGSMVADVHRTLLYGGIFLYPADQKSPNGKLRVLYEVFPMSFLMEQ

SEQ ID NO: 18106 - protein, 148 aa, Zea mays
  unsure (1)..(148): unsure at all Xaa locations
XHACARGVAVITGHHXSAIRAXXSLYPADDEEPNGKLRXILXEGEAMNLLMQQAGGQSFTGKERALDLVPTKIHDRSPIFLGSYHDVEEIKALYAGPAKSSSPSSLVRGEIDFSCLNLLLVTGARLSVSVSLGVPVSVNDIQCTMYSP

SEQ ID NO: 18107 - protein, 121 aa, Zea mays
  unsure (1)..(121): unsure at all Xaa locations
MDHAAEAQRTDLMTITRHVLNEQSRHPESRGDFTILLSHIVLGCKFVAAAVNKAGLAKLIGLAGETNVQGEEQKKLDVLSNEVFVKALVSSGRTVRISLLVHCDYILSVXVPRVFCFLTRX

SEQ ID NO: 18108 - protein, 343 aa, Streptomyces coelicolor A3(2)
MTEHHLPSELDVPSEAPDRNLAMELVRVTEAAAMAAGRWVGRGDKNGADGAAVRAMRTLVHTVSMNGVVVIGEGEKDEAPMLFNGERVGDGTGAEVDIAVDPIDGTTLTANGMTNAIAVLAAAERGSMFDPSAVFYMDKLVTGPEAADFVDINAPVAVNIRRIAKAKRRTPEDVTVVILDRPRHQGLIKEVRETGARIKLISDGDVAGSILALREGTGIDLLLGIGGTPEGIISACAVKCLGGTIQGKLWPKDAEERQRAVDAGHDLDRVLTTDDLVSGDNVFFVATGITDGELLRGVRYRSETATTDSIVMRSKSGTVRRIDSEHRLSKLRAYSAVDFDRAK

SEQ ID NO: 18109 - protein, 345 aa, Nostoc sp. PCC 7120
MENTLGLEIIEVVEQAAIASAKWMGKGEKNTADQVAVEAMRERMNKIYMRGRIVIGEGERDDAPMLYIGEEVGICTQPNADQLCNPDELVEIDIAVDPCEGTNLVAYGQPGSMAVLAISEKGGLFAAPDFYMKKLAAPPAAKGKVDINKSATENLKILSECLDRSIDELVVVVMKRDRHQGLIKEIRDAGARVQLISDGDVGAAISCGFAGTNVHALMGIGAAPEGVISAAAMRALGGHFQGQLIYDPEVVKTGLIGESKQANLDRLSSMGINDPDKVYDAHELASGENVLFAGCGITSGNLMQGVRFFHGGARTQSLVISSQSQTARFVDTIHMAGQPKTVQLH

SEQ ID NO: 18110 - protein, 321 aa, Rhodobacter sphaeroides
MADAAQFHDRMLSLGLARVSEAAALASARLIGRGDEKAADQAAVNAMRDQLNLLDIAGVVVIGEGERDEAPMLFIGEEVGTGHGPAVDIALDPLEGTTLTAKDMPNALTVIAMAPRGTLLHAPDVYMEKLAIGPGYAPDTVTLKMTPAERVHALAKAKDGTPEDVTVCILERPRHEELIAEVRSTGAAIRLITDGDVAGVIHCAEAHLTGIDMYMGSGGAPEGVLAAAALKCMGGQMYGQLLFRNDDERSRARRAGIQDLDRIYTRDELVTADVIFAATGVTNGSILAGIKREPGWVTTETILMRSKTGSVRRMSYRSPVK

SEQ ID NO: 18111 - protein, 334 aa, Rhodopseudomonas palustris
MSTTISVPPQLLLERILTLEIVRVTERAAVSAARLRGHGNEKGADQAAVDAMRRELNKMPIEGTIVIGEGERDEAPMLFIGEKVGAGINAGPKVDIAVDPLEGTTLCAKNMPGSIATMAMAEGGTLLHAPDVYMQKIAIGPGYEKNLIDIDAPPEDNILRLAQAKGVPTSGVTVLVLDRPRHAELIAKIRATGAGVQLITDGDVAGVIHCADPDNTGVDIYMGTGGAPEGVLAAAALRCIGGQMQCRLLLDTHSKRNRAESMGIEDPNFVYQIEDMVKGDCLFAATGVTDGSLLSGVKFRKGVIQTETVVMRSVTGTVRYIKADHRQLEKFHLD

SEQ ID NO: 18112 - protein, 351 aa, Rhodospirillum rubrum
MALTARPGVPLSGVRPLSSVASFSADPVLSAALDRNLALDVARVTEAAAIAAARYMGRGDERAADLAATAAMREALTTVPMAGTITLGALADPDDGLFRLGEGVGNGTGLLIDVGVTPLEGATICAMGAPNATACMALARKGELLAVPPVYMEKIAVGPGVPEGCLSLDADPAENIRALAKVRGVPAEALLICVLDRPRNEALVDRVRSTGARITLISDGDVSGAVAVGLPETGVDMYMGSGGAAEGVLAAAGLRCLGGVLQGRLMVRGDSEKAAVRAAGITDPDRILTMADMVPGETMFAATGVTDGALLRGVRLHAGSARSSTLVMRSRTGTLRFIDTRHDLSKLSADR

SEQ ID NO: 18113 - protein, 325 aa, Chloroflexus aurantiacus
MERNLGMDLVRATEAAALRSGRWMGRGDKNSADQAAVDAMRMALNSVPMNGIVVIGEGEKDEAPMLYIGERVGNGEGEEIDVAVDPVEGTTLLAEGMPGAIAIVAVAERHSFYNWRGIPYMDKLAVGERAKGVIDINAPVAYNIRAVARTLNKQVEDVTVVVLDRPRHKDLIRQIREIGARIKLIPHGDVSAGIMTSIENPPADILMGIGGAPEAVLTAAALKCLGGEIQCKVWPRNDEERARLAELGLDPKQVLTTRDLVRGENVVVAATGITSGEFLRGVEYFGGGARTHSVVMRSRSGTVRYIEATHRWDKLMRISDMPYAR

SEQ ID NO: 18114 - protein, 388 aa, Synechocystis sp.; identical to SEQ ID NO: 462

SEQ ID NO: 18115 - protein, 356 aa, uncultured cyanobacterium
MEKTIGLEIIEVVEQAAIASARLMGKGEKNEADRVAVEAMRVRMNQVEMLGRIVIGEGERDEAPMLYIGEEVGIYRDADKRAGVPAGKLVEIDIAVDPCEGTNLCAYGQPGSMAVLAISEKGGLFAAPDFYMKKLAAPPAAKGKETSIKSATENLKILSECLDRAIDELVVVVMDRPRHKELIQEIRQAGARVRLISDGDVSAAISCGFAGTNTHALMGIGAAPEGVISAAAMRCLGGHFQGQLIYDPEVVKTGLIGESRESNIARLQEMGITDPDRVYDANELASGQEVLFAACGITPGLLMEGVRFFKGGARTQSLVISSQSRTARFVDTVHMFDDVKTVSLPLIPDPKWRPER

SEQ ID NO: 18116 - protein, 268 aa, Deinococcus radiodurans
MTKRTPDSADISFEHALVLETARVTEGAALAASRFMGLGDKNAVDGAGTEAMRSLLNSLDIRGTVVIGEGEMDEAPMLYIGEKVGNGQYEVDIAVDPVEGTNVTAKGLPNGLAVIALSERGGLMHAPDCYMEKLIVPPPAAGRVNLDWPVEANLSVIAQSLERDVEDLMITILDRERHADLIQRVRATGARVKLIGDGDVVAGLAVGVRGTGVHALMGSGGAPEGVLSAAACKCLGAEIRGRGHRRGRRHARALRRNGRERTPHLQYR

SEQ ID NO: 18117 - protein, 89 aa, Carboxydothermus hydrogenoformans
  unsure (1)..(89): unsure at all Xaa locations
DHXEGTNLVAKGLNGAXXVLDAAPKGCLLDAPDMYMEKIAVGPAAAGKIHLDAPVKDNLRIVAESLKKSVTDITVVILDRPRHEXXCPD

SEQ ID NO: 18118 - protein, 324 aa, Clostridium acetobutylicum
MFDNDISMSLVRVTEAAALQSSKYMGRGDKIGADQAAVDGMEKAFSFMPVRGQVVIGEGELDEAPMLYIGQKLGMGKDYMPEMDIAVDPLDGTILISKGLPNAIAVIAMGPKGSLLHAPDMYMKKIVVGPGAKGAIDINKSPEENILNVAKALNKDISELTVIVQERERHDYIVKAAIEVGARVKLFGEGDVAAALACGFEDTGIDILMGIGGAPEGVIAAAAIKCMGGEMQAQLIPHTQEEIDRCHKMGIDDVNKIFMIDDLVKSDNVFFAATAITECDLLKGIVFSKNERAKTHSILMRSKTGTIRFVEAIHDLNKSKLVVE

SEQ ID NO: 18119 - protein, 336 aa, Escherichia coli O157:H7 EDL933
MRRELAIEFSRVTESAALAGYKWLGRGDKNTADGAAVNAMRIMLNQVNIDGTIVIGEGEIDEAPMLYIGEKVGTGRGDAVDIAVDPIEGTRMTAMGQANSLAVLAVGDKGCFLNAPDMYMEKLIVGPGAKGTIDLNLPLADNLRNVAAALGKPLSELTVTILAKPRHDAVIAEMQQLGVRVFAIPDGDVAASILTCMPDSEVDVLYGIGGAPEGVVSAAVIRALDGDMNGRLLARHDVKGDNEENRRIGEQELARCKAMGIESGKVLRLGDMARSDNVIFSATGITKGDLLEGISRKGNIATTETLLIRGKSRTIRRIQSIHYLDRKDPEMQVHIL

SEQ ID NO: 18120 - protein, 321 aa, Escherichia coli O157:H7 EDL933
MMSLAWPLFRVTEQAALAAWPQTGCGDKNKIDGLAVTAMRQALNDVAFRGRVVIGEGEIDHAPMLWIGEEVGKGDGPEVDIAVDPIEGTRMVAMGQSNALAVMAFAPRDSLLHAPDMYMKKLVVNRLAAGAIDLSLPLADNLRDVARALGKPLDKLRMVTLDKPRLSAAIEEATQLGVKVFALPDGDVAASVLTCWQDNPYDVMYTIGGAPEGVISACAVKALGGNMQAELIDFCQAKGDYTENRQIAEQERKRCKAMGVDVNRVYSLDVLVRGNDILFSATGVTGGELVNGIQQTANGVRTQTLLIGGADQTCNIIDSLY

SEQ ID NO: 18121 - protein, 355 aa, Mycobacterium leprae
MTAEGDGSFKPGPPTERRGEAPDRNLAMELVRVTEAGAMAAGRWVGRGNKEGGDGAAVDTIRELVNTVSMRGVVVIGEGEKDHAPMLYNGEEVGNGDGPDCDFAVDPIDGTTLMSKGMPNAISVLAVADRGAMFDPSAVFYMNKITVGPDAAHVLDITAPIGENIRAVAKVKDLSVRDMTVCILDRPRHAQLIDDVRATGARIRLITDGDVAGAISACRPQSGTDMLAGIGGTPEGIIAAAAIRCMGGAIQAQLAPRDDVERRKALDAGYNLDRILTTEDLVSGENVFFCATGVTDGDLLKGVRYYAGGCTTQSIVMRSKSGTVRMIEAYHRLSKLNEYSAIDFTGDNNAAYPLP

SEQ ID NO: 18122 - protein, 328 aa, Mycobacterium leprae
MELVRVTEAGAMAAGRWVGRGNKEGGDGAAVDTIRELVNTVSMRGVVVIGEGEKDHAPMLYNGEEVGNGDGPDCDFAVDPIDGTTLMSKGMPNAISVLAVADRGAMFDPSAVFYMNKITVGPDAAHVLDITAPIGENIRAVAKVKDLSVRDMTVCILDRPRHAQLIDDVRATGARIRLITDGDVAGAISACRPQSGTDMLAGIGGTPEGIIAAAAIRCMGGAIQAQLAPRDDVERRKALDAGYNLDRILTTEDLVSGENVFFCATGVTDGDLLKGVRYYAGGCTTQSIVMRSKSGTVRMIEAYHRLSKLNEYSAIDFTGDNNAAYPLP

SEQ ID NO: 18123 - protein, 372 aa, Yersinia pestis KIM
MRVKRVQLTPLRLQVRKVIEFLPIFSFSIPQSTGLTMKRELAIEFSRVTEAAALAGYKWLGRGDKNAADGAAVQAMRIMLNQVNIDGRIVIGEGEIDEAPMLFIGEHVGTGQGDAVDIAVDPIEGTRMTAMGQANALAVLAVGDQGTFLHAPDMYMEKLVVGPAAKGAIDLNLPLEQNLCNIATALNKPLADLTVITLAKPRHDGIIAAMQQLGVKVFAIPDGDVAASILTCMPESEVDVMYCIGGAPEGVISAAVIRALDGDMQGRLLPRHQVKGDSEDNRRIGEQELLRCKSMGIEAGNVLQLGDMARNDNVIFSATGITKGDLLEGIYRKGNMATTETLLIRGKSRTIRRIRSTHFLDRKDPALHEFLL

SEQ ID NO: 18124 - protein, 367 aa, Magnetospirillum magnetotacticum
MTSGLVPGSQCRLPEAGRDERHRPEQVGPGDEDRAAMSVANTGIFSDPTARGLTLELVRVTEAAAIAAARLRGQGREKEADQAAVDAMRAELMVLPIEGSVVIGEGERDEAPMLYIGERVGTGNGPSVDIAVDPLEGTTLCAKDMPGAIAVMALAERGTLLAAPDVYMQKIAIGPGYPPGTVDLDWSPAKNIASLARAKGVEPSGITAIILDRPRHMDLIAAVRDTGAGIRLISDGDIAAIIHCTRPDETGVDIYMGTGAAPEGVIAASVLRCIGGQMQGRLILDSADRRARAAKMGITDPGRKYDMHDLARGDVIVAATGVTTGALLSGVRFRPGIIETETVVYRSNTGTIRRIACEHRQPGNAPG

SEQ ID NO: 18125 - protein, 318 aa, Magnetospirillum magnetotacticum
MSERSKTVGAYELRRATEAAARAAYAWIGRGDKALADDAAVAAMQTELDGLDLNGLMLIGEGPKDEIGMLYHGQRFGAATAEPAWDLVVDPLEGTSFLAKGMTNAMAVVAMAPHGTLFDPAPARYMEKLAAPPAAKGKIDPKAPVAERLAQLSAALNKPIEDITVYVIEKPRHKALVNAIHNAGARVALYPAGDVAGALMAAIPGSGIDALMGTGGTPEGLLSAMAIRAMGGEFLGRIDPQLATEAAAVEEAGMDLNHWYQLDEMVRSDKVVFCATGITTGLLLDGVERTRDQEKTQTLMIGGAAGPRQMLTSWHRRA

SEQ ID NO: 18126 - protein, 330 aa, Magnetospirillum magnetotacticum
MSIHTATLPVLDRNLALEVVRVTEASALAAARQTGRGDERAADEAACSAMRHALNGLSMDGVIVNGEGDDSTQPLHTGEKVGNGKGPKVDIVLTALEGRSICARGAHNALSVVAMTEEGSFLKVPQHSYMEKIVVGAGMPSSIIDLDSTPEENLSRIAKAKGVTLSELTVSVLDRPRHGELIERLYAAGVRVMLFDDGDVSGALAAGLPDSGVDVYMGSGGAAQGVLAAAGLKCLGAQMQCRLLCRSDQDHAAARRVGIADTRRKWNIEDMVRGEVMFAATGITDGHVLKGARLAPNNRAESHSLVMRSVTGTIRYLSVQHDLSRSHLPA

SEQ ID NO: 18127 - protein, 362 aa, Methanosarcina acetivorans C2A
MPHPKTVEEMFESAGPIEYRLLPRLIHVTEAAAIAAAYQMGRGDKHFADQVAVASMRRMLNKLDMKGIIKIGEGERDEAPMLYIGEEVGTENGDLEVDIAVDPLEGTNLTADGCPGSVAVMAMAERGGIFHGPDIYMDKIVVGPDVVRYEEEHPGERIDLDAPVSHNLEIVAKALGRKVEELVVVILDRPRHAQKITEIREAGARVRLVTDGDLMPGVATAVRGSGIHVVMGAGGSGEAVLTAAAIKILGGKILARLVLPTVANGKTKEKIDEEIEEKMPRLEAMGITLENINDILDIDKLVPGKDVIFSATAVTPGHFLREVNLFGGGDARVHTVSMGASGAVRFTDSIYIKDKRETPLYL

SEQ ID NO: 18128 - protein, 346 aa, Fusobacterium nucleatum subsp. nucleatum ATCC 25586
MKRELALEFARVTEAAALAAHKWVGRGKKESADQAGVDAMRTMLNRLAIDGEIVIGEGEIDEAPMLYIGEKVGQIYNEEEKDSVTYVDPVDIAVDPVEGTRMTAQGQPNAITVLAVGKKGSFLKAPDMYMEKLIVGPEAKGKIDLSKPLEDNIHAVAKALKKELKDLMIVILDKPRHKELIKDLQAMGVKVYALPDGDVAGSILTCMIDSDVDMLYGIGGAPEGVISAAVIRALGGDMQARLKLRSEVKGASLENDKISKFEKLRCEEQGLKVGEILKLEDLAKDDEIIFSATGITGGDLLEGVKRKGNIARTQTLVVRGLSKTVRYINSIHNLDFKDEKITHLVK

SEQ ID NO: 18129 - protein, 317 aa, Caulobacter crescentus CB15
MSSNTLDRALVLDAVRVTEAAAIASWTMLGRGDEMAADQAAVDAMRNALNELDIDGEIVIGEGERDEAPMLYIGEKVGTGKGPRIDIALDPLEGTTLAAKSQPNALTVMAWAPKGTLLNAPDTYMDKIACGPGLPAGVIDLDRSPAENIQAVADAKGVALSEITVCVLDRPRHAEIIASVRAVGARIHLITDGDVAGVINTTDPLTGIDLYLGSGGAPEGVLACAALKCVGGQFQGRLLFRNADERARAARWGVTDLDKKYDLHEIVRDEAIFAATGVTRGGLLDGVVYRDGCVHTHTLVMNSSTGTVREVRMKRKV

SEQ ID NO: 18130 - protein, 217 aa, Bacillus anthracis str. A2012
  unsure (1)..(217): unsure at all Xaa locations
MERSLSMELVRVTEAAALSSARWMGRGKKDEADGAATSAMRDVFDTIPMKGTVVIGEGEMDEAPMLYIGEKLGTGYGPRVDVAVDPLEGTNIVAAGGWNALAVIAIADHGNLLHAPDMYMDKIAVGPEAVGAVDIDAPIIDNLRAVAKAKNKDIEDVVATVLNRPRHQAIIEEIRKAGARIKLINDGDVAGAINTAFDRTGVDILFGXGGAXEGVLA

SEQ ID NO: 18131 - protein, 186 aa, Bacillus anthracis str. A2012
MERELALEIVRVTEAAALASAQWMGRGKKNEADDAATTAMRDMFDSVNMAGTVVIGEGELDEAPMLYIGEELGTGNGPEVDIAVDPLEGTNIVAKGLANAMAVIAIADKGNLLHAPDMYMEKIAVGPKAAGKISLDDPIEKTIEIVAEANNKKIRDLTVIVQERERHQDIIDRVRAKGARVKLFGD

SEQ ID NO: 18132 - protein, 362 aa, Methanosarcina mazei Goe1
MPHPKTVEKMFECAGPIEYKLLPRLIHVTEAAAIAAAYQMGRGDKHFADQVAVASMRRMLNKLDMQGIIKIGEGERDEAPMLYIGEEVGTGVGDLEVDIAVDPLEGTNLCADGCPGSVAVMAMAERGGIFHGPDIYMDKIVVGPDVVRYEKEHPDERIDLDAPVRQNLEIVAKALGRNVEELVVVILDRPRHAQKITEIREAGARVRLVTDGDLMPGVATAIRGSGIHMVMGAGGSGEAVLTAAAIKILGGKILARLVLPSVANGKSKEKIQEEIEEKMPRLEKMGITLEKLNDVLDTERLVPGKDVIFSSTAVTPGHFLRETRLFGGGDARVHTISMGASGAVRFTDSIYIKDKQETPLYL

SEQ ID NO: 18133 - protein, 387 aa, Corynebacterium efficiens YS-314
MGSVPHNRGVPTPGMRSPAFPTPVSRPGPGCSLRYRRYRQKIFNVFHRLQEAPTMNALHPEQPDRNLAMELVRVTEAAALAAGRWVGRGMKNEGDGAAVDAMRQLINSVSMKGVIVIGEGEKDEAPMLYNGEEVGTGFGPEVDIAVDPVDGTTLMAEGRPNAITVLAASERGSMYDPSAVFYMKKLAVGREAAGKVDIEAPVAHNINAVAKAKGISASDVTVVVLDRPRHTDLIADIRRAGAKVRLISDGDVAGAVAAAQDTNSVDIMMGTGGTPEGIITACAMKCMGGEIQGILAPMNDFERRKALDAGLELDRVLHTNDLVTSDNCYFVATGLTNGDMLRGVSYRANGATTRSLVMRSKSGTIRHIESVHQLSKLQEYSVVDYTV

SEQ ID NO: 18134 - protein, 335 aa, Corynebacterium glutamicum ATCC 13032
MNLKNPETPDRNLAMELVRVTEAAALASGRWVGRGMKNEGDGAAVDAMRQLINSVTMKGVVVIGEGEKDEAPMLYNGEEVGTGFGPEVDIAVDPVDGTTLMAEGRPNAISILAAAERGTMYDPSSVFYMKKIAVGPEAAGKIDIEAPVAHNINAVAKSKGINPSDVTVVVLDRPRHIELIADIRRAGAKVRLISDGDVAGAVAAAQDSNSVDIMMGTGGTPEGIITACAMKCMGGEIQGILAPMNDFERQKAHDAGLVLDQVLHTNDLVSSDNCYFVATGVTNGDMLRGVSYRANGATTRSLVMRAKSGTIRHIESVHQLSKLQEYSVVDYTTAT

SEQ ID NO: 18135 - protein, 321 aa, Corynebacterium glutamicum ATCC 13032
MELVRVTEAAALASGRWVGRGMKNEGDGAAVDAMRQLINSVTMKGVVVIGEGEKDEAPMLYNGEEVGTGFGPEVDIAVDPVDGTTLMAEGRPNAISILAAAERGTMYDPSSVFYMKKIAVGPEAAGKIDIEAPVAHNINAVAKSKGINPSDVTVVVLDRPRHIELIADIRRAGAKVRLISDGDVAGAVAAAQDSNSVDIMMGTGGTPEGIITACAMKCMGGEIQGILAPMNDFERQKAHDAGLVLDQVLHTNDLVSSDNCYFVATGVTNGDMLRGVSYRANGATTRSLVMRAKSGTIRHIESVHQLSKLQEYSVVDYTTAT

SEQ ID NO: 18136 - protein, 347 aa, Thermosynechococcus elongatus BP-1
MDNVIGLEIIEVVEQAAIASARWMGKGDKNMADQAAVDAMRNRMNQIHMRGRIVIGEGERDEAPMLYIGEEVGICTRPDAAQYCNPEELIEIDIAVDPCEGTNLCAYGQPGSMAVLAISEKGGLFAAPDFYMKKLAAPPAAKGKVDIRNSATENLKILSECLDRAIDELVVVVMKRDRHNDLIQEIRDAGARVQLISDGDVSAALACAFSGTNIHALMGIGAAPEGVISAAAMRALGGHFQGQLVYDPAVVMTKEWANRTREGNLEELKKAGITDPDKVYEAEELASGETVLFAACGITPGMLMKGVRFFKGGARTQSLVISTQSKTARFVDTIHMFDQQLKSLQLY

SEQ ID NO: 18137 - protein, 258 aa, Shigella flexneri 2a str. 301
MLWIGEEVGKGDGPEVDIAVDPIEGTRMVAMGQSNALAVMAFAPRDSLLHAPDMYMKKLVVNRLAAGAIDLSLPLADNLRNVARALGKPLDKLRMVTLDKPRLSAAIEEATQLGVKVFALPDGDVAASVLTCWQDNPYDVMYTIGGAPEGVISACAVKALGGDMQAELIDFCQAKGDYTENRQIAEQERKRCKAMGVDVNRVYSLDELVRGNDILFSATGVTGGELVNGIQQTANGVRTQTLLIGGADQTCNIIDSLH

SEQ ID NO: 18138 - protein, 321 aa, Shigella flexneri 2a str. 2457T
MMSLAWPLFRVTEQAALAAWPQTGCGDKNKIDGLAVTAMRQALNDVAFRGRVVIGEGEIDHAPMLWIGEEVGKGDGPEVDIAVDPIEGTRMVAMGQSNALAVMAFAPRDSLLHAPDMYMKKLVVNRLAAGAIDLSLPLADNLRNVARALGKPLDKLRMVTLDKPRLSAAIEEATQLGVKVFALPDGDVAASVLTCWQDNPYDVMYTIGGAPEGVISACAVKALGGDMQAELIDFCQAKGDYTENRQIAEQERKRCKAMGVDVNRVYSLDELVRGNDILFSATGVTGGELVNGIQQTANGVRTQTLLIGGADQTCNIIDSLH

SEQ ID NO: 18139 - protein, 366 aa, Thermobifida fusca
MLEAERIQRALRTVRAEELIRKGLAMTTANAPVPIPHDAPDRNLALELVRVTEAAALAAARWVGRGDKNGADDAAVRGMRHLISTVSMKGTVVIGEGEKDNAPMLYNGEQVGDGNGAECDVAVDPIDGTRLTAMGMPNAISVIAVSPRGSMFDPSAVFYMEKLVTGPDAANVVDINAPVADNIRAVAKAKGGDPRDITVVILDRPRHERLVHEVRETGARIKFISDGDVAGAIMAARAGTGVDLLLGIGGTPEGIIAACAIKCLGGVIQGKLWPRDDEERRKAEAAGHDLSRVLTTDDLVSSEDVFFAATGITGGELLSGVKYVDGGAFTDSLVMRGRSGTIRRISSEHRLRKLSSYRGVDVSGAR

SEQ ID NO: 18140 - protein, 345 aa, Trichodesmium erythraeum IMS101
MDNVIGLEIIEVVEQAAIASARWMGKGEKNTADEVAVEAMRERMNKIHMRGRIVIGEGERDEAPMLYIGEEVGICTQPDAKKMCEVEQLIEIDIAVDPCEGTNLVAYGQNGSMAVLAISEKGGLLAAPDVYMKKLAAPAVAKNHVDINKSATENLKIISECMDRAVEELVVVVMDRPRHKQLISEIRQAGARVRLISDGDVSAAISCAFAGTNIHALMGIGAAPEGVISAAAMRALGGHFQGQLIYDPAIVKTGLIGESKEDNMKRLKDMGIEDPDKVYNAEELASGETVLFAACGITPGTLMEGVRFFPNGARTQSLVISSQSKTARFVDTVHMFGETKTLQLK

SEQ ID NO: 18141 - protein, 328 aa, Brucella suis 1330
MAKTAEQHPHGLDRILTLELVRVAERAAVAAARLRGRGDEMAADQAAVDAMRQELNRLPITGTVVIGEGERDEAPMLYIGEEVGTKQGPAVDIALDPLEGTTICAKNLPNSLAVIAIAEKGNLLYAPDVYMEKIAVGPGYPKGVVDLDATPTDNIMSIAKAKGVKPNEITACIMDRPRHARLIEEVRATGAAIRLIGDGDVAGVMHTTDPDETGIDIYIGIGGAPEGVLAAAALRCIGGQMQGRLQLNTEEKVARAAKMGISDPKKIYTLEEMAKGDVLFAATGVTDGNMLSGVKFARDYIQTHTIVMRSSSQTVREIKARHQDLSKF

SEQ ID NO: 18142 - protein, 327 aa, Desulfovibrio desulfuricans G20
MEAPQKNLALDLVRVTEAAALASARWLGKGNQDAGDQAAVDAMRLCFNSLNISGVVVIGEGEKDNAPMLFNGEKVGAGNGPALDVAVDPVEGTKLLAYGRPNAISVIGVAPAGTMYNPGPSFYMQKLVVPGAAKNVVDLDAPVAENLHKIAKALDKDVDDLVVFVLDKPRHASLIEQVRAAGARIQLHTDGDVSGALMAVDPRSEVDVMMGTGGTPEGVLAACAIKGIGGEMFARLDPQSYVEKEAILEAGIDLREIHTVDTLVRSDEVFFSATGISGGTFLKGVQYTGTGAVTHSMVIRGRTGTLRYIESINNWDKLMKISSVKYD

SEQ ID NO: 18143 - protein, 346 aa, Fusobacterium nucleatum subsp. vincentii ATCC 49256
MKRELALEFARVTEAAALAAYKWVGRGKKESADQAGVDAMRTMLNRLAIDGEIVIGEGEIDEAPMLYIGEKVGQIYNEEEKDSVTYVDPVDIAVDPVEGTRMTAQGQPNAITVLAVGKKGSFLKAPDMYMEKLIVGPEAKGKIDLSKPLEDNIHAVAKALNKELKDLMIVVLDKPRHKELIKDLQAMGIKVYALPDGDVAGSILTCMIDSDVDMLYGVGGAPEGVISAAVIRALGGDMQARLKLRSEVKGATLENDKISKFEKLRCEEQGLKVGEILKLDDLAKDDEIIFSATGITGGDLLEGVKRKGNIARTQTLVVRGLSKTIRYINSIHNLDFKDEKITHLVK

SEQ ID NO: 18144 - protein, 323 aa, Clostridium tetani E88
MIKQDIAMGLVRVTEAAALCSSKYMGRGDKIAADQAAVDGMEKAFSMLPIKGTVVIGEGEMDEAPMLYIGQKLGIGTDGMEEMDIAVDPLDGTVLIAKGLPNAVSVMAMGPKGSLLNAPDMYMKKIAVGASAKGVIDINKTNKENIINVAMALNKDVTELTIMVQERERHNDIIKDAREVGARVKLFSEGDVAAVLACGFESTGVDMMMGTGGAPEGVIAAAAIKCMGGDMQAKLVPQNEEEIRRCKSMGIENVEATLYINDLVKSDDIYFAATAVTDSDLLKGVVYSKNNWATTQSIVMRSKTGTIRFVDAQHHLSRSNLVL

SEQ ID NO: 18145 - protein, 335 aa, Vibrio vulnificus CMCP6
MKRDLAMAFSRVTEGAALAGYKWLGRGDKNAADGAAVEVMRTLLNKTDISGEIVIGEGEIDDAPMLYIGENVGLGGDEVDIAVDPIEGTRMTAMGQSNALAVLAAGEKGSFLKAPDMYMEKLVVGPGAKGVIDLNKPLKENLVNIAQALGKTLDTLVVITLAKPRHDEVIAEMQRMGVRVFAVPDGDVAASILTCMPDSEVDVMYCIGGAPEGVVSAAVIRALDGDMHGRLLPRNEVKGDNEENRKFADFELERCAEMGVEANKVLKLEDMARSDNVIFSATGITKGDLLEGISRQGNIATTETLLIRGRCRTIRRIKSIHYLERKDDEVKAIIL

SEQ ID NO: 18146 - protein, 353 aa, Methanosarcina barkeri
MIDCSGPIECDLLPRLIHVTEAAAIAAAYQMGRGNKSFADQVAVAAMRRMLNKLDMKGIIQIGEGERDEAPMLYIGEHVGTGKGDLEVDIAVDPLEGTNLTADGGPGSVAVMAMAERGGIFHGPDIYMDKIVVGPDVVRYEEEHPDERIDLDAPVKRNLEIVAKALDRSVDELVVVVLDRPRHAQKITEIREAGARVKLISDGDLMPGVSTAIRGSGVHMVMGSGGSGEAVLTAAAIKILGGKVLARLLLPTVANGKSQDKVDKEIEEKMPRLEKMGITLQNINDVLDTDRLVPGNDVIFSASAVTPGHFLREVNLFGSGDARVHTISMGASGSVRFTDSIYIKDKRETPLYL

SEQ ID NO: 18147 - protein, 325 aa, Oceanobacillus iheyensis HTE831
MFEMERSLSMELVRVTEAAALQSARWMGRGVKDEADDAATTAMRTVFDTIPMEGTVVIGEGEMDEAPMLYIGEKLGTGDGPGVDVAVDPLEGTEIVAQGTWNALAVIAIADRGTLLHAPDMYMEKIAVGPDAIGKIDINAPVVDNLKAVAKAKNKSIEDVVATVLDRPRHQKLIDKIRASGARIKLIPNGDVAAAINTAFDDTGVDILLGSGGAPEGVLAAAALKCLGGELQGKLVPSNDDEIKRCHDMGITDLNKVFYMNDFCSGDDAIFAATGVTDGELLKGVQFKGKKATTSTLVMRARSGTVRFIDGTHSLQKKPDLVIKP

SEQ ID NO: 18148 - protein, 335 aa, Vibrio parahaemolyticus RIMD 2210633
MKRDLAMAFSRVTEGAALAGYKWLGRGDKNAADGAAVEVMRTLLNKTDISGEIVIGEGEIDDAPMLYIGEKVGLGGDEVDIAVDPIEGTRMTAMGQSNALAVLAAGEKGSFLKAPDMYMEKLVVGPGAKGVIDLEKPLKENLENVASALNKTLDTLVVITLAKPRHDDVIAEMQAMGVRVFAVPDGDVAASILTCMPDSEVDLMYCIGGAPEGVVSAAVIRALDGDMHGRLLPRHEVKGDTEENRIYGAAELQRCEEMGVKANVVLKMEDMARSDNVVFSATGITKGDLLEGISRQGNIATTETLLVRGRCRTIRRIKSTHYLERKDPEVRDIIL

SEQ ID NO: 18149 - protein, 321 aa, Bacillus subtilis subsp. subtilis str. 168
MERSLSMELVRVTEAAALASARWMGRGKKDEADEAATSAMRDVFDTVPMKGTVVIGEGEMDEAPMLYIGEKLGNGYGPRVDVAVDPLEGTNILASGGWNALTVIAVADHGTLLNAPDMYMQKIAVGPEAVGCIDIEAPVIDNLKAVAKAKNKDVEDVVATILNRERHAKIISELREAGARIKLINDGDVAGAINTAFDHTGVDILFGSGGAPEGVLSAVALKALGGEIIGKLLPQSEEEITRCHKMGLDLSKVLRMEDLVKGDDAIFAATGVTDGELLKGVQFKGSVGTTESLVIRAKSGTVRFVDGRHSLKKKPNLVIRP

SEQ ID NO: 18150 - protein, 333 aa, Bradyrhizobium japonicum USDA 110
MSTHISVPPHALLERILTLEIVRVTERAAVSSARLRGHGNEKAADQAAVDAMRRELNKLPIEGTIVIGEGERDEAPMLFIGEKVGMNAGPQVDIAVDPLEGTTLCAKNMPGSIATMAMADGGTLLHAPDVYMQKLAIGPGYDKGVVDLDASPADNVRRLAKAKGVQPDGITVLVLDRPRHASIIESVRSTGAAVRLITDGDVAGVIHCADPDNTGVDMYLGTGGAPEGVLAAVALRCIGGQMQCRLILDSDEKRERAAKMGVNDPKMIYGIEDMARGDCLFAATGVTTGSLLSGVKFRKDGVIETETVVMRSVTGTVRYIKAEHRELAKFHLD

SEQ ID NO: 18151 - protein, 328 aa, Brucella melitensis 16M
MAKTAEQHPHGLDRILTLELVRVAERAAVAAARLRGRGDEMAADQAAVDAMRQELNRLPITGTVVIGEGERDEAPMLYIGEEVGTKQGAAVDIALDPLEGTTICAKNLPNSLAVIAIAEKGNLLYAPDVYMEKIAVGPGYPKGVVDLDATPTDNIMSIAKAKGVKPNEITACIMDRPRHARLIEEVRATGAAIRLIGDGDVAGVMHTTDPDETGIDIYIGIGGAPEGVLAAAALRCIGGQMQGRLQLNTEEKVARAAKMGISDPKKIYTLEEMAKGDVLFAATGVTDGNMLSGVKFARDYIQTHTIVMRSSSQTVREIKARHQDLSKF

SEQ ID NO: 18152 - protein, 321 aa, Bacillus cereus ATCC 14579
MERSLSMELVRVTEAAALSSARWMGRGKKDEADGAATSAMRDVFDTIPMKGTVVIGEGEMDEAPMLYIGEKLGTGYGPRVDVAVDPLEGTNIVAAGGWNALAVIAIADHGNLLHAPDMYMNKIAVGPEAVGAVDIDAPIIDNLRAVAKAKNKDIEDVVATVLNRPRHQEIIEEIRKAGARIKLINDGDVAGAINTAFDRTGVDILFGSGGAPEGVLAAVALKCLGGEIHGKLLPQNEAELARCKKMGIEDINRILRMEDLVKGDDAIFAATGVTDGELLRGVQFKGSVGTTQSLVMRAKSGTVRFVDGRHSLNKKPNLVIK

SEQ ID NO: 18153 - protein, 323 aa, Bacillus cereus ATCC 14579
MERELALEIVRVTEAAALASAQWMGRGKKNEADDAATTAMRDMFDSVNMAGTVVIGEGELDEAPMLYIGEELGTGNGPEVDIAVDPLEGTNIVAKGLANAMAVIAIADKGNLLHAPDMYMEKIAVGPKAAGKISLDDPIEKTIEIVAEANNKKIRDLTVIVQERERHQDIIDRVRAKGARVKLFGDGDVGASIATALPGTGIDLFVGIGGAPEGVISAAALKCLEGEMQARLVPMNEEEEARCREMGLEDPRQLLMLDDLVSGDDAIFSATGVSAGELLDGVKFLGGDLAETYSIVMRYKTRTVRFIKTHHHLDHKPHLNLDI

SEQ ID NO: 18154 - protein, 344 aa, Streptomyces avermitilis MA-4680
MTENHQLPSELEVPSEAPDRNLALELVRVTEAAAMAAGRWVGRGDKNGADGAAVRAMRTLVSTVSMNGVVVIGEGEKDEAPMLFNGERVGDGTGPECDIAVDPIDGTTLTAKGMTNAIAVLAAADRGTMFDPSAVFYMDKLVTGPEAADFVDINAPVSVNIRRVAKAKRSMPEDVTVVILDRPRHDGIIKEIRETGARIKLISDGDVAGSILALREGTGIDLLLGIGGTPEGIISACAVKCLGGTIQGKLWPKDDEERQRAVDAGHDLDRVLFTDDLVSGENVFFVATGITDGELLRGVRYRAETATTESIVMRSKSGTVRQIRSEHRLSKLRAYSQIDFDRAK

SEQ ID NO: 18155 - protein, 336 aa, Klebsiella aerogenes
MKRELAIEFSRVTEAAALAGYKWLGRGDKNTADGAAVNAMRIMLNLVNIDGTIVIGEGEIDEAPMLYIGEKVGTGKGDAVDIAVDPIEGTRMTAMGQANALAVMAVGDKGCFLNAPDMYMEKLIVGPGAKGAIDLNLPLEENLHNIARALNKPLGELTVTVLAKPRHDAVIAQLQQLGVRVFAIPDGDVAASILTCMPDSEVDVLYGIGGAPEGVVSAAVIRALDGDMQGRLLARHHVKGDNEENRRIGENELARCKTMGIEAGKVLRLDEMARSDNVVFSATGITKGDLLDGITRKGNMATTETLLIRGKSRTIRRIQSIHYLDRKDPDIQQHIL

SEQ ID NO: 18156 - protein, 327 aa, Mesorhizobium loti
MNVAQNIVAGLDRILTMELVRVTERAAVAAARLRGRGDEKAADQVAVDAMRQELNRLAIKGTVVIGEGERDEAPMLYIGEEVGTGKGPAVDIALDPLEGTTICAKNLPNALAVIAIAEKGSLLFAPDVYMDKIAIGPGYAEGVIDIDASPAENIASLARAKGVAVSDITTCILDRPRHAKLIDAVRATGAAIRLIGDGDVAGVIHTTDPEETGIDLYLGTGGAPEGVLAAAALRCTGGQMQGRLILDTPEKVARAAKMGISDPKRIYHAEDMARGDVLFAATGVTDGNMLAGVKFGRTYITTHTIVLRSSSRTVREIKARHQDLDKF

SEQ ID NO: 18157 - protein, 198 aa, Novosphingobium aromaticivorans
MTDKPTNPAASHVLDRVLVLEMVRVTEAAAIGASRLIGRGDEKAADAAAVEAMRAAFNELWMDGTVVIGEGERDEAPMLYIGEKVGAAPGTGPKIDIALDPLEGTTITAKAGPNALAVLAVAEEGGLLNAPDVYMDKLAVGPGYPEGIIDLDKTPSENVRAVAAARACSRATSSSACSIAPAIRISSRNCAASAAASR

SEQ ID NO: 18158 - protein, 163 aa, Novosphingobium aromaticivorans
MQPGDIIVCVLDRPRHSDLIAELRSLGCGISLIPDGDVAGVIAVTNEETGVDMYMGTGGAPEGVLAAAALRCVGGQFKGRLLFRNEDEKSRARKWGIEDLNKQYDLIELAKGDCIFAATGVTDGSLLAGVKVHKNGTMTTESVVMRASSGTVRWVKGEHRKVR

SEQ ID NO: 18159 - protein, 330 aa, Desulfitobacterium hafniense
MNNEMAMERELTMEFARVTEAAALASARWVGRGNKEAADDAAVQAMRSVFDTIRMQGTVVIGEGEMDEAPMLYIGEKVGSGEAPELDVAVDPLEGTNSVAKGLAGAIAVVAIARKGGLLHAPDMYMDKIAVGPLAKGKIHLDAPVQENLANVARALGKSMDDLTVVILDRPRHEKIIHDVREAGARIRLITDGDVSPAVACAIEGTGVDVMMGIGGAPEGVWLQLRMRSLGGEMQGRLWPENEEDVLRAQKLGVSDVAKLYTMDDLVCSDDVFFAATGITEGPLLKGVHFTSQGALTHTVVMRGKTGTVRFIEARHRFDKKPAYAMKGAV

SEQ ID NO: 18160 - protein, 333 aa, Prochlorococcus marinus subsp. pastoris str. CCMP1378
MNQTLIQEILEVVEQAAIASAKLTGLGQKDEADAAAVEAMRLRMGKIEMKGKIVIGEGERDEAPMLYIGEEVGSGNGPGVDFAVDPCEGTNLCANNQRGSMAVLAASDTGGLFNAPDFYMNKLAAPPAAKGKVDIRNSATENLKILSNCLDLAIDELTVVVMDRARHKGLIKEIRECGAKIQPISDGDVQAAIACGFAGTGTHCLMGIGAAPEGVISAAAMRALGGHFQGQLVYDPAIAQTSEWADYTKEGNIKRLNEMGITDIDKIYEANELASGENVIFAGSGITDGLLFDGVKFEKDCTRTSSLVISTLDSTCRFTNTIHMKDGAKSISL

SEQ ID NO: 18161 - protein, 336 aa, Shigella flexneri
MRRELAIEFSRVTESAALAGYKWLGRGDKNTADGAAVNAMRIMLNQVNIDGTIVIGEGEIDEAPMLYIGEKVGTGRGDAVDIAVDPIEGTRMTAMGQANALAVLAVGDKGCFLNAPDMYMEKLIVGPGAKGTIDLNLPLADNLRNVAAALGKPLSELTVTILAKPRHDAVIAEMQQLGVRVFAIPDGDVAASILTCMPDSEVDVLYGIGGAPEGGVSAAVIRALDGDMNGRLLARHDVKGDNEENRRIGEQELARCKAMGIEAGKVLRLGDMARSDNVIFSATGITKGDLLEGISRKGNIATTETLLIRGKSRTIRRIQSIHYLDRKDPEMQVHIL

SEQ ID NO: 18162 - protein, 345 aa, Nostoc punctiforme
MENTLGLEIIEVVEQAAIASAKWMGKGEKNIADQVAVEAMRERMNKIYMRGRIVIGEGERDDAPMLYIGEEVGICTQPNAEALCNPDELIEIDIAVDPCEGTNLVAYGQPGSMAVLAISEKGGLFAAPDFYMKKLAAPPAAKGKVDINKSATENLKILSECLERSIEELVIVVMKRERHNDLIKEIREAGARVALISDGDVGAAISCGFAGTNIHALMGIGAAPEGVISAAAMRALGGHFQGQLIYDPAIVKTGLIGESREANIDRLKSMNINDPDKVYDAHELASGETVLFAASGITSGNLMNGVRFFNGGARTQSLVISNQSKTARFVDTIHMFGEPKTLQLN

SEQ ID NO: 18163 - protein, 335 aa, Vibrio cholerae
MKRDLAMAFSRVTEGAALAGYKWLGRGDKNAADGAAVEVMRILLNQTEISGEIVIGEGEIDEAPMLYIGEQVGLGGDAVDIAVDPIEGTRMTAMGQSNALAVLAAGEKGSFLKAPDMYMEKLVVGPGAKGCIDLNLPLKDNLNHVAKALGKPLTDLVVITLAKPRHDQVIAQMQQMGVRVFAVPDGDVAASILTCMPDSEVDMMYCIGGAPEGVVSAAVIRALDGDMQGRLLPRHQVKGDSEDNRIWGAKELERCQQMGVEAGKVLKMEDMARSDNVIFAATGITKGDLLDGISRKGNIATTETLLIRGRCRTIRRIRSIHYLERKDQQVRDIIL

SEQ ID NO: 18164 - protein, 333 aa, Haemophilus influenzae Rd
MNRALAIEFSRVTEAAALAAYTWLGRGDKNAADDAAVKAMRYMLNLIHMDAEIVIGEGEIDEAPMLYVGEKVGSGLGELVSIAVDPIDGTHMTAMGQSNAISVLAAGGKNTFLKAPDMYMEKLVVGSNVKGIIDLNLPLEQNLRRIASKLGKSLSDLTVMVLAKPRHDAVIKQIHNLGAKVLAIPDGDVAGSVLCCLPDAEVDLLYGIGGAPEGVAAAAAIRALGGDMQARLIPRNEVKSDTEENKKIAANEIQRCAALGVKVNEVLKLEDLVRDDNLVFTATGITNGDLLKGISRKGNLASTETILIRGKSRTIRKIQSIHYLDDLYKILNI

SEQ ID NO: 18165 - protein, 334 aa, Prochlorococcus marinus str. MIT 9313
MDRTLIQEILEVVEQAAIASAHLTGLGKKDEADAAAVEAMRKRMGQIQMQGRIVIGEGERDEAPMLYIGEEVGSGSGPGVDFAVDPCEGTNLCANNQRGSMAVLAASDRGGLFNAPDFYMKKLAAPPSAKGKVDIRKSATENINILSQCLGLAVSELTIVVMDRARHKGLISEIRATGARVQPISDGDVQAAIACGFAGTGTHCLMGIGAAPEGVISAAAMRALGGHFQGQLVYDPAIAQTSEWADYTKEGNIARLNEMGITDVDKIYEAEELASGKNVVFAGSGITDGLLFHGVKFEPDCTRTSSLVISTLDNTARFTNTVHIKDGAKSIALS

SEQ ID NO: 18166 - protein, 337 aa, Pasteurella multocida
MNRALAIEFSRVTEAAALAGFAWLGRGDKEAADNAAVQAMRLMLNQVEMDAEVVIGEGEIDEAPMLYIGEKVGNGKGEQISIAVDPIEGTRMTAMGQANALSVLAAGGKETFLKAPDMYMEKLVVGPEVKGMVDLNLPLEQNLRRVASKMGKLLSQLTVITLDKPRHHEMIKRMQQLGVKVLAIPDGDVAASILCCLPDGGVDMLYGIGGAPEGVIAAAAVRALGGDMQARLLPRDHVKGDTPENQALAAEEIRRCQEMGIEVNQVLKLEDLVRDDNLVFSATGITNGDLLKGIHRKGNLATTETLLIRGRSRTIRRIQSVHYLDRKDTALYRIIGA

SEQ ID NO: 18167 - protein, 308 aa, uncultured bacterium
MRRELAIEFSRVTEAAALAGYKWLGRGDKNTADGAAVNAMRIMLNQVNIDGTIVIGEGEIDEAPMLFIGEKVGTGLGDAVDIAVDPIEGTRMTAMGQANALAVLAVGDKGCFLNAPDMYMEKLIVGPGAKGAIDLNLPLETNLRNIAAALNKPLSELTVTILAKPRHDDVIAEMAKLGVRVFAIPDGDVAASILTCMPGSEVDVLYGIGGAPEGVVSAAVIRALDGDMQGRLLARHDVKGDSEENRRIGEQELARCQVMGIEAGKALRLDEMARSDNVIFSATGITKGDLLDGISRKGNIATTETLLI

SEQ ID NO: 18168 - protein, 328 aa, Mycobacterium tuberculosis H37Rv
MELVRVTEAGAMAAGRWVGRGDKEGGDGAAVDAMRELVNSVSMRGVVVIGEGEKDHAPMLYNGEEVGNGDGPECDFAVDPIDGTTLMSKGMTNAISVLAVADRGTMFDPSAVFYMNKIAVGPDAAHVLDITAPISENIRAVAKVKDLSVRDMTVCILDRPRHAQLIHDVRATGARIRLITDGDVAGAISACRPHSGTDLLAGIGGTPEGIIAAAAIRCMGGAIQAQLAPRDDAERRKALEAGYDLNQVLTTEDLVSGENVFFCATGVTDGDLLKGVRYYPGGCTTHSIVMRSKSGTVRMIEAYHRLSKLNEYSAIDFTGDSSAVYPLP

SEQ ID NO: 18169 - protein, 336 aa, Escherichia coli K12
MRRELAIEFSRVTESAALAGYKWLGRGDKNTADGAAVNAMRIMLNQVNIDGTIVIGEGEIDEAPMLYIGEKVGTGRGDAVDIAVDPIEGTRMTAMGQANALAVLAVGDKGCFLNAPDMYMEKLIVGPGAKGTIDLNLPLADNLRNVAAALGKPLSELTVTILAKPRHDAVIAEMQQLGVRVFAIPDGDVAASILTCMPDSEVDVLYGIGGAPEGVVSAAVIRALDGDMNGRLLARHDVKGDNEENRRIGEQELARCKAMGIEAGKVLRLGDMARSDNVIFSATGITKGDLLEGISRKGNIATTETLLIRGKSRTIRRIQSIHYLDRKDPEMQVHIL

SEQ ID NO: 18170 - protein, 321 aa, Escherichia coli K12
MMSLAWPLFRVTEQAALAAWPQTGCGDKNKIDGLAVTAMRQALNDVAFRGRVVIGEGEIDHAPMLWIGEEVGKGDGPEVDIAVDPIEGTRMVAMGQSNALAVMAFAPRDSLLHAPDMYMKKLVVNRLAAGAIDLSLPLTDNLRNVAKALGKPLDKLRMVTLDKPRLSAAIEEATQLGVKVFALPDGDVAASVLTCWQDNPYDVMYTIGGAPEGVISACAVKALGGDMQAELIDFCQAKGDYTENRQIAEQERKRCKAMGVDVNRVYSLDELVRGNDILFSATGVTGGELVNGIQQTANGVRTQTLLIGGADQTCNIIDSLH

SEQ ID NO: 18171 - protein, 334 aa, SYNECHOCOCCUS SP. WH 8102
MDQTLIQEILEVVEQAAIASAKLSGKGLKNEADAAAVEAMRKRMGQIQMQGRIVIGEGERDEAPMLYIGEEVGSGTGPGVDFAVDPCEGTNLCAFNQRGSMAVLAASDRGGLFNAPDFYMKKLAAPPAAKGKVDIRKSATENIKILSECLGLAVDELTIVVMDRARHKDLIAEIRATGARIQPISDGDVQAAIACGFAGTGTHCLMGIGAAPEGVISAAAMRALGGHFQGQLVYDPAVAQTSEWADMTKEGNLARLAEMGITDPDKVYEAEELACGEHVCFAGSGITDGLLFHGVKFERDCTRTSSLVISNLDNTCRFTNTVHIKDGAQSIALS

SEQ ID NO: 18172 - protein, 321 aa, Bacillus halodurans
MERSLSMELVRVTEAAALASARWMGRGNKEEADRAATEAMRDVFDTIPMKGTVVIGEGEMDEAPMLYIGEKLGNGYGPRVDVAVDPLEGTNIVASGLWNALAVIAVADHGNLLHAPDMYMEKIAVGPEAVGTVDIDAPVIDNLRAVAKAKNKDVEDLVVVTLNRKRHDKLIDEIRQAGARIKLIPDGDVAAAINTAFDDTGVDLLLGSGGAPEGVLAAVGLKCLGGELQGKLLPQTDEELARCKAMGIEDVNKVFSLDELVKGDDCIFAATGVTDGELLKGVHYKGSTATTQSLVMRAKSGTVRFVDGKHSMKKKPDLVIK

SEQ ID NO: 18173 - protein, 323 aa, Bacillus halodurans
MDRELALEIVRVTEAAALSSAQWLGRGMKNEADDAATTAMRTMFDSVNCKGTVVIGEGELDEAPMLYIGEEVGSGHGPEVDIAVDPLEGTNIVAKGHPNAMAVIAVADKGTLLHAPDMYMEKIAVGPKAAGLIRLDDPIEKTIDIVAKMTNKRVRDVTVIIQERERHDELIERIRNKGARVKLFGDGDVGAAIATALPQTGIDLFIGTGGAPEGVISAAAIKALGGDMQARLVPMNDEEFERCKRMGLEDPRQVLSLDDLVRGDDAIFAATGVSSGELLEGVRFLGGDLVETDSIVMRAKTRTVRYIKAHHRLDHKPHLIIND

SEQ ID NO: 18174 - protein, 366 aa, Salmonella enterica subsp. enterica serovar Typhi
MCGGNSAHTSIIPSLPCATLRATPFCYEFVMRRELAIEFSRVTEAAALAGYKWLGRGDKNTADGAAVNAMRIMLNQVNIDGTIVIGEGEIDEAPMLYIGEKVGTGHGDAVDIAVDPIEGTRMTAMGQANALAVLAVGDKGCFLNAPDMYMEKLIVGPGAKGAIDLNLPLADNLRNIADALGKPLGDLTVTILAKPRHDEVIAEMAKLGVRVFAIPDGDVAASILTCMPDSEVDVLYGIGGAPEGVVSAAVIRALDGDMQGRLLARHDVKGDSEENRRIGEQELARCKAMGIEAGKALCLGDMARSDNVIFSATGITKGDLLEGISRKGHIATTETLLIRGKSRTIRRIQSIHYLDRKDPDVQAHIL

SEQ ID NO: 18175 - protein, 336 aa, Salmonella typhimurium LT2
MRRELAIEFSRVTEAAALAGYKWLGRGDKNTADGAAVNAMRIMLNQVNIDGTIVIGEGEIDEAPMLYIGEKVGTGHGDAVDIAVDPIEGTRMTAMGQANALAVLAVGDKGCFLNAPDMYMEKLIVGPGAKGAIDLNLPLADNLRNIADALGKPLGDLTVTILAKPRHDEVIAEMAKLGVRVFAIPDGDVAASILTCMPDSEVDVLYGIGGAPEGVVSAAVIRALDGDMQGRLLARHDVKGNSEENRRIGEQELARCKAMGIEAGKALCLGDMARSDNVIFSATGITKGDLLEGISRKGHIATTETLLIRGKSRTIRRIQSIHYLDRKDPDVQAHIL

SEQ ID NO: 18176 - protein, 63 aa, Mus musculus
LRLLYECNPIAYVMEKAGGLATTGDKDILDIVPTEIHQKAPVVMGSSEDVQEFLEIYRKHKAK

SEQ ID NO: 18177 - protein, 56 aa, Mus musculus
LRLLYECNPIAYVMEKAGGLATTGDKDILDIVPTEIHQKAPVVMGSSEDVQEFLEI

SEQ ID NO: 18178 - protein, 120 aa, Glycine max
MMSVLLTLVMTPHSIIFVLTLGNGVFVFTLDPMYGEFVLTQENLQIPRAGKIYAFNEGNYQLWDDKLKKYIDDLKDPGPSGKPYSARLLYECAPMSFIVEQAGGKGSDGHQRILDIQPTE

SEQ ID NO: 18179 - protein, 225 aa, Glycine max
  unsure (1)..(225): unsure at all Xaa locations
XGFIVAFDPLDGFSIVDTNFTVGTIFGVXPGNKLAVVTGRDHVAAAMGVMGPRTTNVLALKDFPGTHEFLLIDEDHIRSIKSRKQVVTHYPLCLFKMELVNDFPDHSKLINYYAREKYTLRYTGXMVPDVNQILFKRKGIFTNVSSPSAKAKLRLLFEVAPLGFLIEKAGGYSSDGHQSVLDKVISNIDDRTQVAYGSKNEIIRFEETLYGKSRLKGGVAVGAAA

SEQ ID NO: 18180 - protein, 89 aa, Glycine max
  unsure (1)..(89): unsure at all Xaa locations
XGSPGYCMYGSSCTFVLSTENGVNGFTLDPSLGEFILTHPNIKIPSKGKIYFVNEGNARNWDEPTXXXVWGILFSQCFEIYLSVKXLIX

SEQ ID NO: 18181 - protein, 120 aa, Glycine max
  unsure (1)..(120): unsure at all Xaa locations
XKLVNYYVKEKYTLRYTGGMVPDVNQIIVKEKGIFTNVTSPTAKAKLRLLFEVAPLGFLIEKAGGHXSSDGKQSVLDKVISQLDERTQVAYGSKNEIIRFEETLYGSSRLAASATVGATX

SEQ ID NO: 18182 - protein, 141 aa, Triticum aestivum
  unsure (1)..(141): unsure at all Xaa locations
XIGEGKMFSPGNLRATFDNPDYDKLVNYYVKEKYTLRYTGGMVPDVNQIIVKEKGIFTNVTSPTAKAKLRLLFEVAPLGFLIEKAGGHSSDGKQSVLDKVISQLDERTQVAYGSKNEIIRFEETLYGSSRLAASATVGATA

SEQ ID NO: 18183 - protein, 57 aa, Triticum aestivum
  unsure (1)..(57): unsure at all Xaa locations
XYEWGPMSFFAKQAGGKGSDGPQRGLDIMPPKVHQRVPLYFGSVEEVEKVEKFLFSE

SEQ ID NO: 18184 - protein, 133 aa, Zea mays
  unsure (1)..(133): unsure at all Xaa locations
XPRVGRLVGGSVGSTWKWRLLVATVVGEGHVCANGSTHSSLRFXIATRDAAMHXRSLPIGRVFWHPADDTTPSRKLSILYKLFPISFVMNQAGGQSFTGKQRPLDVVPAKIDDRSPIFLGSYNDVEEIIALYX

SEQ ID NO: 18185 - protein, 102 aa, Zea mays
  unsure (1)..(102): unsure at all Xaa locations
XGPGASGKPYSGGYMGSLVGDFPRPFFLGGVSGSPRAKKSKKGKLGFFXGGAPMSFFVEQAGGKGFSGPQRIFAFPPPGIPQRGPLSFGGVGEVAKGEKFRA

SEQ ID NO: 18186 - protein, 332 aa, Trypanosoma brucei
MMRQNLTSDSLITDTLRKAGVPCDVVGIVETVAGACRAIAAGLRNDGVTAAKSKNNFGDDVLSVDVMADKIISEALNSCQHVASYVSEESPSLASTAHSGKATHSVSYDPLDGSSIITSNFTVGSIFAVWPGNTPIGLTVRDMVASVVAVYGPRVVLFVGQEELGVAEFFCGADGEWKLAKRVWAGVCTPRTATVTAAGRGVKLKATVFSPGNLRAARHLPWYKQLITMYMQEGATLRYTGGMVPDVCQIIVKGDGIYMTPASPQHKMKLRLLFEAAPMAFLIHCAGGRSTTGLTNMMNVRVVSMEQTTPIALGCARDVERYERMCRGCSKL

SEQ ID NO: 18187 - protein, 442 aa, Mus musculus
MQEMNLLPTPESPVTRQEKMATVWDEAEQDGIGEEVLKMSTEEIVQRTRLLDSEIKIMKSEVLRVTHELQAMKDKIKENSEKIKVNKTLPYLVSNVIELLDVDPNDQEEDGANIDLDSQRKGKCAVIKTSTRQTYFLPVIGLVDAEKLKPGDLVGVNKDSYLILETLPTEYDSRVKAMEVDERPTEQYSDIGGLDKQIQELVEAIVLPMNHKEKFENLGIQPPKGVLMYGPPGTGKTLLARACAAQTKATFLKLAGPQLVQMFIGDGAKLVRDAFALAKEKAPSIIFIDELDAIGTKRFDSEKAGDREVQRTMLELLNQLDGFQPNTQVKVIAATNRVDILDPALLRSGRLDRKIEFPMPNEEARARIMQIHSRKMNVSPDVNYEELARCTDDFNGAQCKAVCVEAGMIALRRGATELTHEDYMEGILEVQAKKKANLQYYA

SEQ ID NO: 18188 - protein, 442 aa, Mus musculus
MQEMNLLPTPESPVTRQEKMATVWDEAEQDGIGEEVLKMSTEEIVQRTRLLDSEIKIMKSEVLRVTHELQAMKDKIKENSEKIKVNKTLPYLVSNVIELLDVDPNDQEEDGANIDLDSQRKGKCAVIKTSTRQTYFLPVIGLVDAEKLKPGDLVGVNKDSYLILETLPTDYDSRVKAMEVDERPTEQYSDIGGLDKQIQELVEAIVLPMNHKEKFENLGIQPPKGVLMYGPPGTGKTLLARACAAQTKATFLKLAGPQLVQMFIGDGAKLVRDAFALAKEKAPSIIFIDELDAIGTKRFDSEKAGDREVQRTMLELLNQLDGFQPNTQVKVIAATNRVDILDPALLRSGRLDRKIEFPMPNEEARARIMQIHSRKMNVSPDVNYEELARCTDDFNGAQSKAVCVEAGMIALRRGATELTHEDHMEGILEVQAKKKANLQYYA

SEQ ID NO: 18189 - protein, 451 aa, Mus musculus
MQEMNLLPTPESPVTRQEKMGTVWDEAEQDGIGEEVLKMSTEEIVQRTRLLDSEIKIMKSEVLRVTHELQAMKDKIKENSEKIKVNKTLPYLVSNVIELLDVDPNDQEEDGANIDLDSQRKGKCAVIKTSTRQTYFLPVIGLVDAEKLKPGDLVGVNKDSYLILETLPTEYDSRVKAMEVDERPTEQYSDIGGLDKQIQELVEAIVLPMNHKEKFENLGIQPPKGVLMYGPPGTGKTLLARACAAQTKATFLKLAGPQLVQMFIGDGAKLVRDAFALAKEKAPSIIFIDELDAIGTKRFDSEKAGDREVQRTMLELLNQLDGFQPNTQVKVIAATNRVDILDPALLRSGRLDRKIEFPMPNEEARARIMQIHSRKMNVSPDVNYEELARCTDDFNGAQCKAVCVEAMCWAAFTAHRDTCDPKLRVGHAWCRPTPPAAGAETRCPGVHLRQS

SEQ ID NO: 18190 - protein, 439 aa, Rattus norvegicus
MNLLPTPESPVTRQEKMATVWDEAEQDGIGEEVLKMSTEEIVQRTRLLDSEIKIMKSEVLRVTHELQAMKDKIKENSEKIKVNKTLPYLVSNVIELLDVDPNDQEEDGANIDLDSQRKGKCAVIKTSTRQTYFLPVIGLVDAEKLKPGDLVGVNKDSYLILETLPTEYDSRVKAMEVDERPTEQYSDIGGLDKQIQELVEAIVLPMNHKEKFENLGIQPPKGVLMYGPPGTGKTLLARACAAQTKATFLKLAGPQLVQMFIGDGAKLVRDAFALAKEKAPSIIFIDELDAIGTKRFDSEKAGDREVQRTMLELLNQLDGFQPNTQVKVIAATNRVDILDPALLRSGRLDRKIEFPMPNEEARARIMQIHSRKMNVSPDVNYEELARCTDDFNGAQCKAVCVEAGMIALRRGATELTHEDYMEGILEVQAKKKANLQYYA

SEQ ID NO: 18191 - protein, 442 aa, Rattus norvegicus
MQEMNLLPTPESPVTRQEKMATVWDEAEQDGIGEEVLKMSTEEIVQRTRLLDSEIKIMKSEVLRVTHELQAMKDKIKENSEKIKVNNTLPYLVSNVIELLDVDPNDQEEDGANIDLDSQRKGKCAVIKTSTRQTYFLPVIGLVDAEKLKPGDLVGVNKDSYLILETLPTEYDSRVKAMEVDERPTEQYSDIGGLDKQIQELVEAIVLPMNHKEKFENLGIQPPKGVLMYGPPGTGKTLLARACAAQTKATFLKLAGPQLVQMFIGDGAKLVRDAFALAKEKAPSIIFIDELDAIGTKRFDSEKAGDREVQRTMLELLNQMDGFQPNTQVKVIAATNRVDILDPALLRSGRLDRKIEFPMPNEEARARIMQIHSRKMNVSPDVNYEELARCTDDFNGAQCKAVCVEAGMIALRRGATELTHEDYMEGILEVQAKKKANLQYYA

SEQ ID NO: 18192 - protein, 427 aa, Anopheles gambiae str. PEST
MAGNLEDREIWEDSEELGEEVLRMSTDELVSRTRLMDNEIKIMKSEVVRINHELQTQNEKIKDNTEKIKVNKTLPYLVSNVIELLDVDPQEEEDDGAVVVLDSQRKGKCAVIKTSTRQTYFLPVIGLVDSDKLKPGDLVGVNKDSYLILETLPAEYDARVKAMEVDERPTEQYSDIGGLDKQIQELIEAVVLPMTHKDKFKNLGIHPPKGVLLYGPPGTGKTLLARACAAQTKSTFLKLAGPQLVQMFIGDGAKLVRDAFALAKEKSPAIIFIDELDAIGTKRFDSEKAGDREVQRTMLELLNQLDGFSSTADIKVIAATNRVDILDPALLRSGRLDRKIEFPHPNEEARARIMQIHSRKMNVSPDVNFEELARSTDDFNGAQCKAVCVEAGMIALRRSAVSVIHEDFMDAIMEVQSKKKANLNYFA

SEQ ID NO: 18193 - protein, 431 aa, Anopheles gambiae str. PEST
MAENQIESQLREDTIEKAVEETFLGWSTEELIRRTNGLNNEIKALKDLLVSPVLDLKTLTGKVKANAEHIKLQKRLPYLVATVMEVLDMDPLEEEKEQEDAMLLQDSQRKCKSAIIKTSTRQTFFLPMIGLVEPEALRPGDLVGLNKDAYLIMDKLPPELDPRVKAMEVIERPTEQYIDIGGLDTQIAELMEAIVLPLTHKAKFERIGIQPPKGVLMYGPPGTGKTLLARACAAQTKATFIKLAGPQLVQMFIGDGAKLVRDAFALAREKAPTILFIDELDAIGTKRFDSTKAGDREVQRTMLELLNQLDGFSSSADVKVIGATNRVDILDPAMLRSGRLDRKIEFPHPNDVARARIMQIHSRRMNVSGEVNYEELARSTDGFNGAQCKAVCVEAGMIALRRSAVEVAHEDFMEAILEVQAKKKAALNYFA

SEQ ID NO: 18194 - protein, 591 aa, Rhodococcus erythropolis
MSSTENPDSVAAAEELHALRVEAQVLRRQLAQSPEQVRELESKVDSLSIRNSKLMDTLKEARQQLIALREEVDRLGQPPSGYGVLLSVHEDKTVDVFTSGRKMRLTCSPNIDTDTLALGQTVRLNEALTIVEAGTYEQVGEISTLREVLDDGLRALVVGHADEERIVWLAAPLAAVFADPEADIIAYDADSPTRKLRPGDSLLVDTKAGYAFERIPKAEVEDLVLEEVPDVHYDDIGGLGRQIEQIRDAVELPFLHKDLFHEYSLRPPKGVLLYGPPGCGKTLIAKAVANSLAKKIAEARGQDSKDAKSYFLNIKGPELLNKFVGETERHIRMIFQRAREKASEGTPVIVFFDEMDSIFRTRGSGVSSDVETTVVPQLLSEIDGVEGLENVIVIGASNREDMIDPAILRPGRLDVKIKIERPDAESAQDIFSKYLVDGLPINADDLAEFGGDRTACLKAMIVRVVDRMYAESEENRFLEVTYANGDKEVLFFKDFNSGAMIQNIVDRAKKYAIKSVLDTGAPGLRVQHLFDSIVDEFAENEDLPNTTNPDDWARISGKKGERIVYIRTLVTGKNASASRAIDTESNTGQYL

SEQ ID NO: 18195 - protein, 501 aa, Giardia lamblia ATCC 50803
MSQDFPEIPIDPEIQSFDDAMLSQRIEAIKSEAMFLRREHERYQSIIREATGLLEKNRRDLENSKRLPLLVATVSEFVEISEDHLNLNYEVTATTKKTYERQLKSLIDRDSESTAKNTDSSLEAMLKEEEFADSDRATLGLDGEVTQALRSKPSSTVTEGVIIKTSSKTYVFLASTGAVPRKMLRPTDLVAVNKDTYFIYEKLPSAVDARVKTMEVTERPMDKFEDLGGIDQQISQIKESFLLPLQRPDLLKKIGIKPSKGVLLYGVPGTGKTALARALAHEANCSFLQLTATQLVQLYIGDGSAMVIETFNLAKSLIEKERTLKGNMDAGCIIYIDEIDAIGGRRSDTGGYDRDSTRTMLTLLNCLDGFDCDERIKVLASTNRVDILDPALTRSGRFDRKIEFTYPNEKGRYDILCIHSKKIKLIGRSDDPETCDRPGAVGLQEIAKSTNEYSGAMLKAVCMEAGLVCLRRHGEAVVHEDFVEAINIVSGKREGEMSYFI

SEQ ID NO: 18196 - protein, 441 aa, Methanosarcina acetivorans C2A
MNLNIIRSSMTEITKSKDESMRSHLVKPGSVYDGIEPGELGESTESVQDRVRQLESRNSFLEEQCSQIESEKRYLENQKIKYEREIRKLQSELDRMKTSPLIIGTVIDVIKNDRIIVRSSNGPQFLVNVSQYIDEKKLLPGAKVALNQHTLAIAEVIPSTEEPFVAAMEVIESIEVDYDQIGGLDEQIQELQEAVELPLIEPERFARIGIEPPKGVLLYGLPGTGKTLLAKAVAHRTNATFIRVVGSELVQKYIGDGSKLVREIFEMARKKAPSIIFIDELDSIAARRLNETTGADREVQRTLMQLLAEMDGFDKRKNIRIIAATNRPDVLDPAILRPGRFDRLVHVPMPGIEARGKILKIHCGKMTLAGDIDFKKLAKVTEGMSGADLKAIATEAGMFAVRKDKALVEMEDFLEAVEKVSMAADTQKMMPGNLPETTMFV

SEQ ID NO: 18197 - protein, 340 aa, Methanosarcina acetivorans C2A
MEQLTEPPLFIATILEVNGEIALIRQHGNNQEVLTQIPEECLGKIEPGMRVAVNGAYSIISIVSRAADVRAQVMELINSPGVDYSMIGGLDDVLQEVRESVELPLTEPELFEDLGIEPPSGVLLHGAPGTGKTLIAKAIASQAKATFIRMSGSDLVQKFVGEGSRLVKDIFQLARDKSPSILFIDEIDAVGSMRTYDGTSGSAEVNRTMLQLLAEMDGFDPKGNVKVVAATNRIDLLDPALLRPGRFDRSIEVPLPDEKGRVEILKIHTRKMKLADDVDFEKLAKVLTGKSGAEISVIVKEAGIFVLRRRGKEITMADFMKAYEKVVNVQEPTIPQAMFV

SEQ ID NO: 18198 - protein, 440 aa, Methanosarcina mazei Goe1
MNLNNIRSSMTESTKSKDESMRSHLVKPGSVYDGIEPGELGETTESVQDRVRQLESRNSFLEEQCSQIESEKRYLENQKIKYEREIRKLQSELDRMKTSPLIIGTVIDVIKNDRIIVRSSNGPQFLVNVSQYIDEKKLLPGAKVALNQHTLAIAEVIPSTEEPFVAAMEVIESVEVDYDQIGGLDEQIQELQEAVELPLTSPERFARIGIEPPKGVLLYGLPGTGKTLLAKAVAHRTNATFIRVVGSELVQKYIGDGSKLVREIFEMARKKAPSIIFIDELDSIAARRLNETTGADREVQRTLMQLLAEMDGFDKRKNIRIIAATNRPDVLDPAILRPGRFDRLVHVPMPGIEARGKILKIHCEKMTLAEDIDFKKLAKATEGMSGADLKAIATEAGMFAVRRDKELVEMEEFLEAVEKVSMAADTQKMMPSNLPETMFV

SEQ ID NO: 18199 - protein, 334 aa, Leuconostoc mesenteroides subsp. mesenteroides ATCC 8293
  unsure (1)..(334): unsure at all Xaa locations
SLVPVLLIVAVFYLMMNQAGGGKGGQGGMMSFGKSKAKPSDPKDNKVRFADVAGAEEEKQELVEVVEFLKAPKKFVNLGARIPKGVLLEGPPGTGKTLLAKAVAGEASVPFFSMSGSDFVEMFVGVGASRVRDLFENAKKSAPAIIFIDEIDAVGRRRGTGMGGGNDEREQTLNQILIEMDGFEGSEGVIILASTNRSDVLDPALLRSGRFDRKILVGAPDVKGREAILNVHAKNKPLADNVDLKAIAQQTPXXXXXXXXXXXXXXXXXXXXXXXXXXXXXXXXXXXXXXXXXXXXXXXXXXXXXXXXXXXXXXXXXXXXXXXXXXLERIWKTC

SEQ ID NO: 18200 - protein, 440 aa, Methanosarcina barkeri
MNLNIIRSSMTESTKSKDESMRSHLGKPGPVYDGIEPGELGEVTESVQDRMRQLESRNSYLEEQCSQIESEKRYLENQKIKYEREIRKLQSELDRMKTSPLIIGTVIDVIKNDRIIVRSSNGPQFLVNVSQYIDEKKLLPGAKVALNQHTLAIAEVIPSTEEPFVAAMEVLESVEVDYDQIGGLDEQIQELQEAVELPLIEPERFARIGIDPPKGVLLYGLPGTGKTLLAKAVAHRTNATFIRVVGSELVQKYIGDGSKLVREIFEMARKKAPSIIFIDELDSIAARRLNETTGADREVQRTLMQLLAEMDGFDKRKNIRIIAATNRPDVLDPAILRPGRFDRLVHVPMPGVEARGKILKIHCGKMTLAGDIDFKRLAKATEGMSGADLKAIATEAGMFAVRKNKELIEMEDFLEAVDKVSMAADTQKMMPTSLPETMFV

SEQ ID NO: 18201 - protein, 292 aa, Methanosarcina barkeri
MRVAVNGAYSIISVVSRAADVRAQVMELINSPGVDYSMIGGLDDVLQEVRESVELPLTEPQLFEEIGIEPPSGVLLHGAPGTGKTLIAKAIASHAKATFIRMSGSDLVQKFVGEGSRLVKDIFQLARDKSPSILFIDEIDAVGSMRTYDGTSGSAEVNRTMLQLLAEMDGFDPKGNVKIVAATNRIDLLDPALLRPGRFDRSIEVPLPDEKGRAEILKIHTRKMNLADDVDFEKLARVMTGMSGAEISVIVKEAGIFVLRRRGKQITMADFLKAHEKVVSTEEPKIPQAMFV

SEQ ID NO: 18202 - protein, 420 aa, Methanosarcina mazei
MRSHLVKPGSVYDGIEPGELGETTESVQDRVRQLESRNSFLEEQCSQIESEKRYLENQKIKYEREIRKLQSELDRMKTSPLIIGTVIDVIKNDRIIVRSSNGPQFLVNVSQYIDEKKLLPGAKVALNQHTLAIAEVIPSTEEPFVAAMEVIESVEVDYDQIGGLDEQIQELQEAVELPLTSPERFARIGIEPPKGVLLYGLPGTGKTLLAKAVAHRTNATFIRVVGSELVQKYIGDGSKLVREIFEMARKKAPSIIFIDELDSIAARRLNETTGADREVQRTLMQLLAEMDGFDKRKNIRIIAATNRPDVLDPAILRPGRFDRLVHVPMPGIEARGKILKIHCEKMTLAEDIDFKKLAKATEGMSGADLKAIATEAGMFAVRRDKELVEMEEFLEAVEKVSMAADTQKMMPSNLPETMFV

SEQ ID NO: 18203 - protein, 421 aa, Methanosarcina acetivorans
MRSHLVKPGSVYDGIEPGELGESTESVQDRVRQLESRNSFLEEQCSQIESEKRYLENQKIKYEREIRKLQSELDRMKTSPLIIGTVIDVIKNDRIIVRSSNGPQFLVNVSQYIDEKKLLPGAKVALNQHTLAIAEVIPSTEEPFVAAMEVIESIEVDYDQIGGLDEQIQELQEAVELPLIEPERFARIGIEPPKGVLLYGLPGTGKTLLAKAVAHRTNATFIRVVGSELVQKYIGDGSKLVREIFEMARKKAPSIIFIDELDSIAARRLNETTGADREVQRTLMQLLAEMDGFDKRKNIRIIAATNRPDVLDPAILRPGRFDRLVHVPMPGIEARGKILKIHCGKMTLAGDIDFKKLAKVTEGMSGADLKAIATEAGMFAVRKDKALVEMEDFLEAVEKVSMAADTQKMMPGNLPETTMFV

SEQ ID NO: 18204 - protein, 418 aa, Fagus sylvatica
MAIETKHPEAVPADETCSAKCSKQGEGLKQYYLQHIHEHQLQVRQKTHNLNRLEAQRNEFNSRVRMLREELQLLQEPGSYVGEVVKVMGKNKVLVKVHSEGKYVVDIDKNIDITKITPSTRVALRNDSYVLHLILPSKVDPLVNLMKVEKVPDSTYDMIGGLDQQIKEIKEVIELPIKHPELFLESLGIAQPKGVLLYGPPGTGKTLLARAVAHHTDCTFIRVSGSELVQKYIGEGSRMVRELFVMAREHAPSIIFMDEIDSIGSARMESGSGNGDSEVQDHMLELLNQLDGFESIKQIKVLMRTNRIDILDQALLRPGRIDRKIEFPNPNRESRFDILKIHSRRMNLMRGIDLKKIAEKMNGASGAELKAVCTEAGMFALTAERRVRLVTQEDFEMAVAKVMKKETEKNMSLRKLWK

SEQ ID NO: 18205 - protein, 548 aa, Takifugu rubripes
MSSKKNKSKSKRSSEGDGSVLSKEDSSLHTSGHEGGGCKSLNSNSFTVIDFIDKADDKTPKSCRSSLVQLSLNSMKAAGVCIGRPVLLTSTVGHQEVCLGWPVATFPGGKVGLQKCVQSVLKVKTGDRVTVQPLTGAMLRAEEVLLQNRSGKIILPGNIISLTYFGRSCGLMVETIKGEDGMTLQRAPPPLVPDTEESSMLESTSGDLSLQFGSLTIDNDDTDGAPSTPGGPDPAASTPHRPAALPRLFSPPSSCSSPNPAADSAEEAVSPGVSTSSEPAEKAATAPSGGRQCCDTFYSLCSNTKVTFKDKRAAGGSANSKRSKVTYSMIGGLSSQLDVIRETIELPLKHPELFSNYGIPPPRGVLLYGPPGTGKTMIGRAIANEVGAHMTVINGPEIMSKFYGETEARLRQIFAEASQRQPAIVFIDELDALCPKREGAQNEVEKRVVASLLTLMDGIGSEGHSGQVLVLGATNRPHALDPALRRPGRFDKELEVGVPSAAERADILQKQLRLAPCGASREELTQLADATHGYVGADLAAVCKEAGK

SEQ ID NO: 18206 - protein, 175 aa, Picea mariana
ELFVMAREHAPSIIFMDEIDSIGSARMESGTGNGDSEVQRTMLELLNQLDGFEASNKIKVLMATNRIDILDQALLRPGRIDRKIEFPNPNEESRFDILKIHSRKMNLMRGIDLKKIAEKMSGASGAELKAVCTEAGMFALRERRVHVTQEDFEMAVAKVMKKETEKNMSLRKLWK

SEQ ID NO: 18207 - protein, 439 aa, Plasmodium falciparum 3D7
MNVENIFGNEEVNVEEIEKLSNSEIKTRVSLIDTEIKILKNEHARLKNEYKNLQEKIKDNVEKIHLNKMLPYLVANVVESLDLEDEEEENEIKDEYDLYDNNLKLSHEGFRDIDDEKRGKCMVIKTSTRQTIFLPVPGLIDASELKPGDLVGVNKDSYLIIDKLPQEYDNRVKAMEVIEKPSEDYSDIGGLDKQIEDLVEAIVLPMLHKEKFEKIGIKPPKGVLMHGPPGTGKTLLARACASQTNATFLKLAGPQLVQMFIGDGAKMVRDAFNLAKEKAPAIIFIDELDAIGTKRFDSELSGDREVQRTMLELLNQLDGFSTDDTVKVIAATNRPDTLDPALLRSGRLDRKIELPHPNEESRARILQIHSRKMNVHKDVNFEELARSTDDFNGAQLKAVCVEAGMIALRRGATEIDHEDFVEGITSVLSKKKSTLNYFT

SEQ ID NO: 18208 - protein, 143 aa, Cricetinae gen. sp.
AVIGVHMDDTDPLVTVMKVEKAPQETYADIGGLDNQIQEIKESVELPLTHPEYYEEMGIKPPKVILYGPPGTGKTLLAKAVANQTSATFLRVVGSELIQKYLGDGPKLVRELFRVAEEHAPSIVFIDEIDAIGTKRYDSNSGG

SEQ ID NO: 18209 - protein, 424 aa, Arabidopsis thaliana
MATPMVEDTSSFEEDQLASMSTEDITRATRLLDNEIRILKEDAQRTNLECDSYKEKIKENQEKIKLNKQLPYLVGNIVEILEMNPEDDAEEDGANIDLDSQRKGKCVVLKTSTRQTIFLPVVGLVDPDSLKPGDLVGVNKDSYLILDTLPSEYDSRVKAMEVDEKPTEDYNDIGGLEKQIQELVEAIVLPMTHKERFEKLGVRPPKGVLLYGPPGTGKTLMARACAAQTNATFLKLAGPQLVQMFIGDGAKLVRDAFQLAKEKAPCIIFIDEIDAIGTKRFDSEVSGDREVQRTMLELLNQLDGFSSDERIKVIAATNRADILDPALMRSGRLDRKIEFPHPTEEARARILQIHSRKMNVHPDVNFEELARSTDDFNGAQLKAVCVEAGMLALRRDATEVNHEDFNEGIIQVQAKKKASLNYYA

SEQ ID NO: 18210 - protein, 424 aa, Arabidopsis thaliana
MATPMVEDTSSFEEDQLASMSTEDITRATRLLDNEIRILKEDAQRTNLECDSYKEKIKENQEKIKLNKQLPYLVGNIVEILEMNPEDDAEEDGANIDLDSQRKGKCVVLKTSTRQTIFLPVVGLVDPDSLKPGDLVGVNKDSYLILDTLPSEYDSRVKAMEVDEKPTEDYNDIGGLEKQIQELVEAIVLPMTHKERFEKLGVRPPKGVLLYGPPGTGKTLMARACAAQTNATFLKLAGPQLVQMFIGDGAKLVRDAFQLAKEKAPCIIFIYEIDAIGTKRFDSEVSGDREVQRTMLELLNQLDGFSSDERIKVIAATNRADILDPALMRSGRLDRKIEFPHPTEEARARILQIHSRKMNVHPDVNFEELARSTDDFNGAQLKAVCVEAGMLALRRDATEVNHEDFNEGIIQVQAKKKASLNYYA

SEQ ID NO: 18211 - protein, 424 aa, Arabidopsis thaliana
MATPMVEDTSSFEEDQLASMSTEDITRATRLLDNEIRILKEDAQRTNLECDSYKEKIKENQEKIKLNKQLPYLVGNIVEILEMNPEDDAEEDGANIDLDSQRKGKCVVLKTSTRQTIFLPVVGLVDPDSLKPGDLVGVNKDSYLILDTLPSEYDSRVKAMEVDEKPTEDYNDIGGLEKQIQELVEAIVLPMTHKERFEKLGVRPPKGVLLYGPPGTGKTLMARACAAQTNATFLKLAGPQLVQMFIGDGAKLVRDAFQLAKEKAPCIIFIDEIDAIGTKRFDSEVSGDREVQRTMLELLNQLDGFSSDERIKVIAATNRADILDPALMRSGRLDRKIEFPHPTEEARARILQIHSRKMNVHPDVHFEELARSTDDFHGAQLKAVCVEAGMLALRRDATEVNHEDFNEGIIQVQAKKKASLNYYA

SEQ ID NO: 18212 - protein, 419 aa, Arabidopsis thaliana
MAEDTSFEGDQLASMTTDDIGRASRLLANEIRILKEESQRTNLDLESVKEKIKENQEKIKLNKQLPYLVGNIVEILEMSPEDDAEEDGANIDLDSQRKGKCVVLKTSTRQTIFLPVVGLVDPDTLKPGDLVGVNKDSYLILDTLPSEYDSRVKAMEVDEKPTEDYNDIGGLEKQIQELVEAIVLPMTHKEQFEKLGIRPPKGVLLYGPPGTGKTLMARACAAQTNATFLKLAGPQLVQMFIGDGAKLVRDAFLLAKEKSPCIIFIDEIDAIGTKRFDSEVSGDREVQRTMLELLNQLDGFSSDDRIKVIAATNRADILDPALMRSGRLDRKIEFPHPTEEARGRILQIHSRKMNVNADVNFEELARSTDDFNGAQLKAVCVEAGMLALRRDATEVNHEDFNEGIIQVQAKKKASLNYYA

SEQ ID NO: 18213 - protein, 423 aa, Arabidopsis thaliana
MATAMAEDTSFEGDQLASMTTDDIGRASRLLANEIRILKEESQRTNLDLESVKEKIKENQEKIKLNKQLPYLVGNIVEILEMSPEDDAEEDGANIDLDSQRKGKCVVLKTSTRQTIFLPVVGLVDPDTLKPGDLVGVNKDSYLILDTLPSEYDSRVKAMEVDEKPTEDYNDIGGLEKQIQELVEAIVLPMTHKEQFEKLGIRPPKGVLLYGPPGTGKTLMARACAAQTNATFLKLAGPQLVQMFIGDGAKLVRDAFLLAKEKSPCIIFIDEIDAIGTKRFDSEVSGDREVQRTMLELLNQLDGFSSDDRIKVIAATNRADILDPALMRSGRLDRKIEFPHPTEEARGRILQIHSRKMNVNADVNFEELARSTDDFNGAQLKAVCVEAGMLALRRDATEVNHEDFNEGIIQVQAKKKASLNYYA

SEQ ID NO: 18214 - protein, 424 aa, Brassica rapa
MATPMVEDTSSFEEDQLASMSTEDIVRATRLLDNEIRILKEDAQRTNLECDSYKEKIKENQEKIKLNKQLPYLVGNIVEILEMNPEDDAEEDGANIDLDSQRKGKCVVLKTSTRQTIFLPVVGLVDPDSLKPGDLVGVNKDSYLILDTLPSEYDSRVKAMEVDEKPTEDYNDIGGLEKQIQELVEAIVLPMTHKERFEKLGVRPPKGVLLYGPPGTGKTLMARACAAQTNATFLKLAGPQLVQMFIGDGAKLVRDAFQLAKEKAPCIIFIDEIDAIGTKRFDSEVSGDREVQRTMLELLNQLDGFSSDERIKVIAATNRADILDPALMRSGRLDRKIEFPHPTEEARARILQIHSRKMNVHPDVNFEELARSTDDFNGAQLKAVCVEAGMLALRRDATEVNHEDFNEGIIQVQAKKKASLNYYA

SEQ ID NO: 18215 - protein, 424 aa, Brassica rapa
MATPMVEDTSSFEEDQLASMSTEDIVRATRLLENEIRILKEDAQRTNLECDSYKEKIKENQEKIKLNKQLPYLVGNIVEILEMNPEDDAEEDGANIDLDSQRKGKCVVLKTSTRQTIFLPVVGLVDPDSLKPGDLVGVNKDSYLILDTLPSEYDSRVKAMEVDEKPTEDYNDIGGLEKQIQELVEAIVLPMTHKERFEKLGVRPPKGVLLYGPPGTGKTLMARACAAQTNATFLKLAGPQLVQMFIGDGAKLVRDAFQLAKEKAPCIIFIDEIDAIGTKRFDSEVSGDREVQRTMLELLNQLDGFSSDERIKVIAATNRADILDPALMRSGRLDRKIEFPHPTEEARARILQIHSRKMNVHPDVNFEELARSTDDFNGAQLKAVCVEAGMLALRRDATEVNHEDFNEGIIQVQAKKKASLNYYA

SEQ ID NO: 18216 - protein, 177 aa, Cicer arietinum
EGPRMVRDVFRLAKENAPAIIFIDEVDAIATARFDAQTGADREVQRILMELLNQMDGFDQTVNVKVIMATNRADTLDPALLRPGRLDRKIEFPLPDRRQKRLVFQVCTAKMNLSDEVDLEDYVSRPDKISAAEISAICQEAGMHAVRKNRYVILPKDFEKGYRTNVKKPDTDFEFYK

SEQ ID NO: 18217 - protein, 423 aa, Glycine max
MASAMVEDANFEDDQLANMTTDDIVRASRLLDNEIRILKEELQRTNLELESYKDKIKENQEKIKLNKQLPYLVGNIVEILEMNPEDEAEEDGANIDLDSQRKGKCVVLKTSTRQTIFLPVVGLVDPDKLKPGDLVGVNKDSYLILDTLPSEYDSRVKAMEVDEKPTEDYNDIGGLEKQIQELVEAIVLPMTHKERFQKLGVRPPKGVLLYGPPGTGKTLMARACAAQTNATFLKLAGPQLVQMFIGDGAKLVRDAFQLAKEKSPCIIFIDEIDAIGTKRFDSEVSGDREVQRTMLELLNQLDGFSSDDRIKVIAATNRADILDPALMRSGRLDRKIEFPHPSEEARARILQIHSRKMNVHPDVNFEELARSTDDFNGAQLKAVCVEAGMLALRRDATEVNHEDFNEGIIQVQAKKKASLNYYA

SEQ ID NO: 18218 - protein, 431 aa, Glycine max
  unsure (1)..(431): unsure at all Xaa locations
MASAMVEDANFEDDQLANMTTDDVVRASRLLDNEIRILXKEELQRTNLELESYKDKIKENQEKIKLNKQLPYLVGNIVEILEMNPEDEAEEDGANIDLDSQRKGKCVVLKTSTRQTIFLPVVGLVDPDKXLKPGDLXVGVNKXDSYXLILDTLPSEYDSRVKAHEVDEKPTEDYNDIGGLEKQIQELVEAIXVLPMTHKERFQKLGVRPPKGVLLYGPPGTGKTLMXARACAAQTNATFLKLAGPQLVQMFIGDGAKLVXRDAFQLAKEKSPCIIFIDEIDAIGTKRFDSEVSGDREVQRTMLELLNQLDGFSSDDRIKVIAATNRADILDPALMRSGRLDRKIEFPHPSEEARARILQIHSRKMNVHPDVNFEELARSTDDFNGAQLKAVCVEAGMLALRRDATEVNHEDFNEGIIQVQAKKKASLNYYA

SEQ ID NO: 18219 - protein, 414 aa, Glycine max
  unsure (1)..(414): unsure at all Xaa locations
MASAMLGDATTSFEDGKLASMTTDDVVRASRILENDIRILKEEVQRSNREWESYKEKIXKDNEEKVKLNKQLPYLVGNIVEILEINPEDEAEEDGSNIDLDSQRKGKCVVLKTSTRQTIFLPVVGLVDPAKLKPGDLVGVNKDSYLILDALPSEYDSRVKAMEVDEKPTEDYNDIGGLEKQIQELVEAIVLPMTCKERFQKLGVRPPKGVLLYGPPGTGKTLIARACAAQTNATFLKLAGPQLVQMFIGDGAKLVQDAFQLAKEKSPCIIFIDEIDAIGTKRFDSEVSGDREVQRTMLELLNQLDGFSSDDRVKVIAATNRADILDPALMCSGRLDXKIEFPHPTLTVFTLMLXIHSRKMNVHPDVNAAQLKAVCVEAGMLALCRDATEVNHEDFDEGIIQVQAKKKASLDYYA

SEQ ID NO: 18220 - protein, 413 aa, Glycine max
  unsure (1)..(413): unsure at all Xaa locations
GIRLEXTPFSIGNXSDGERQLASMTTDDVVRDSXASRMLENGIRILKEEVQRSNREWESYKEKIKNNEEKVKLHKQLPYLVANIVEILDMNPEDEAEEDGANIDLDSQRKGKCVVLKTSTRQTIFLLVVGLVDPDKLKPGYLAGVNQDSYLILDTLPSEYDSXFKAMEVDEKPTEDYNDIGGLEKQIQEWVETIVLPITHKERFQKFGVGPPKGVLLYGPPGTGKTLIARACAAQTNATFLKLAGPQLVKAXLFHFSKLVRDAFQLAKEKSPCIIFMDEIDAIGTKRFDSEVSGDRELQRTMLELLNQLDGFSSDDRVKVIAATNRADILDPALMCSGRLDXKIEFPHPTLTXIHSRKMNVHPDVNAAQLKAVCVEAGMLALCRDATEVNHEDFDEGIIQVQAKKKASLDYYA

SEQ ID NO: 18221 - protein, 273 aa, Glycine max
NSARARAESVEERPTEEFTDIGGLEKQIEELREAIVLPIAHKDKFKSLGIRPPKGVLMHGPPGVGKTMMARACAAQTSATFLKLAGPQLVQMFIGDGAKIIRDAFALAKEKAPAVIFIDELDAIGTKRFDSDTSGDREVQRTMLELLNQLDGFSSAEDIKIIAATNRPDILDPALLRSGRLDRKIEFPLPNEEARSQIMKIHSRKMNVSKKDVNFQELARSTDEFNGAQLKAVCVEAGMSALRRGATFLTHEDFLEGIAQVQAKKKNELDYFA

SEQ ID NO: 18222 - protein, 810 aa, Pisum sativum
MIFSRIGRALSRSSRVKNLLHGDSRLGALSGVPRIDVYSEGVEGGLGFFRGYVSSSVARNNGFVSNLSGFKSVAGNPRFLRLFSSEAPKKKNYENFYPKGQKEVPKGGDKKNESKEDSKSNTEDQGGFQEAFMKQFQSFLTPLLVMGLFLSSFSFGPREQQQISFQEFKNKLLEPGLVDHIVVSNKSVAKIYVRNSPRDQADSEVLQGNLPAKGSSGHYKYYFNIGSVESFEEKLEEVQETLGVDPHDNVPVTYSSELVWYQELMRFAPTLLLLGTLLYMGRRMQGGFGVGGGGGGKGARGIFNIGKAHVTKVDKNAKNKVYFKDVAGCDEAKQEIMEFVHFLKNPKKYEELGAKIPKGALLVGPPGTGKTLLAKATAGESGVPFLSISGSDFMEMFVGVGPSRVRNLFQEARQCAPSIIFIDEIDAIGRKRGRGGFSGSNDERESTLNQLLVEMDGFGTTAGVVVLAGTNRPDILDNALLRPGRFDRQITIDVPDIKGRDQIFQIYLKTIKLDHEPSYYSQRLAALTPGFAGADIANVCNEAALIAARTDEAQVTMDHFEAAIDRIIGGLEKKNKVISKLERRTVAYHEAGHAVTGWFLEHTDPLLKVTIVPRGTAALGFAQYVPNENLLKTKEQLFDMTCMTLGGRAAEKVLIGTISTGAQNDLEKVTKMTYAQVAVYGFSEKVGLLSFPQREDSMEMTKPYSSKTGAIIDTEVREWVNKAYERTIQLIEEHKAKVAEIAELLLEKEVLHQEDLLRVLGERPFQSAEPTHYDRFKLGFQDEEKVVETTVNEAKDDGGSSPLEPEVVPT

SEQ ID NO: 18223 - protein, 429 aa, Oryza sativa (japonica cultivar-group); identical to SEQ ID NO: 558

SEQ ID NO: 18224 - protein, 423 aa, Lycopersicon esculentum
MATPMAEDSNFEDDQLHAMSTEDIIRASRLLDNEIRIIKEELQRTNLELDSFKEKIKENQEKIKLNKQLPYLVGNIVEILEMNPEEEAEEDGANIDLDSQRKGKCVVLKTSTRQTIFLPVVGLVDPDNLKPGDLVGVNKDSYLILDTLPSEYDSRVKAMEVDEKPTEDYHDIGGLEKQIQELVEAIVLPMTHQERFQKLGVRPPKGVLLYGPPGTGKTLMARACAAQTNATFLKLAGPQLVQMFIGDGAKLVRDAFQLAKEKSPCIIFIDEIDAIGTKRFDSEVSGDREVQRTMLELLNQLDGFSSDDRIKVIAATNRADILDPALMRSGRLDRKIEFPHPTEEARARILQIHSRKMNVNPDVNFEELARSTDDFNGAQLKAVCVEAGMLALRRDATEVTHEDFNEGIIQVQAKKKASLNYYA

SEQ ID NO: 18225 - protein, 908 aa, Helianthus annuus
IFAESSMVGRRKPLVLSSTKSLINSVLNSSNKLNTNGIDGAPINKHSSGDVDGSETTALQLRAGILRLSDEKLGLSRQKAISLDEAALIGLSTSLLKRLSITSGSLVIVKNVDSQIQRISQIVALDPPNVHDVSANNELLSYNASNAMVVFPSVTYPLIHHVPLASEVAYVSPLLAFNLGLHTSCLKLLLHHGEDKLASLFEVKGDNESDLETNEGFSVNLDIKPLTKLPSLKIVNKKIDIALNEYFTIDRYLSRGDVFSIRVNWSCKSAMCIACSQNNQNSRDTNLYFKVVAAEPSEEPVLRINRTETALVLSASTPSAIPPNLLVNKKKGFSPLHQDTVKTLASIITPTLCPSALSSKFRVAVLLFGLPGCGKRTVVKHVAHQLGLHVVEYSCHDLVASSEMENFCHVDSSFHCCSYSPTILLLRHFDAFSNLSSNDGSPNDQIGVNSEVASVIREFTEPFTQDEDDYEDEDEAEHMNSTRAIYTHPVLLVASADNSEGLPPTIRRCFSHEMKMGPLTEDQRVELLSQSLQRIPELLPDMSPEDLAKDMVGQTSGFMPRDIRALIADASSSLVPTNGISFENKESQKDIQPPSKEFMSKALERSKKRNASALGTPKVPNVKWEDVGGLEDVKKSILDTVQLPLLHKDLFSSGLRRSSGVLLYGPPGTGKTLLAKAVATECFLNFLSVKGPELINMYIGESEKNVRDIFQKARAARPCVIFFDELDSLAPARGASGDSGGVMDRVVSQMLAEIDGLNDSSQDLFIIGASNRPDLIDAALLRPGRFDKLLYVGVTTDPSYRERVLKALTRKFKLHEDVSLYSIAKKCPPNFTGADMYALCADAWFHAAKRKVLAADADPTNMKDDVDSVVVEYEDFVTVLRELSPSLSLAELKKYEMLRDQFEGASSK

SEQ ID NO: 18226 - protein, 429 aa, Oryza sativa
MTSSGAPPPAAMAVDDAEDDQLASMSTEDIVRASRLLDNEIRVLKDELQRTNLELESFKEKIKENQEKIKLNKQLPYLVGNIVEILEMNPEDEAEEDGANIDLDSQRKGKCVVLKTSTRQTIFLPVVGLVDPDKLKPGDLVGVNKDSYLILDTLPSEYDSRVKAMEVDEKPTEDYNDIGGLEKQIQELVEAIVLPMTHKDRFQKLGIRPPKGVLLYGPPGTGKTLMARACAAQTNATFLKLAGPQLVQMFIGDGAKLVRDAFQLAKEKAPCIIFIDEIDAIGTKRFDSEVSGDREVQRTMLELLNQLDGFSSDERIKVIAATNRADILDPALMRSGRLDRKIEFPHPSEEARARILQIHSRKMNVNPDVNFEELARSTDDFNGAQLKAVCVEAGMLALRRDATEVTHEDFNEGIIQVQAKKKSSLNYYA

SEQ ID NO: 18227 - protein, 429 aa, Oryza sativa; identical to SEQ ID NO: 558

SEQ ID NO: 18228 - protein, 429 aa, Oryza sativa
MSSPPPAAAAAMAVDDADDDQLASMSTENIVRATRLLDNETRVLKDELQRTNLEVESYKEKIKENQEKIKLNKQLPYLVGNIVEILEMNPEDEAEEDGANIDLDSQRKGKCVVLKTSTRQTIFLPVIGLVDPEKLKPGDLVGVNKDSYLILDTLPSEYDSRVKAMEVDEKPTEDYNDIGGLEKQIQELVEAIVLPMTHKDRFQKLGIRPPKGVLLYGPPGTGKTLMARACAAQTNATFLKLAGPQLVQMFIGDGAKLVRDAFQLAKEKSPCIIFIDEIDAIGTKRFDSEVSGDREVQRTMLELLNQLDGFSSDERIKVIAATNRADILDPALMRSGRLDRKIEFPHPSEEARARILQIHSRKMNVNPDVNFEELARSTDDFNGAQLKAVCVEAGMLALRRDATEVTHEDFNEGIIQVQAKKKSSLNYYA

SEQ ID NO: 18229 - protein, 433 aa, Triticum aestivum
MSSSPTPAPDAGAAAMAVDDSSDDQLDSMSTEDIVRATRLLDNEVRVLKDELQRNNLELENVKDKIKENQEKIKLNKQLPYLVGNIVEILEMNPEDEAEEDGANIDLDSQRKGKCVVLKTSTRQTIFLPVIGLVDPDNLKPGDLVGVNKDSYLILDTLPSEYDSRVKAMEVDEKPTEDYNDIGGLEKEIQELVEAIVLPMTHKEQFQKLGIRPPKGVLLYGPPGTGKTLMARACAAQTNATFLKLAGPQLVQMFIGDGAKLVRDAFELAKEKAPCIIFIDEIDAIGTKRFDSEVSGDREVQRTMLELLNQLDGFSSDERIKVIAATNRADILDPALLRSGRLDRKIEFPHPTEEARARILQIHSRKMNVHPDVNFEELARSTDDFNGAQLKAVCVEAGMLALRRDATEVIHEDFNEGIIQVQAKKKSSLNYYA

SEQ ID NO: 18230 - protein, 430 aa, Zea mays
MSSSGAPAPAAAMAVDDAEDDQLASMSTEDIIRASRLLDNEIRVLKDELQRTNLELESFKEKIKENQEKIKLNKQLPYLVGNIVEILEMNPEDEAEEDGANIDLDSQRKGKCVVLKTSTRQTIFLPVVGLVDPDKLKPGDLVGVNKDSYLILDTLPSEYDSRVKAMEVDEKPTEDYNDIGGLEKQIQELVEAIVLPMTHKDRFQKLGIRPPKGVLLYGPPGTGKTLMARACAAQTNATFLKLAGPQLVQMFIGDGAKLVRDAFQLAKEKAPCIIFIDEIDAIGTKRFDSEVSGDREVQRTMLELLNQLDGFSSDERIKVIAATNRADILDPALMRSGRLDRKIEFPHPSEEARARILQIHSRKMNVNPDVNFEELARSTDDFNGAQLKAVCVEAGMLALRRDATEVTHEDFNEGIVQVQAKKKSSLNYYA

SEQ ID NO: 18231 - protein, 429 aa, Zea mays
  unsure (1)..(429): unsure at all Xaa locations
MSSSAPAXXAAMAVDDAEDDQLASMSTEEITRASRLLDNEIRVHKDELQRSNLELESIKEKTKENQEKIKLNKQLPYLVGNIVEILEMNPEDEAEEDGANIDLDSQRKGKCVVLKTSTRQTIFLPVIGLVDPDKLKPGDLVGVNKDSYLILDTLPSEYDSRVKAMEVDEKPTEDYNDIGGLEKQIQELVEAIVLPMTHKDRFQKLGIRPPKGVLLYGPPGTGKTLMARACAAQTNATFLKLAGPQLVQMFIGDGAKLVRDAFQLAKEKAPCIIFIDEIDAIGTKRFDSEVSGDREVQRTMLELLNQLDGFSSDERIKVIAATNRADILDPALMRSGRLDRKIEFPHPSEEARARILQIHSRKMNVNPDVNFEELARSTDDFNGAQLKAVCVEAGMLALRRDATEVTHEDFNEGIIQVQAKKKSSLNYYA

SEQ ID NO: 18232 - protein, 431 aa, Zea mays
  unsure (1)..(431): unsure at all Xaa locations
MSSSAPAXXAAMAVDDAEDDQLASMSTEEITRASRLLDNEIRVHKDELQRSNLELESIKEKTKENQEKIKLNKQLPYLVGNIVEILEMNPEDEAEEDGANIDLDSQRKGKCVVLKTSTRQTIFLPVIGLVDPDKLKPGDLVGVNKDSYLILDTLPSEYDSRVKAMEVDEKPTEDYNDIGGLEKQIQELVEAIVLPMTHKDRFQKLGIRPPXKGVLLYGPPXGTGKTLMARACAAQTNATFLKLAGPQLVQMFIGDGAKLVRDAFQLAKEKAPCIIFIDEIDAIGTKRFDSEVSGDREVQRTMLELLNQLDGFSSDERIKVIAATNRADILDPALMRSGRLDRKIEFPHPSEEARARILQIHSRKMNVNPDVNFEELARSTDDFNGAQLKAVCVEAGMLALRRDATEVTHEDFNEGIIQVQAKKKSSLNYYA

SEQ ID NO: 18233 - protein, 401 aa, Zea mays
  unsure (1)..(401): unsure at all Xaa locations
MSSSGAPAPAAAMAVDDAEDDQLASMSTEDIIRASRLLDNEIRVLKDELQRTNLELESFKEKIKENQEKIKLNKQLPYLVGNIVEILEMNPEDEAEEDGANIDLDSQRKGKCVVLKTSTRQIQELVEAIVLPMTHKDRFQKLGIRPPKGVLLYGPPGTGKTLMARACAAQTNATFLKLAGPQLVQMFIGDGAKLVRDAFQLAKEKAPCIIFIDEIDAIGTXRFDSEVTXXDREVQRTMXLELLNQLDGFSSDGEXIKVIAATNRADILDPALMRSGRLARKIEFPPPSEEARARILQIHSRKMNVNPDVTFEELARSTDDFNGAQLKPVCVKAGMLPLRRDATKVTPEDFNEGFVQVQAKKKSSLNYYAPPVCQNIWPIRGLYPSGMNNRSYVFNARFFRH

SEQ ID NO: 18234 - protein, 438 aa, Schizosaccharomyces pombe
MSTLEELDALDQSQQGGSSNNEGLDGIEQEILAAGIDELNSRTRLLENDIKVMKSEFQRLTHEKSTMLEKIKENQEKISNNKMLPYLVGNVVEILDMQPDEVDVQESANQNSEATRVGKSAVIKTSTRQTIFLPLIGLVEPEELHPGDLIGVNKDSYLIIDKLPSEYDSRVKAMEVDEKPTERYSDIGGLSKQIEELFEAIVLPMQQADKFRKLGVKPPKGCLMFGPPGTGKTLLARACAAQSNATFLKLAAPQLVQMFIGDGAKLVRDAFALAKEKSPAIIFIDELDAIGTKRFDSEKAGDREVQRTMLELLNQLDGFSSDDRVKVIAATNRVDTLDPALLRSGRLDRKLEFPLPNEEARVGILRIHSRKMAIDDDINWEELARSTDEYNGAMLKSVCVEAGMIALRQGDTKINHEHFMDGILEVQMRKSKTLQYFA

SEQ ID NO: 18235 - protein, 819 aa, Aspergillus fumigatus
MSAEPDHAHDKKRVHLHDASGAEKKEELDTSTAILKKKKKPNSLIVTDAVNDDNSVIALSNNTMETLQLFRGDTVLVKGKKRKDTVLIVLADDDLDDGSARINRVVRHNLRVKHGDIITVHPCPDIKYAKRIAVLPIADTVEGLTGSLFDVYLAPYFREAYRPVKQGDLFTVRGGMRQVEFKVVEVDPPEYGIVAQDTIIHCEGEPIQREDEEGNLNEVGYDDIGGCRKQMAQIRELVELPLRHPQLFKSIGIKPPRGILMYGPPGTGKTLMARAVANETGAFFFLINGPEIMSKMAGESESNLRKAFEEAEKNSPAIIFIDEIDSIAPKREKTNGEVERRVVSQLLTLMDGMKARSNVVVMAATNRPNSIDPALRRFGRFDREVDIGIPDPTGRLEILSIHTKNMKLAEDVDLETIAAETHGYVGSDLASLCSEAAMQQIREKMDLIDLDEDTIDAEVLDSLGVTMENFRYALGVSNPSALREVAVVEVPNVRWEDIGGLEEVKRELIESVQYPVDHPEKFQKFGLSPSRGVLFYGPPGTGKTMLAKAVANECAANFISVKGPELLSMWFGESESNIRDIFDKARAAAPCVVFLDELDSIAKSRGGSVGDAGGASDRVVNQLLTEMDGMTSKKNVFVIGATNRPEQLDAALVRPGRLDTLVYVPLPDQASRESILRAQLRKTPVAPDVDIPFIASKTHGFSGADLGFVTQRAVKLAIKESIAAEIERQKQREAAGEDIKMDDEGEEEDPVPQLTRAHFEEAMKSARRSVSDVEIRRYEAFAQSLKNSGGSSFFRFPSSGEIQNNDTFGDAGNDDSLYD

SEQ ID NO: 18236 - protein, 462 aa, Neurospora crassa
MSTLEELDDLDRREREDKKKDQDKDKNNKKEGDGDAEMKDAEPEADDILDEEILSLSTEDILMRKRLLENDARIMKSEYQRLSHERATMKDKIKENQEKIANNRQLPYLVGNVVELLDLDPTAESSEEGANIDLDATRVGKSAVIKTSTRQTIFLPLIGLVDPEKLKPGDLIGVNKDSYLILDTLPAEYDSRVKAMEVDEKPQEKYTDVGGLDKQIDELVEAIVWPMKEAERFKKIGIKAPKGIGALMYGPPGTGKTLLARACAAQTDATFLKLAGPQLVQMFIGDGAKLVRDCFALAKEKAPSIIFIDELDAVGTKRFDSEKSGDREVQRTMLELLNQLDGFASDDRIKVLAATNRIDVLDPALLRSGRLDRKIEFPLPNEEARAQILKIHSRKMKVNPGVNWGELARSTDEFGGAMLKAVCVEAGMIALRMGKNQIGHEHYVDAISEVQAKKKETVNFYA

SEQ ID NO: 18237 - protein, 1388 aa, Colletotrichum lagenarium
MTTSELVPPPPARRSPRTRRRRQDKPALSARLVLDDHEINGDVGVLSEDLFTDLFPHLRNVPSREDGSEDIHHVAIAPWEPSPSPTETAWTVVPVLKSSALKPSTVQFSPSSLSLQSFATILQQVAPSKLSSHSRSGIEVQILDVVALSLDTVFVSLESELTKRLEQGEGTFFRDRPNKGKGKAPAQPDTPEDRLISALRVALGSLKVLHSGDLFSLPLPPHPVTHVPPNPGKIMLCEPVSREYLSDDTKIVLMRGRVHAKRGQSAPAIPPNRSLNGVPEDDEDDTANDQFYSAAEDRYKTDAATTEMDTVTETEESDLSGVDHDDDLSDDFMDDMISLQAPTLPTTASGVSTMQPGTPMTIGRGRKTNGIATPASVFSNFTATTARPDRPRGRLFKAQGLIRPILIDLLHPKPAPEDDEEARIFVDIASLSKIGCFSGDWVRVEAAEEPPANGFGAFGLGSFTSLEPTESNWRPVRVYGLPEGYSQRPVTRIPSAKHGERRMSFFESQLQKPTSPTAYISPVLLANLESPSYLRLSPIKRGTYQGKGTLPKFTSASRPPYARDITIQHVRSPVTAERAYQSAVLGGLKRYFAQKIRLVRTGDLIAVPIDTQLGKALQEQPSANGSEVDDVMALAKDESCRFDQVAWFKVGHIQTQKTDADHDQTEDLWGGVACIDSSSVAMHGSGFATSRTPATKASTWPYYLGVKKMPMKSNGASALMVPEQDQRFVSPLRRRLRELLAAATSPRAIHLKMPPVAILLTSTHRNIGKATLASEACSDIGLHTYAIDAYDILSEAGTSGGDVKTEGLLRTRSERAMSCGPDTTALLIKHVEALTADRMVSTMKEILQDTRVLVATTSDVDKVPDGVRGLFSHELEVGAPDEAEREGILRTIVEDRGINLDPEVDLNGIALKTAALVAGDLVDVVDRALVAQRLRLEQISSKTGQAVTVRDLQVAGGAMARCVTKGDFDVAVEAARKNFAGAIGAPKIPNVTWDDVGGLNNVKDAVTETIQLPLERPELFAKGMKKRSGILFYGPPGTGKTLLAKAIATEYSLNFFSVKGPELLNMYIGESEANVRRVFQRARDARPCVVFFDELDSVAPKRGNQGDSGGVMDRIVSQLLAELDGMSGGDDTSGGVFVIGATNRPDLLDPALLRPGRFDKMLYLGVSDTHDKQLKILEALTRKFTLHPSVSLHSVAQQLPFTYTGADFYALCSDAMLKAVTRQAASVDAKIRELEAQPRSRTGPISTAYFFDHHATPEDIAVMVTEEDFLAANRELVPSVSAGELSHYEQVRAMFEGPPEKDRQQQQQQQQRPSGLRAVSGSSVVSKGKGKAIAGGSGKGKGKAVATGSDDEYGSEGEVAVVNGKGKGKGKAVAGFQDGTASDDEGLY

SEQ ID NO: 18238 - protein, 397 aa, Guillardia theta
MPNYKYKSKLRNELEKKLEIIELENKNIRISNSNNNYEKIKLKDMKKELQEKIKSSSTLPHLVATISEIIYNQNRKIDGIILKTSNRLNIFLSNEGLIDKKNLNLNSIYGVNKDSYYLISRLPPEYDFRVRAMEVDENPNQTYQDIGGLDNQIQELIEAIVLPLTQIIKFNKIGIIAPKGVLLYGPPGMGKTLLARACASQTNAKFFKIGGPNLVQMYIGEGASLVRETFKYAKETQPSIIFIDEIDAIGMKRSISDSNGDHEVQRTMLELLNQLDGFSLNSNVKIIAATNRIDILDPALLRSGRLDRKIEFPYPTLGSRLKILKIHCRKIRISEYLELLEIAKITENFNGAQLKALCVEAGIIAIRKHKKIVIYDDFMEAFLKIKYRKDVQLKYII

SEQ ID NO: 18239 - protein, 598 aa, Leishmania donovani
MDPLQREASKNGEEGAAGAERPSYFRGFFDAEKRRKVVNHDPTVGQAIGGAVVMALPVALIIVLVMRRHARLATQEASGAAPKEGGFFSEMQKMMRQTMNPMGEKNFKVSVKDTKFSDVIGVPEALAEVQQYVNFLKTPQVFTRLGGRLPKGCILTGEPGTGKTLLAKAVAGEASVPFYSCSGADFIEVYAGSGPKRVRELFAAAKKDAPSVIFIDEIDAVGSRSSGNGAMGLSSEENRTINQLLAELDGLQPNEAVVVFAATNFVDSLDKALLREGRFDRKVEIPMPDRQARQDLFNHYLSRIACEDAGSLSKKLAELTPGVSPATIAAIVNEGALSAAIKDKAVVAAVDLLPAIDDVLVGKKHRSRMSDDAARRVALHESGHALVAWLLPEQTDVVKISITPRGPAGGFTQQVGREVLDMATEFSLFTDICVMLGGRLAEMTQHESLTTGAQDDYQRATQTAIREFLAFGMSRQVGLLSYEPQRLSEGRMHQKHSEAAHKMAEEEAARLVAAASDHVKMLLRSHDALLQKLAASLFERKELLREDIEAIVGPRPGTSSAVSEQTRAALRRFVDASEAAALQRQTAREAMCATLSTA

SEQ ID NO: 18240 - protein, 409 aa, Aeropyrum pernix
MTLSSAGGSRSHRHNGGHSERDVEIRILKDKVRSLTKEKISLQKELEYYKNEITKLLSPPYIEAVVLEVIDDNRVVVKSSTGPNLIVNVAAGVDARSLKPGAIVALNNRGSTIVDVLPGRYDPLVKAMEVEERPKVFFKDVGGLEEQIREIYEAVVLPIKNPHLFRELGIDPPKGVLLHGPPGTGKTLLAKAVAGETEATFIRVVGSELVNKFIGEGARLVREIFRLAREKAPSILFIDEIDAIASKRVDIGTSGDREVQRTMLQLLAELDGFDPLDNVKVIAATNRLDLIDPAVLRPGRFDRIIEVPLPSLRGRLEILGIHTRKAKMAPDVDLEAIAKLTEGFSGADLKAVVVEAGYNAIRRGSRVITMDDMIKAVEKVKAALDKRGGGDPFIRAQQKSGDDTIATVI

SEQ ID NO: 18241 - protein, 445 aa, Trypanosoma brucei
MTQDTARATGGAAEGDRGGTSDASAAAQLSPEELENIDSLTNQAPRNRSTQLQREIHQLKNEERTMSSELAGLRREVEESQKRVRDSNKLPYLVASIAEVLDLEADDQDVEELNVGKKKSRHPQKSAIIKTSSRQTVFLPVVGLVDANKLSPQDLVGVNKDTFLVLEELPPEYDSRVKAMEIVEKPKEKYTDVGGLDKQINEMIEAVVLPITEKEKYVRIGIKPPKGVLLYGSPGTGKTMLARACAASTDACFLRLAGPQLVQMYIGEGARILRDAFALAKKRAPTIIFIDELDAIGSRRSDEGSKHGSREVQRRMLELLSLLDGFGSTDDVKVIAATNRIDVLDPALLRRGRIDRKVEFTLPDEEARAHILQIHSRRMALHGDVNFEEISRMTEDMNGAQLKAVCVEAGMLALRNERVYVAHEDFAEGVTAVQARKKSSLNYYA

SEQ ID NO: 18242 - protein, 247 aa, Giardia intestinalis
  unsure (1)..(247): unsure at all Xaa locations
AIKELEETIQLPLTNPEYFVDLGIEPPRSCILHGPSGTGKSLLARACANETSACYMKMAGSELIQXYSGEGPRLVRELFKAAKANQPTIIFIDEVDAVGRKRYDADSGGAREIQRTMLELLNQLDGFDRTEGVKVIMATNLIESLDSALIRAGRIDRKIYVGLPDLTARRQIFKIHTRRMMLDKDIVEDEILNCKDDLSGADIKAITLEAGLLALRDRRIRVCMSDFRKARDKVLYKKIQEVGDLYT

SEQ ID NO: 18243 - protein, 435 aa, Plasmodium falciparum
MAAVDFDVRSKNLSEGIKNEISEKNMENNNNNDNNKNSSALNEEQVQSGIKRYYELKIEEYESIINKKLQNKKRLEAQRNELNARVRELCDEIQYLLEAASYVGEIVKPMGKNKVLVKINPEGKYVVDIARHINISHCTPNTRVALYNDSYKLHKILPSKVDPLVSLMKVEKVPDSTYEMVGGLDQQVKEVKEVIELPVKHPEIFESLGISQPKGVLLYGPPGTGKTLLARAVAHHTDCTFIRVSGSELVQKYIGEGSRMVRELFVMAREHAPSIIFMDEIDSIGSQRIEGEHGDSEVQRTMMELLNQLDGFESTQNIKVIMCTNRIDILDEALLRPGRIDRKIEFPNPNVEARMEILKIHSRKINLMRGIDMLKIATHMNNCSGAEVKAVCTEAGMFALRERRVHVTQEDFEMAVAKVMKQDAEKNFTLRKLWK

SEQ ID NO: 18244 - protein, 401 aa, Encephalitozoon cuniculi
MSLEELEAMDQSNPGEFLERVREKIRMLNSETRILQSRVNTIKHDISTKNASIAENMERIRLNKQLPYLVGNVVEVLDEHSGVVNASTRMSSYLPITGLIPNSELRPGDLVALHKDTNIVFEKLPPDYDMKVGGMVLKSDAKPDETYEDIGGLERQIEELNEAIVLSLTHPERFEKLNIKPPKGVLMYGPPGTGKTLMARACASKTNATFLKLAGPQLVQMYIGDGARLVRDAFALAKERKPTIIFIDEIDAIGAKRSDSDQTGDREVQRTMLELLNQLDGFSSSEEVKIIAATNRVDILDPALLRSGRLDRKIEFPLPNTLGRKRILQIHARKMSVRDDVNFDELARSTEGFNGAQCKAVCVEAGMAALRKEKTEISQNDFMDGIQEVLSRKKSKLLYFT

SEQ ID NO: 18245 - protein, 662 aa, Schistosoma mansoni
MIVSPCCRIIRTCCVSNRGTFHSRLAALYPSYIKIPNNHARIFVTKSRKINRPSSSFIIDTKEARQRNSDSSTVSSDLDEILKDQTPSAQLRLVDAYRRGFQSSTDSGKSSNKMQMWRTIIIKTILFGVVSCFTIVFLKKTLVGTFPKFLDQNIGSFAENTDVSFSDVQGCDEVKKELVDVVEFLRNPEKFNQIGAKLPKGVLLVGPPGVGKTLLAKAVSGEAQVPFLYASGSSFDEVLVGLGASRIRQLFTTAKQNSPCLVFIDEIDSVGGNRTFSPHHPFANQTINQLLAEMDGFQSKEGIIVLGATNQAEVLDKALLRPGRFDVQIHVSPPTYEGRIALLNLYLKKVKTGSNIDIEKLAHGTVGYTGADIQNLVNQAAIAAALRNDPFVEMHHLWDARDRLIMGPAKRRPLDDQTNRVSAFHEAGHALVALLTADSIPLHKVTIIPRGEAGGLTSFLQEKDISFMTRAQLLAQLDVLMGGRVGEELVFGADKVTNGAADDFRKATILAQNMVKRFGFSSKIGPRVIPDTQDEQLGEATRDLIDKEVDQLLNDSLTRVRTLLSSQSKQHKLLAEALLHFETLTKDEVLAVLAGKMKPPKTQSVTSKSTTLLPQLGPSTSTEIPRMIVSLIIVHVVDFISFFCPFKDTLHTYTHTHKLLFS

SEQ ID NO: 18246 - protein, 430 aa, Caenorhabditis elegans
MSQTPPPKDGKNPEAMEVEDAIDEEILKMSTEDLKSRTHLLDNEIRIMRSEVQRINHSATTLKERIKENTERIKVNKTLPYLVSNVVELLDLEDNTEEEGANVDLDAQKTKCAVIKTSTRATYFLPVVGLVDPDELKPGDLVGVNKDSYLILEKLPAEYDSRVKAMEVDERPTEQYSDIGGCDKQIQELIEAVVLPMTHKDRFVNLGIHPPKGVLMYGPPGTGKTMMARAVAAQTKSTFLKLAGPQLVQMFIGDGAKLVRDAFALAKEKAPAIIFIDELDAIGTKRFDSEKAGDREVQRTMLELLNQLDGFQPNDDIKVIAATNRIDVLDPALLRSGRLDRKIELPHPNEDARARIMQIHSRKMNVNKDVNFEELARCTDDFNGAQCKAVCVEAGMIALRRDATEILHEDFMDAILEVQAKKKASLNYYA

SEQ ID NO: 18247 - protein, 411 aa, Halobacterium sp. NRC-1
MSRSPSLPDRPTLDVDPESTPAERLNALQDHYVDIVAVNGELQAQLDDVEARREELREEVNRLQRENETLKTASLYLATVEDLPEDGSAVIKQHGNNQEVLTELSPRLADTLEVGDRVAINDSFSVQRVLDDETDARAQAMEVDESPSVTYADIGGLDDQLREVREAVEDPLVNPEKFDAVGVEPPSGVLLHGPPGTGKTMLAKAVANQTDASFIKMAGSELVRKFIGEGSRLVRDLFELAEQKDPAIIFIDEIDAVAAKRTDSKTSGDAEVQRTMMQLLSEMDGFDERGDIRIIAATNRFDMLDSAILRPGRFDRLIEVPNPNPDARERILEIHAGEMNVADSVDFSDLAADTAEFSGAQLASLATEAGMFAIRDDRDEVHRQDFDDAYEKLVAEGDTESSGPRYPSYIQ

SEQ ID NO: 18248 - protein, 407 aa, Halobacterium sp. NRC-1
MVMTDTVEDVELPYDDSASQQDKLEALEEQLSTLEEENEERDRLLDANAENNKYQQKLERLSHENKKLKQSPLFIATVQELTDEGAVIKQHGNNQEALTEVTDELRATLEPGSRVAVNNSLSVVRQLDDEADVRARVMEVDDSPDVGYEDIGGLDDQLREVRETVELPMKDPGLFETVGINPPSGVLLHGPPGTGKTLMAKAVASQTDASFIKMAGSELVHKFIGEGAKLVRDLFQVARDHEPAVVFIDEIDAIASKRTDSKTSGDAEVQRTMMQLLSEMDGFDERGDIRIIAATNRFDMLDRAILRPGRFDRLIEVPHPNVGGREKIFRIHTRAMNVADSVDFGELAADTGDLSGADVKAICTEAGMFAIRDDRTEVRMQDFQSAREKLDQDSEPAAATDVSRTFA

SEQ ID NO: 18249 - protein, 368 aa, Halobacterium sp. NRC-1
MRDRLLDANAENNKYQQKLERLSHENKKLKQSPLFIATVQELTDEGAVIKQHGNNQEALTEVTDELRATLEPGSRVAVNNSLSVVRQLDDEADVRARVMEVDDSPDVGYEDIGGLDDQLREVRETVELPMKDPGLFETVGINPPSGVLLHGPPGTGKTLMAKAVASQTDASFIKMAGSELVHKFIGEGAKLVRDLFQVARDHEPAVVFIDEIDAIASKRTDSKTSGDAEVQRTMMQLLSEMDGFDERGDIRIIAATNRFDMLDRAILRPGRFDRLIEVPHPNVGGREKIFRIHTRAMNVADSVDFGELAADTGDLSGADVKAICTEAGMFAIRDDRTEVRMQDFQSAREKLDQDSEPAAATDVSRTFA

SEQ ID NO: 18250 - protein, 217 aa, Amblyomma americanum
GTGKTLLARAVAHHTDCTFIRVSGSELVQKFIGEGSRMVRELFVMAREHAPSIIFMDEIDSIGSSRIDAGSGGDSEVQRTMLELLNQLDGFEATKNIKVIMATNRIDILDPALLRPGRIDRKIEFPPPNEEARLDILRIHSRKMNLTRGINLRRIAEMMPGASGAEVKGVCTEAGMYALRERRVHVTQEDFEMAVAKVMQKDAEKNMSIKKLVEVRS

SEQ ID NO: 18251 - protein, 801 aa, Drosophila erecta
MADSKGEDLATAILKRKDRPNRLIVEEAQNDDNSVVSLSQAKMDELQLFRGDTVILKGKRRKETVCIVLSDDTCSDEKIRMNRVVRNNLCVHLSDVVSVQSCPDVKYGKRVRILPIDDTTEGITGNLFEIYLKPYFLEAYRPIHMGDNFIVRAAMRPVEFKVVLTDPEPYCIVAPETVIFCDGDPIKREEEEESLNAVGYDDIGGCRKQLAQIKEMVELPLRHPSLFKAIGVKPPRGILMYGPPGTGKTLIARAVANETGAFFFLINGPEIMSKLAGESESNLRKAFEEAEKNSPAIIFIDEIDAIAPKRDKTHGEVERRIVSQLLTLMDGMKKSSHLIVMAATNRPNSIDPALRRFGRFDREIDIGIPDATGRLEVLRIHTKNMKLHDDVDLEQIAAESHGHVGADLASLCSEAALQQIREKMDLIDLDDDKIDAEVLASLAVTMENFRYAMTKSSPSALRETVVEVPNTTWTDIGGLESVKKELQELVQYPVEHPDKFLKFGMQPSRGVLFYGPPGCGKTLLAKAIANECQANFISVKGPELLTMWFGESEANVRDIFDKARSAAPCVLFFDELDSIAKARGGNVGDAGGAADRVINQILTEMDGMGAKKNVFIIGATNRPDIIDPAILRPGRLDQLIYIPLPDDKSREAILKANLRKSPLAKEVDLSYIAKVTQGFSGADLTEICQRACKLAIRQAIEAEIRREKERAENQNSAMDMDEDDPVPEITSAHFEEAMKFARRSVSDNDIRKYEMFAQTLQQSRGFGQNFRFPGQTGNTSGSGNNLPVNSPGDNGDDDLYS

SEQ ID NO: 18252 - protein, 428 aa, Drosophila melanogaster
MAQTLEDKSIWEDGEESLGEEVMRMSTDEIVSRTRLMDNEIKIMKSEVIRITHEIQAQNEKIKDNTEKIKVNKTLPYLVSNVIELLDVDPQEEEDDGSVTVLDNQRKGKCAVIKTSTRQAYFLPVIGLVDAEKLKPGDLVGVNKDSYLILETLPAEYDARVKAMEVDERPTEQYSDIGGLDKQIQELIEAVVLPMTHKEKFKNLGIHPPKGVLLYGPPGTGKTLLARACAAQTKSTFLKLAGPQLVQMFIGDGAKLVRDAFALAKEKAPAIIFIDELDAIGTKRFDSEKAGDREVQRTMLELLNQLDGFSSTADIKVIAATNRVDILDPALLRSGRLDRKIEFPHPNEEARARIMQIHSRKMNVSNDVNFEELSRSTDDFNGAQCKAVCVEAGMIALRRSANSVTHEDFMDAIMEVQAKKKANLNYYA

SEQ ID NO: 18253 - protein, 431 aa, Drosophila melanogaster
MVLDMAQTLEDKSIWEDGEESLGEKVMRMSTDEIVSRTRLMDNEIKIMKSEVIRITHEIQAQNEKIKDNTEKIKVNKTLPYLVSNVIELLDVDPQEEEDDGSVTVLDNQRKGKCAVIKTSTRQAYFLPVIGLVDAEKLKPGDLAGVNKDFYLILETLPAEYDARVKAMEVDERPTEQFSDIGGLDKQIQELIEAVVLPMTHKEKFKNLGIHPPKGVILYGPPGTGKTLLARACAAQTKSTFLKLAGPQLVQMFIGDGAKLVRDAFALAKEKAPAIIFIDELDAIGTKRFDSEKAGDREVQRTMLELLNQLNGFSSTADIKVIAATNRVDILPALLRSGRLDRKIEFPHPNEEARARIMQIHSRKMNVSNDVNFEELSRSTDDFNGAQCKAVCVEAGMIALRRSANSVTHEDFMDAIMEVQAKKKANLNYYA

SEQ ID NO: 18254 - protein, 450 aa, Plasmodium yoelii yoelii
MNVENIFENEQVNIEEIEVLSNSEIRTRISLIDTEIKILKNEHTRLKNEYKNIQEKIKDNVEKIHLNKMLPYLVANVVESLDLQDEEDEQEPKDEYDLYDNPNNNNNSYGNISKNAPEEGFRDIDDEKKGKCMVIKTSTRQTIFLPVPGLIEASELKPGDLVGVNKDSYLIIDKLPPEYDNRVKAMEVIEKPTEDYSDIGGLDKQIEDLVEAIVLPMLHKEKFEKIGIKPPKGVLMHGPPGTGKTLLARACASQTNATFLKLAGPQLVQMFIGDGAKMVRDAFNLAKEKAPAIIFIDELDAIGTKRFDSELSGDREVQRTMLELLNQLDGFSTDETVKVIAATNRPDTLDPALLRSGRLDRKIELPHPNEESRARILQIHSRKMNVHKDVNFEELARSTDDFNGAQLKAVCVEAGMIALRRGATEIDHEDFIEGITSVLSKKKSTLNYFT

SEQ ID NO: 18255 - protein, 194 aa, Oncorhynchus mykiss
  unsure (1)..(194): unsure at all Xaa locations
PYWXRAXAAQTKATFLKLAGPQLVQMFIGDGAKLVRDAFALAKEKAPSIIFIDELDAIGTKRFDSEKAGDREVQRTMLELLNQLDGFQPNMQVKVIAATNRVDILDPALLRSGRLDRKIEFPMPNEEARARIMQIHSRKMNVSPDVNYEELARCTDDFNGAQCKAVCVEAGMIALRRGATELNHEDYMEGILEV

SEQ ID NO: 18256 - protein, 423 aa, Xenopus laevis
MASIWDETEADGLGEDVLKMSTEEIIQRTRLLDSEIKIMKSEVLRVTHELQAMRDKIKENSEKIKVNKTLPYLVSNVIELLDVDPNDQEEDGANIDLDSQRKGKCAVIKTSTRQTYFLPVIGLVDAEKLKPGDLVGVNKDSYLILETLPTEYDSRVKAMEVDERPTEQYSDIGGLDKQIQELVEAIVLPMNHKEKFENLGIQPPKGVLMYGPPGTGKTLLARACAAQTKATFLKLAGPQLVQMFIGDGAKLVRDAFSLAKEKAPSIIFIDELDAIGTKRFDSEKAGDREVQRTMLELLNQLDGFQPTTQVKVIAATNRVDILDPALLRSGRLDRKIEFPMPNEEARARIMQIHSRKMNVSPDVNYEELARCTDDFNGAQCKAVCVEAGMIALRRGATELTHEDYMEGILEVQAKKKANLQYYA

SEQ ID NO: 18257 - protein, 404 aa, Xenopus laevis
MSTEEIIQRTRLLDSEIKIMKSEVLRVTHELQAMRDKIKENSEKIKVNKTLPYLVSNVIELLDVDPNDQEEDGANIDLDSQRKGKCAVIKTSTRQTYFLPVIGLVDAEKLKPGDLVGVNKDSYLILETLPTEYDSRVKAMEVDERPTEQYSDIGGLDKQIQELVEAIVLPMNHKEKFENLGIQPPKGVLMYGPPGTGKTLLARACAAQTKATFLKLAGPQLVQMFIGDGAKLVRDAFSLAKEKAPSIIFIDELDAIGNKRFDSEKAGDREVQRTMLELLNQLDGFQPTTQVKVIAATNRVDILDPALLRSGRLDRKIEFPMPNEEARARIMQIHSRKMNVSPDVNYEELARCTDDFNGAQCKAVCVEAGIIALRRGATELTHEDYMEGILEVQAKKKANLQYYA

SEQ ID NO: 18258 - protein, 405 aa, Xenopus laevis
MASIWEETEADGLGEEVLKMSTEEIIQRTRLLDSEIKIMKSEVLRVTHELQAMRDKIKENSEKIKVNKTLPYLVSNVIELLDVDPNDQEEDGANIDLDSQRKGKCAVIKTSTRQTYFLPVIGLVDAEKLKPGDLVGVNKDSYLILETLPTEYDSRVKAMEVDERPTEQYSDIGGLDKQIQELVEAIVLPMNHKEKFENLGIQPPKGVLMYGPPGTGKTLLARACAAQTKATFLKLAGPQLVQMFIGDGAKLVRDAFALAKEKAPSIIFIDELDAIGTKRFDSEKAGDREVQRTMLELLNQLDGFQPNMQVKVIAATNRVDILDPALLRSGRLDRKIEFPMPNEEARARIMQIHSRKMNVSPDVNYEELARCPTISMALSAKQFGVEAGMIALRRGATEFGLNFNV

SEQ ID NO: 18259 - protein, 439 aa, Homo sapiens
MNLLPNIESPVTRQEKMATVWDEAEQDGIGEEVLKMSTEEIIQRTRLLDSEIKIMKSEVLRVTHELQAMKDKIKENSEKIKVNKTLPYLVSNVIELLDVDPNDQEEDGANIDLDSQRKGKCAVIKTSTRQTYFLPVIGLVDAEKLKPGDLVGVNKDSYLILETLPTEYDSRVKAMEVDERPTEQYSDIGGLDKQIQELVEAIVLPMNHKEKFENLGIQPPKGVLMYGPPGTGKTLLARACAAQTKATFLKLAGPQLVQMFIGDGAKLVRDAFALAKEKAPSIIFIDELDAIGTKRFDSEKAGDREVQRTMLELLNQLDGFQPNTQVKVIAATNRVDILDPALLRSGRLDRKIEFPMPNEEARARIMQIHSRKMNVSPDVNYEELARCTDDFNGAQCKAVCVEAGMIALRRGATELTHEDYMEGILEVQAKKKANLQYYA

SEQ ID NO: 18260 - protein, 439 aa, Homo sapiens [sequence omitted]

SEQ ID NO: 18261 - protein, 404 aa, Homo sapiens
MSTEEIIQRTRLLDSEIKIMKSEVLRVTHELQAMKDKIKENSEKIKVNKTLPYLVSNVIELLDVDPNDQEEDGANIDLDSQRKGKCAVIKTSTRQTYFLPVIGLVDAEKLKPGDLVGVNKDSYLILETLPTEYDSRVKAMEVDERPTEQYSDIGGLDKQIQELVEAIVLPMNHKEKFENLGIQPPKGVLMYGPPGTGKTLLARACAAQTKATFLKLAGPQLVQMFIGDGAKLVRDAFALAKEKAPSIIFIDELDAIGTKRFDSEKAGDREVQRTMLELLNQLDGFQPNTQVKVIAATNRVDILDPALLRSGRLDRKIEFPMPNEEARARIMQIHSRKMNVSPDVNYEELARCTDDFNGAQCKAVCVEAGMIALARGATELTHEDYMEGILEVQAKKKANLQYYA

SEQ ID NO: 18262 - protein, 197 aa, Vitis riparia
MEAVDKEKLTAGTRVVLDMTTLTIMRALPREVDPVVYNMLHEDPGNVSYAAVGGLSDQIRELRESIELPLMNPELFIRVGIKPPKGVLLYGPPGTGKTLLARAIASNIDANFLKVVSSAIIDKYIGESARLIREMFGYARDHQPCIIFMDEIDAIGGRRFSEGTSVDREIQRTLMELLNQLDGFDQLGESQNDYGNQ

SEQ ID NO: 18263 - protein, 502 aa, Streptomyces coelicolor A3(2)
MTSSTETTATTPQVAVNDIGNEEAFLAAIDETIKYFNDGDIVDGVIVKVDRDEVLLDIGYKTEGVIPSRELSIKHDVDPNEVVAVGDEIEALVLQKEDKEGRLILSKKRAQYERAWGTIEKIKEEDGIVTGTVIEVVKGGLILDIGLRGFLPASLVEMRRVRDLQPYVGKELEAKIIELDKNRNNVVLSRRAWLEQTQSEVRQTFLTTLQKGQVRSGVVSSIVNFGAFVDLGGVDGLVHVSELSWKHIDHPSEVVEVGQEVTVEVLDVDMDRERVSLSLKATQEDPWQQFARTHQIGQVVPGKVTKLVPFGAFVRVDEGIEGLVHISELAERHVEIPEQVVQVNDEIFVKVIDIDLERRRISLSLKQANEAFGADPSTVEFDPTLYGMAASYDDQGNYIYPEGFDPETNDWLEGYETQREAWETQYAEAQTRFEQHQAQVIKSREADEKAAAEGVDTAGAAPAASGGGGGGSYSSEGGDNSGALASDEALAALREKLAGGQS

SEQ ID NO: 18264 - protein, 276 aa, Mus musculus
MDPGRQPESADDFDRLVLSSPNSSILWLQYMAFHLQATEIEKARAVAERALKTISFREEQEKLNVWVALLNLENMYGSQESLTKVFERAVQYNEPLKVFLHLADIYTKSEKYKEAGELYNRMLKRFRQEKAVWIKYGAFVLGRSQAGASHRVLQRALECLPAKEHVDVIVKFAQLEFQLGDVERAKAIFENTLSTYPKRTDVWSVYIDMTIKHGSQTAVRDIFERVIHLSLAPKRMKFFFKRYLDYEKQHGTEKDVQAVKAKALEYVEAKSSALED

SEQ ID NO: 18265 - protein, 229 aa, Mus musculus
MNSCSTHPLREEQEKLNVWVALLNLENMYGSQESLTKVFERAVQYNEPLKVFLHLADIYTKSEKYKEAGELYNRMLKRFRQEKAVWIKYGAFVLGRSQAGASHRVLQRALECLPAKEHVDVIVKFAQLEFQLGDVERAKAIFENTLSTYPKRTDVWSVYIDMTIKHGSQTAVRDIFERVIHLSLAPKRMKFFFKRYLDYEKQHGTEKDVQAVKAKALEYVEAKSSALED

SEQ ID NO: 18266 - protein, 768 aa, Mus musculus
  unsure (1)..(768): unsure at all Xaa locations
TPGSAIFXILRKHSTWAFKPGSTHKCXIIDYSQMDELALLFLRKSIIAAPFLRYHDIKIGTVVKGTVLAIKPFGILVKVGEQIKGLVPSMHLADIMMKNPEKKYSPGDEVKCRVLLCDPEAKKLIMTLKKTLVTSKLPFITWYEGAKLGLQTHGVIIRVKDYGCIVKFYNDLQGLVPKHELSNPAIPDPETVFYTGQVVKVAVLSCEPSKERMLLSFRLLSDSRPKDPGVESSQKKTGAVRIGQLVDVKVLEKTKTGLEVAILPHNTPAFLPTPHLSDHAANGPLLHHWLQTGDTLHRVLCLSQSERHILLCRKPALVSTVEGGQDPKSLSEIQPGMLLIGFVKCIKEYGVFVQFPSGLSGLSPKTIMSDKFVTTPSEHFVEGQTVVAKVTNVDESKQRMLLSLRLSDCSLGDSASTSFLLLCQCLEELQGIRSLMSNQDSVLIQTLADMTPGMVLDAVVHEVLEDGSVVFSSDPVPDLVLRASRYHRAGQEVEPGQKKKVVVLHVDMLKLEVHVSLHQDLVNRKPRKLRKSSRHQGIVQHLEESFAVASLVETGHLVAFSLISHLNDTFHFDSEKLRVGQGVCLTLKTTEPGVTGLILAVEGPVFKRTRMPVQRDSETVDDKGEEKEEEEEEKEEENLTVKSKKRHSLAIGDKVTGTIKAVKATHVVVTLADGFVGCFHASRILDDVPVGTSPTTTLKAGKKVTARVIGGRDVKTSKFLPISHPRFVLTILELSVRPSELKGSYSPEFLQPGGSTILERPXRRGVQX

SEQ ID NO: 18267 - protein, 1824 aa, Rattus norvegicus
MANLEESFPRGGTRKPHKSEKSSQPVVEQDNLFDISTEEGSVKRKKSQKGPAKTKKLKIEKRKSNKSMKEKFEILSLESLCEGMRILGCVKEVNELELVVSLPNGLQGFVQVTEICDAYTQKLNEQVAQEEPLEDLLRLPELFSPGMLVRCVVSSLDVTESGKKSVKLSVNPKRVNKVLSAEALRPGMLLTGTVSSLEDHGYLVDIGVDGTRAFLSLQKAQEYIRQKNKGAKFKVGQYLTCVVEELKSNGGVVSLSVEHSQVSSAFATEEQSWNLNNLLPGLVVRAQVQKVTQFGLQLNFLTFFTGLVDFMHLEPKKMGSYSSKQTVKACILCVHPRTRVVRLSLRPIFLHPGRPLTRISYQQLGTVLDDASVEGFFEKAGAIFRLRDGVLAYARLSHLSDSKKAFSAEAFKLGSTHRCRIIDYSQMDELALLSLRKSIIAAPFLRYQDIKTGTIVKGKVLALKPFGMLVKVGEQMRGLVPSMHLADIMMKNPEKKFNTGDEVKCRVLLCDPEAKKLIMTLKKTLVTSKLPAITCYEDAKPGLQTHGVIIRVKDYGCLVKFYNDVQGLVPKHELSAQHIPDPERVFYTGQVLKLLREMQTHVISHQVVKVAVLNCEPSKERMLLSFKLLSGSEPKDESVKNSKKKGSTVNTGQLVDVKVLEKTKNGLEVAILPHNIPAFLPTPHLSDHVANGPLLHHWLQTVEGGQDPKSLSEIQPGMLLIGFVKSIKDYGVFVQFPSGLSGLSPKTIMSDKFVTTPSEHFVEGQTVVAKVTNVDESKQRMLLSLRLSDCSLGDSASTSFLLLCQCLEELQGIRSLMSNQDSVLIQTLADMTPGMVLDAMVQEVLENGSVVFGGGPVPDLILRASRYHRAGQELEPGQKKKVVVLHVDALKLEVHVSLHQDLVNRKARKLRKNSRHQGIVQHLEESFAVASLVETGHLVAFSLISHLNDTFHFDSEKLRVGQGVCLTLKTTEPGVTDDGFIGCIHVSRILDDVPEGVSPTTTLKAGKKVTARVIGGRDVKTSKFLPISHPRFVLTILELSVRPSELKGDYRALNTHSVSPMEKIRQYQAGQTVTCFLKKYNVMKKWLEVDIEPDIRGRIPLLLTSLSFKVLKHPDKKFQIGQAIKATVVGPDIPRAFLCLSLIGPYKLEEGDVAMGRVLKVLPNKGLTVSFPFGRIGKVSVFHLSDSYSEEPLTDFCPQKIVRCYILSTAHRMLALSLRSSSCQTRSPGPAGWTLDYSLLGAETKSYAVGYCGVLGESSSGSGMRMTNKETKSKIEDPEVNSIEDIQAGQLLRGYVKSILPSSVVIGLGPSVMGLVKHSHVSQCVSREKELYDKCLPEGKLVTARVLCVNPKKNLIELSLLPSDTGKPDVFSASPEPPLPKQEGREGGTEKGLKGESKRSQRRREKNQKMREESGLYSQEKKEPRKSQRGGQSKRERQESESEQELVNKRPKKSGAPEDDDSGVEVYYREGEDEVEEPKVPPGGKQSKPTEVPRLQLSKGFIWDVGLDSLTPALPLRGESSDSEEDEQPHQAKVLYFLQKLLIPNSDALFCAGPESADDFDRLVLSSPNSSILWLQYMAFHLQATEIEKARAVAERALKTISFREEQEKLNVWVALLNLENMYGSQESLAKVFERAVQYNEPLKVFLHLADIYTKSEKFKEAGELYNRMLKRFRQEKAVWIKYGAFVLGRSQAGASHRVLQRALECLPTKEHVDVIVKFAQLEFQLGDVERAKAIFENTLTTYPKRTDVWSVYIDMTIKHGSQKEVRDIFERVIHLSLAPKRMKFFFKRYLDYEKQHGTEKDVQAVKAKALEYVEAKSSALEDQ

SEQ ID NO: 18268 - protein, 343 aa, Nostoc sp. PCC 7120
MVNQNLTATEIGFTHEDFAALLDKYDYHFSPGDVVPGTVFSIEPRGALIDIGAKTAAYIPIQEMSINRVDAPEEVLQSNETREFFILTDENEDGQLTLSIRRIEYMRAWERVRQLQAEDATVRSGVFATNRGGALVRIEGLRGFIPGSHISTRKPKEELVGEELPLKFLEVDEERNRLVLSHRRALVERKMNRLEVGEVVIGTVRGIKPYGAFIDIGGVSGLLHISEISHEHIDTPHSVFNVNDEVKVMIIDLDAERGRISLSTKQLEPEPGDMIKNRDLVYDKAEEMAAKYREQLLAKQQGITLPAEGAEDLIEEEIPPATEDAVAEEEIVAVEEIPAAIEE

SEQ ID NO: 18269 - protein, 568 aa, Rhodobacter sphaeroides
MKRITDCMCAKATMEEFEALLNESLQIDTPQEGSVVKGKVIAVEAGQAIIDVGYKMEGRVDLKEFADMSGSVDISVGDEVEVYLDRVENARGEAVISRDKAKREEAWDRLEKAYANETRVEGAIFGRVKGGFTVDLGGAVAFLPGSQVDVRPVRDAGPLMGMKQPFQILKMDRRRGNIVVSRRAILEESRAEQRAEVISNLFEGQTVDGVVKNITEYGAFVDLGGVDGLLHVTDMAWRRVNHPSEILSIGETVKVQVIKINKETHRISLGMKQLQSDPWDAVEKAYPIGSVHKGRVTNITDYGAFVELEAGVEGLVHVSEMSWTKKNVHPGKIVSTSQEVDVMVLEIDSAKRRVSLGLKQTMRNPWEVFAETHPVGTPIEGEVKNITEFGLFVGLEHDIDGMVHLSDLSWDQRGEEAIQNYRKGDVVKAVVTEVDTDKERISLSIKALGDDTFSEAIEGVKRGSVITVTVTAIEDGGIEVEYNSMKSFIRRSDLSRDRADQRPERFQVGDKVDVRVTNVDAKTRRLGLSIKAREIAEEKEAVEQYGSSDSGASLGDILGAALRNSDRG

SEQ ID NO: 18270 - protein, 561 aa, Rhodobacter sphaeroides
MCAKATMEEFEALLNESLQIDTPQEGSVVKGKVIAVEAGQAIIDVGYKMEGRVDLKEFADMSGSVDISVGDEVEVYLDRVENARGEAVISRDKAKREEAWDRLEKAYANETRVEGAIFGRVKGGFTVDLGGAVAFLPGSQVDVRPVRDAGPLMGMKQPFQILKMDRRRGNIVVSRRAILEESRAEQRAEVISNLFEGQTVDGVVKNITEYGAFVDLGGVDGLLHVTDMAWRRVNHPSEILSIGETVKVQVIKINKETHRISLGMKQLQSDPWDAVEKAYPIGSVHKGRVTNITDYGAFVELEAGVEGLVHVSEMSWTKKNVHPGKIVSTSQEVDVMVLEIDSAKRRVSLGLKQTMRNPWEVFAETHPVGTPIEGEVKNITEFGLFVGLEHDIDGMVHLSDLSWDQRGEEAIQNYRKGDVVKAVVTEVDTDKERISLSIKALGDDTFSEAIEGVKRGSVITVTVTAIEDGGIEVEYNSMKSFIRRSDLSRDRADQRPERFQVGDKVDVRVTNVDAKTRRLGLSIKAREIAEEKEAVEQYGSSDSGASLGDILGAALRNSDRG

SEQ ID NO: 18271 - protein, 584 aa, Rhodopseudomonas palustris
MRARRPSTELPATSASGEQMASTDTYNPTRDDFAAMLDESFAGGNLQESSVIKGKVVAIEKDMAVIDVGLKTEGRVPLREFAGPGRDNEIKVGDTVEVFLDRIENALGEAVLSRDKARREESWGKLEKAFQNNEKVFGVIFNQVKGGFTVDLDGAVAFLPRSQVDIRPIRDVAPLMNNSQPFQILKMDRRRGNIVVSRRTVLEETRAEQRQELVQNLEEGQVIDGVVKNITDYGAFVDLGGIDGLLHVTDIAWRRVNHPTEVLTIGQTVKVKIIKINHETHRISLGMKQLLDDPWQGIEAKYPLNARFTGRVTNITDYGAFVELEPGIEGLIHVSEMSWTKKNMHPGKIVSTSQEVEVQVLEVDSVKRRISLGLKQTMRNPWEVFVEKHPVGSTVEGEVKNKTEFGLFLGLDGDVDGMVHLSDLDWKLPGEQVIDNFKKGDMVKAVVLDVDVEKERISLGVKQLEGDPFAEPGDVKKGAVVTCEVLDVKESGIDVQIVGTDFNTFIKRSELARDRNDQRSDRFAVGEKVDARVIQFDKKARKVQVSIKALEVAEEKEAIAQYGSSDSGATLGDILGTALKQRDK

SEQ ID NO: 18272 - protein, 558 aa, Buchnera aphidicola str. APS (Acyrthosiphon pisum)
MNESFAQLFEESLKEIKTRPGSIIRGTIVSIEKDMVLVDAGLKSESAIPVEQFQNSQGLLDIQVGDQIDVALDAIEDGFGETLLSREKAKRHEAWLILEKAHEKSETVIGIINGKVKGGFTVELNDIRAFLPGSLVDVRPVRDTIHLEGKELEFKVIKLDQKRNNVVVSRRAVIESENSAERDQLLENLQEGMHVKGIVKNLTDYGAFVDLGGVDGLLHITDMAWKRVKHPSEIVNVGDEINIKILKFDRERTRVSLGLKQLGEDPWIAISKRYPEETKLSGRVTNLTDYGCFVEIEEGVEGLVHVSEMDWTNKNIHPSKVVTVNDVVEVMVLDIDEERRRISLGLKQCKINPWKEFSETHKKGVHVLGKIKSITDFGIFIGLNGGIDGLVHLSDISWTIPGEEAVVKYKKNDEISAVVLQVDAERERISLGIKQLEEDPFNTYIANHKKGAIITGIIKSLDKKNIIVKLPENLEGVIKLTEITRVYSETMINKLKIEDKILVKLSSFDRKNRIIYLTIHMIDEDEKKDLTAPSNNKTNDDSFSNVMTEAFKAAKNTE

SEQ ID NO: 18273 - protein, 573 aa, Rhodospirillum rubrum
MADSAQDLAFTAENFESLLNEQLGESGGLEGSVLTGTVIGVSGDFAVVDVGLKSEGRVPLKEFSRGGDDAEIKIGDTVDVFVERYEDKDGLIVLSRDKARREEAWNELEKAFNDNQRVRGLIHSRVKGGFTVDLSGAIAFLPGSQVDIRPVRDIGPLLGQPQVFQILKMDRARGNIVVSRRAVLEETRAEERSKLMETLREGEILEGVVKNITDYGAFVDLGGVDGLLHVTDISWKRINHPTEALSIGQTVKVQVIRFNAETQRISLGMKQLEADPWEGVAAKYPVGTKFVGRVTNITDYGAFVELEPGVEGLVHVSEMSWTKKNVHPGKIVSTSQEVEVMILDVDPDKRRISLGLKQTMANPWSEFLEGHPIGTEVEGEIKNITEFGLFIGLTGDIDGMIHLSDLDWNRSGDEAVKDYKKGDVVQAKVLDVDVEKERISLGVKQLGEDPYREATADLRKNQIVTCVITMVQENGIEVDVNGAIGFIRKSDLARERADQRPERFAVGEKVDAKVINMDKSNRRMTLSIKAREMDEEKQAMAEYGSADSGASLGDILGAALKQAQEKARTGDDE

SEQ ID NO: 18274 - protein, 399 aa, Chloroflexus aurantiacus
MEELNHAGNNTNEDIRQPDLNDLLDRGDQALMEQILRDPTHAYRNLKHGDTVDGRIMQINRDEILVDIGAKAEGVIPSREMQTLSEEDRAALKVGDTILVFVVQSEDKEGRAILSIDKARQEKSWRALQECYERGDIIYARVKNYNKGGLLVDLDGVRGFVPASQVSSISRVSETQKQSEMARLVNVELPLKVIEINRNRNRLILSERQALVETRESKKDELLTSLREGDVRDGVVSSVCDFGVFVDIGGADGLVHLSEISWSRVKHPGEVLKVGDKVKVAILNIDHERKRIALSIKRTQSEPWTRVAERYQLGQIVEGTITQLASFGAFARIEDGVEGLIHISEMGDERIQHPREVLSEGQVVQARIIRIDPARKRMGLSLRLHAEPTESSEKEENPD

SEQ ID NO: 18275 - protein, 359 aa, Chloroflexus aurantiacus
GVLREGLIMHIEESGVLVSIGTKREGIIPAQDLRQMGEDFINSLKVGDTVQVYVQEPENRDGDLILSLSMVQVAKDWEVAEQLFHDGGITRCKVIGFNKGGLLVQFNRIRGFVPSSQVAQLHGRTAADERQQALQKMVNQEIPLKVIEVDRERNRLVLSERAATQEWRKAQKHRLLTELQPGDVLVGRVNQLTNFGAFIDLGGADGLAHISELSWQRVNHPREVLQPGQEVKVVVVEIDRERERIGLSIRQLQNNPWETIDQRYTLGQLVTGPVTNVTPFGAFVQVEEAVEGLIHASELDADPQAQPRDILQPGQIVTARVISLDRQRQRMGLSLRRIGENENEPAPAPADEADQPAQA

SEQ ID NO: 18276 - protein, 554 aa, Chloroflexus aurantiacus
MTDLDDYEGDPYRDRDRLSELLTDQLEELARAIHSPDQLARARAASRLVTLDVDPELALPALHHRRAMVREVAAEAIGYSSKPLSPTVIDALLSAIDDPKPFVAAAAIRTLGRRQVALAHAQIAACLDDPEPPIVAAAITALARLGDHTLTVTLPEFLNRQHLIIRIAAAEAAGILRSVNAVPGLLRLLEDCIDAWHERQQHIPSRAASVAMQALARLQARAAIPLLVEIARYVVGLRTLAVRTLIQLQAIEAAPALLPLLNEEGRHLLNEVIRFFHMTGYRAAAPELRAFLERAVVRHRPLIKKVLNILVEWQDKEALPIISNLATNDQSAEVRAYAAQCAVLLQSQSASPASSFNNGIVPETVLSETYNERIRQRRQRLAGLTIGQIVNGSVLRVLRYGAVIELGGIEGFVHVGEIDWRWIGDARHALHPGQEIQAVITGIDEQRLRANLSMRRVHPDPWLAVAQQLNAGMQVQGTVAGITDFGIFIELLPGVQGLAHISQIPPDQQPLKQAFSLGRRVQTTILSIDHERRRIALSLYTKLQQKPCSVNAAR

SEQ ID NO: 18277 - protein, 580 aa, Chlamydophila pneumoniae CWL029
MPKQAEYTWGSKKILDNIECLTEDVAEFKDLLYTAHRITSSEEESDNEIQPGAILKGTVVDINKDFVVVDVGLKSEGVIPMSEFIDSSEGLVLGAEVEVYLDQAEDEEGKVVLSREKATRQRQWEYILAHCEEGSIVKGQITRKVKGGLIVDIGMEAFLPGSQIDNKKIKNLDDYVGKVCEFKILKINVERRNIVVSRRELLEAERISKKAELIEQISIGEYRKGVVKNITDFGVFLDLDGIDGLLHITDMTWKRIRHPSEMVELNQELEVIILSVDKEKGRVALGLKQKEHNPWEDIEKKYPPGKRVLGKIVKLLPYGAFIEIEEGIEGLIHISEMSWVKNIVDPSEVVNKGDEVEAIVLSIQKDEGKISLGLKQTERNPWDNIEEKYPIGLHVNAEIKNLTNYGAFVELEPGIEGLIHISDMSWIKKVSHPSELFKKGNSVEAVILSVDKESKKITLGVKQLSSNPWNEIEAMFPAGTVISGVVTKITAFGAFVELQNGIEGLIHVSELSDKPFAKIEDIISIGENVSAKVIKLDPDHKKVSLSVKEYLADNAYDQDSRTELDFKDSQGPKERKKKGK

SEQ ID NO: 18278 - protein, 367 aa, Thermoanaerobacter tengcongensis
MRMNDFLEGYVFRPIKAGDIVKGKVVKVLEDGVVADIGYKGEAFVPKEELSLNPEFDVLSNFHEGEELDLYIVMVENEEGSVVASKIKAEEKLGEEKIEKAYKNREIVKGEVVKVVKGGVIAYSLGKRLFIPASHLSTKRVENLEEYLGKILELLIIEYVPGKKIIASRKEVIKLEEEKMKAELLERLEEGDVIEGKVSRIIPKGAFVNLGGMDGFIPISELGHGRIKSPEEVIKPGHKVSAYVLKVDKKEGKITLSLKKLLPNPWENVKEKYHEGDILKAKITRIMPFGVFAELEPGVEGLVHKNNLEKSIKSYSPEDIITVEVLEVSSDRISLKEVPPFEGEDDIKQTEYQELTINLGEILKKKF

SEQ ID NO: 18279 - protein, 564 aa, Ralstonia metallidurans
MSDLQTNESFAALFEESIARSNMKAGEVISAEVVRIDHNFVVVNAGLKSEAFVPVEEFLNDQGELEVQAGDYVSVAIDALENGYGDTILSRDKAKRLASWLNLEKALEDGEIISGTVTGKVKGGLTVMVNGIRAFLPGSLVDVRPIKDTTPYEGKTLEFKVIKLDRKRNNVVLSRRAVVEATLGEERQKLMETLKEGAIVNGIVKNITDYGAFVDLGGIDGLLHITDLAWRRVRHPSEVLSVGQEITAKILKFDQEKNRVSLGVKQLGEDPWVGISRRYPQGTRLFGKVTNLTDYGAFVEIEAGIEGLVHVSEMDWTNKNVAPSKVVQLGDEVEVMVLDIDEDKRRISLGMKQCKANPWDDFSRNHKKGDKLTGQIKSITDFGVFIGLPGGIDGLVHLSDLSWQESGEEAVRKYKKGDEVEAVVLGIDVDKERISLGIKQLSGDPFNNFISANDKGSLVNGTIKAVDAKGAVVQLADDVEGYLRASEISADRVEDARNVLKEGEQITALVVNVDRKSRNINLSIKAKDSAEQQEAMQKFQADTGTAGTTNLGALLKAKLGQDNQ

SEQ ID NO: 18280 - protein, 561 aa, Neisseria meningitidis MC58
MSMENFAQLLEESFTLQEMNPGEVITAEVVAIDQNFVTVNAGLKSESLIDVAEFKNAQGEIEVKVGDFVTVTIESVENGFGETKLSREKAKRAADWIALEEAMENGDILSGIINGKVKGGLTVMISSIRAFLPGSLVDVRPVKDTSHFEGKEIEFKVIKLDKKRNNVVVSRRAVLEATLGEERKALLENLQEGSVIKGIVKNITDYGAFVDLGGIDGLLHITDLAWRRVKHPSEVLEVGQEVEAKVLKFDQEKQRVSLGMKQLGEDPWSGLTRRYPQGTRLFGKVSNLTDYGAFVEIEQGIEGLVHVSEMDWTNKNVHPSKVVQLGDEVEVMILEIDEGRRRISLGMKQCQANPWEEFAANHNKGDKISGAVKSITDFGVFVGLPGGIDGLVHLSDLSWTESGEEAVRKYKKGEEVEAVVLAIDVEKERISLGIKQLEGDPFGNFISVNDKGSLVKGSVKSVDAKGAVIALSDEVEGYLPASEFAADRVEDLTTKLKEGDEVEAVIVTVDRKNRSIKLSVKAKDAKESREALNSVNAAANANAGTTSLGDLLKAKLSGEQE

SEQ ID NO: 18281 - protein, 561 aa, Neisseria meningitidis Z2491
MSMENFAQLLEESFTLQEMNPGEVITAEVVAIDQNFVTVNAGLKSESLIDVAEFKNAQGEIEVKVGDFVTVTIESVENGFGETKLSREKAKRAADWIALEEAMENGNILSGIINGKVKGGLTVMISSIRAFLPGSLVDVRPVKDTSHFEGKEIEFKVIKLDKKRNNVVVSRRAVLEATLGEERKALLENLQEGSVIKGIVKNITDYGAFVDLGGIDGLLHITDLAWRRVKHPSEVLEVGQEVEAKVLKFDQEKQRVSLGMKQLGEDPWSGLTRRYPQDTRLFGKVSNLTDYGAFVEIEQGIEGLVHVSEMDWTNKNVHPSKVVQLGDEVEVMILEIDEGRRRISLGMKQCQANPWEEFAANHNKGDKISGAVKSITDFGVFVGLPGGIDGLVHLSDLSWTESGEEAVRKYKKGEEVEAVVLAIDVEKERISLGIKQLEGDPFGNFISVNDKGSLVKGSVKSVDAKGAVIALSDEVEGYLPASEFAADRVEDLTTKLKEGDEVEAVIVTVDRKNRSIKLSVKAKDAKESREALNSVNAAANANAGTTSLGDLLKAKLSGEQE

SEQ ID NO: 18282 - protein, 429 aa, Leuconostoc lactis
MAHALKRILYATWYPDILVNYTHSVNCRRTLDVMSETNNEFLAALESAADQIKVGDVVTGELLAIDNDNQAVVGLSTGEEGVVPAREYSDDRNINLADELKIGDTIEAVVISNVTSDKEGVAYLLSKKRLDARKAWENLSFAEGDTVDAKVINAVRGGLIVDVNGVRGFVPASMVAERFVSDLNQFKNKDIKAQVIEIDPANARLILSRKAVAAQELAAQLAEVFSKLSVGEVVEGTVARLTDFGAFVDLGGVDGLVHVSEISHDRVKNPADVLTKGDKVDVKILALDTEKGRISLSIKATQRGPWDEAADQIAAGSVLEGTVKRVKDFGAFVEILPGIEGLVHVSQISNKRIENPSEVLKSGDKVQVKVLDIKPAEERISLSMKALEEKPEREDRRGNDGSASRADIAAYKQQDDSAATLGDIFGDKL

SEQ ID NO: 18283 - protein, 629 aa, Deinococcus radiodurans
MQHRYQARPGAFQREGFRPGGQEFMEDNTQTPAVNGGTQPTTGDTSTQQAEGTQLDQETQSHQGALNAQTEQAQTEVSQGEQARQQEQAAKTQAQEERDYPEMTMEDILAAEAQEPQSVTRGDIVDGTVVFIGQEGIAVDIGAKVEGVIPLNQLGEEPVTLEQAQEMYKPGDAIEAYVVRVDLPNSQIVLSKKRAEQDKGWRVLERMQEADEAFEVEVLEKVRGGLVAQVEGIRAFLPASQVDTRRVNDLDPYVGKPLMVKLIELNRKRNRVIISHRAIMEAEKAKAREATVGQLEPGAVFEGEVVEITDFGVFVNLGGIDGLVHRSELTYGRFNHPRDVVKVGDKVQVQVIDVDEGRERINLSMKALTQDPWEGATERYHIGQRVKGKVTNLTNFGAFIELEPGLEGLVHVSEMSWTKRVRHPNEVMKEGDEVEAVILRIDPRERRISLGIRQTTDDPWSALPDRYPPGTPVKGKITGMTDFGVFMEIEEGIEGLIHISELDTQRVNNPADLFKKGDEIEAVILNIDPVEQRASLSRRRFLGGGPVPQRGEGGQRDYVSQGGGSRRDSTFGGGQRGGRGGRGGADYAYNAKDAQQGGKISTKLGDVYADLFAQFGLGNDKKDEGSSEE

SEQ ID NO: 18284 - protein, 577 aa, Burkholderia fungorum
MQILIFMSDLQTSTPNTESFAALFEESLTKQDMRAGEVISAEVVRVDHNFVVVNAGLKSEAYIPLEEFLNDAGEVEVQAGDFVSVAIDALENGYGDTILSRDKAKRLASWLSLEKALDNNELVTGTITGKVKGGMTVMVNGIRAFLPGSLVDTRPVKDTTPYEGKTLEFRVIKLDRKRNNVVLSRRAVIEATQGEERAKLLETLKEGAIVEGVVKNITDYGAFVDLGGIDGLLHITDIAWRRVRHPSEVLSVGQEVTAKILKFDQEKNRVSLGIKQLGDDPWEGISRRYPSGTRLFGKVTNITDYGAFVEVESGIEGLVHVSEMDWTNKNVAPSKVVQLGDEVEVMVLEIDEDRRRISLGMKQCKPNPWDDFSRNFKKGDKLQGAIKSITDFGVFIGLPGGIDGLVHLSDLSWSETGEEAVRKYKKGDEVEAIVLGIDVEKERISLGIKQLEGDPFSNFVAMNDKGSIVDGVVKTVDAKGAVVQLSAEVEGYLRASEIAQDRVEDARNVLKDGDKVNAMIINIDRKSRGINLSIKAKDSAEQQEAIRGLASSDSSSAATGTTNLGALLKAKLDGQNQ

SEQ ID NO: 18285 - protein, 408 aa, Lactococcus lactis subsp. lactis
MNEFETLLNSVEDVKVRDVVKGEILSVENGQATVAIVGTGVEGVLTLREITNDKDADINTFVKPGDVLDLLVIKQIVGKEAEGANVYLLSLKRLEARKAWTQLEGKEGEIVTVKVTKDVKGGLSVDYNGVRGFIPASMIDTYFVKDTKKFVGEEIEAKIIEVNASENRFILSRRAVVEAEAIEMRKEAFAQLQEGDIVEGTVSRVTNFGAFVDLGGIDGLVHVSELSHSRIKRPSDAVKPGDVVNVKILKLDPEAGRLSLSLKATQPGPWEQVEEKAPVGSTVEGTVKRLTDFGAFVELYPGVEGLVHVSQISWERVENPKDVLKVGQVVNVKVLDVKPAEERISLSIKALEEAPARPARNNDNDGEKRDRKPRAPRKAAKPSYDLPETQEGFSLADFLGEDFDINDL

SEQ ID NO: 18286 - protein, 382 aa, Bacillus cereus
MVEKMNEEVMDSKELQVGDVVTGSVTKVEEKQVLVNVGYKTDGVIPISELANVHIEKASDVVELDQILELKIIKLEENDLVLSKRAVDAEKAWIELQEKFTSGHVFDVTVKDIVNGGLVVDLGVRGFIPASLVEVHYVEDFTDYKGKTLAVKIVELDREKNRVILSHKAVVELELDSKKKEAISSLKEGDVVEGTVQRLTDFGAFVNVGGVDGLVHISQISHERVEQPSEVLEQGQKVKVKVLSVDADTQRISLSIKAAQPGPWENIAGEVKAGDIREGIVKRLVTFGAFVEILPGVEGLVHVSQIANRHVKNPNEVLEMGQEVKVKVLEVHVAEKRISLSIKEAFEENNVTEDYSQYEPNADSATFQLSDIIGEQLKKLKK

SEQ ID NO: 18287 - protein, 642 aa, Clostridium acetobutylicum
MRKVMLAEKAGFCFGVKRAVDMALLTQKEYNKKIYTLGELIHNNDVVDKLKDNNVYPIGIEDIDNLKENDVILIRSHGISEEIYKILLSKGLTVINATCPFVTKIQEKVKKYNELGYDIVIVGDKYHPEVIGINGWCDNKAIISKQGENLENITSESKVCIVSQTTEKLENWEKVLKEVKNRAIEVISFNTICNATSERQKIAKDLSNKVDFMVVIGGKQSSNTTKLYEICKSNCNETIHVENSGEIPENILKNKNCVIGVTAGASTPDWIIEEAISKMSENQISNETNNEMADAMKFIAENEGKIYVGASVTGEIIQVSEKEVFLNINYKRDGVIPKSEIDDDGKDLKELFTVGDKIVAKIIKLKDADNYVVLSVKELQREQGYKEIKEAFENKTTLNVVVKEDVKGGIIASYKGIRIFIPASHVELFHVDNLKEYIGKSFDVAIIEYSTKKRQTKIVASRRALLSKEKEKVEETVWNKLEEGQVVEGEVKRLTDFGAFVEIEGVDGLLHVSEISWGRVEKPADVLKIGDKIKVYVLSVDKENKKLSLSVKKLTENPWNNVEEKYPVGSVVLGKVIRFADFGAFVKLEPGVDGLVHISEISHKRIAKPSDALNVGEEIKAKILEVSSEEKKIGLSIREVEE

SEQ ID NO: 18288 - protein, 557 aa, Escherichia coli O157:H7 EDL933
MTESFAQLFEESLKEIETRPGSIVRGVVVAIDKDVVLVDAGLKSESAIPAEQFKNAQGELEIQVGDEVDVALDAVEDGFGETLLSREKAKRHEAWITLEKAYEDAETVTGVINGKVKGGFTVELNGIRAFLPGSLVDVRPVRDTLHLEGKELEFKVIKLDQKRNNVVVSRRAVIESENSAERDQLLENLQEGMEVKGIVKNLTDYGAFVDLGGVDGLLHITDMAWKRVKHPSEIVNVGDEITVKVLKFDRERTRVSLGLKQLGEDPWVAIAKRYPEGTKLTGRVTNLTDYGCFVEIEEGVEGLVHVSEMDWTNKNIHPSKVVNVGDVVEVMVLDIDEERRRISLGLKQCKANPWQQFAETHNKGDRVEGKIKSITDFGIFIGLDGGIDGLVHLSDISWNVAGEEAVREYKKGDEIAAVVLQVDAERERISLGVKQLAEDPFNNWVALNKKGAIVTGKVTAVDAKGATVELADGVEGYLRASEASRDRVEDATLVLSVGDEVEAKFTGVDRKNRAISLSVRAKDEADEKDAIATVNKQEDANFSNNAMAEAFKAAKGE

SEQ ID NO: 18289 - protein, 565 aa, Xylella fastidiosa Dixon
MFNRVNQMTESFAELFEASQANLAKLKPGAIVTGTVVDVRGDVVVINAGLKSEGIVPIEQFRNDAGEIDVGVGDQVKVALDAIENGFGETILSREKAKRSMVWDELEEALEKNETISGRINGKVKGGFTVDIKDVRAFLPASLVDVRPVRDPAYLEGKELEFKLIKLDRKRNNVVVSRRAVVESEHSEEREQLLDKLQEGAVLTGTVKNMTDYGAFVDLGGVDGLLHITDMAWKRVRHPCEVVNIGDEVEVRVLKFDRERNRVSLGLKQLGEDPWDNISRRYPANCRVFGKVSNVTDYGAFVEIEAGVEGLVHVSEMDWTNKNVNPSKVVQVGDEVEVMILDVDEERRRISLGMKQVAANPWETFALTHKKGDKVSGQVKSITDFGIFIGLDGGIDGLLHLSDISWNTTGEDIVRNFKKGDTLETVVLAVDPERERISLGVKQLEQDPFGQYMATHPKGSKVIGTVKEVDAKGALIELDEGIEGYVSARDIANERVDDATQYLKVGDSVEAKFIGMDRKGRTLQLSIKAKDDAEMREVLEEYQSSSGGTTKLGTLLREQLGNKPE

SEQ ID NO: 18290 - protein, 570 aa, Magnetococcus sp. MC-1
MTDDLILDDIADEDFEALLEESFSKGVGREGSVVTGTIIQREGDEFIIDVGLKSEGRLTIREFYDADGQLTIGVGDSVDVFVERCEDQNGLAVLSREKAKREEAWVLLEEAFNDGKTVDGRIMGKVKGGYTVDLGGLAAFLPGSQVDVRPVHDISRLQEETQPFDILKMDRRRGNIVVSRRTVIEKHRENARSALLETLHEGMVLDGIVKNITDYGAFVDLGGLDGLLHITDMSWKRVKHPSAVVNVGDTVTVQVIKFNSDTQRISLGMKQLLIDPWEGIGAKYPAGAKFSGHVTNITDYGSFVELEPGVEGLAHVSELTWTKKNIHPSKILEVNQIVEVMVLDVDADRRRISLGIKQCQENPWEAFATSHPVGAMVKGEIKNITEFGLFVGLEGDIDGLVHLSDITWDTNAGEEVLKDFQKGQEVEAMVLSLDPDKERISLGLKQAQPDAWGQWVDANPKGNVVMGKVKEVLSSGVLVQLADEVDGHIRKAEFSQDDREGTNLTLETEVECRVMQVDRQKRKISLSIKAMEVQQERDAIKEYASDSSSAATSSLGEALSQALEKANAAE

SEQ ID NO: 18291 - protein, 391 aa, Staphylococcus aureus subsp. aureus Mu50
MTEEFNESMINDIKEGDKVTGEVQQVEDKQVVVHINGGKFNGIIPISQLSTHHIDSPSEVVKEGDEVEAYVTKVEFDEENETGAYILSRRQLETEKSYSYLQEKLDNNEIIEAKVTEVVKGGLVVDVGQRGFVPASLISTDFIEDFSVFDGQTIRIKVEELDPENNRVILSRKAVEQEENDAKKDQLLQSLNEGDVIHGKVARLTQFGAFIDIGGVDGLVHVSELSHEHVQTPEEVVSIGQDVKVKIKSIDRDTERISLSIKDTLPTPFENIKGQFHENDVIEGVVVRLANFGAFVEIAPGVQGLVHISEIAHKHIGTPGEVLEPGQQVNVKILGIDEENERVSLSIKATLPNEDVVESDPSTTKAYLENEEEDNPTIGDMIGDKLKNLKL

SEQ ID NO: 18292 - protein, 863 aa, Treponema pallidum
MHGGGERERSFVHPRTRCVAVRARTVLQCRPMGTVIIALDGPAGSGKSSVCRLLASRLGAQCLNTGSFYRAFTLAALRRVSELAVQACSPSPDPDAAVGCAAVPHATNLDTSYAPLTAQKKVALFDEAYWVSFARTVALSYRAGVMYVGEENVESLLRSDEVESAVSYFAAMPAIRAIMTGKIRSAVCGARVVCEGRDLTTVVFVDADLKCYLDASIEARVARRWAQGTSRLSKQELEQRMRARDAHDRARTVGGLRCAPDALYVDTSCLTIEEVCERIAREAHRRALWGGERSVENQEGKGTPLVPRQLQERYSFEAPEPGSVRMGTVVQVNAGTVFVDIGGKSEGRVPVEEFEAPPKAGDGVRVYVERVTPYGPELSKTKADRLGLKVKLRDAERDGTPVEGRIVRLTEKKSGFEVDLGAGMMAFLPISQSDCQKVDAPESLIGLTSKFYIERISQSKQHRGNDNIVINRRRYLEERARQAREEFFNSVHIEDSVSGVVKSFTSFGAFIDLGGFDGLLHVNDMSWGHVARPREFVKKGQTIELKVIRLDQAEKRINLSLKHFQPDPWLEFENKFGVNDVVKGRVTKIADFGAFIELAEGIEGLAHISEFSWVKKTSKPSDMVKIGDEVECMILGYDIQAGRVSLGLKQVTANPWEEIEARYPVGARFTRRIVKVTNAGAFIEMEEGIDGFLHVDDLSWVKRTRPADHELEVGKEIECMVIECDPQARRIRLGVKQLSDNPWQVFANAYGVGSTVEGEVSSVTDFGIFVRVPGGVEGLVRKQHLVENRDGDPGEALRKYAVGDRVKAVIVDMNVKDRKVAFSVRDYQRKVQRDELSRYMSAPRGEDEGSFTLGDLMRQTSGK

SEQ ID NO: 18293 - protein, 576 aa, Pseudomonas putida KT2440
MSGMWLWASVSPESTGIKMSESFAELFEESLKTLNLQPGAIITGIVVDIDGDWVTVHAGLKSEGVIPLEQFYNEAGELTIKVGDEVHVALDAVEDGFGETKLSREKAKRAECWIVLEAAFAAEEVVKGVINGKVKGGFTVDVNGIRAFLPGSLVDVRPVRDTTHLEGKELEFKVIKLDQKRNNVVVSRRSVLEAENSAEREALLETLQEGQQVKGIVKNLTDYGAFVDLGGIDGLLHITDMAWKRIKHPSEIVNVGDEVDVRVLKFDRERNRVSLGLKQMGEDPWVAITARYPEGTRVQARVTNLTDYGCFAELEEGVEGLVHVSEMDWTNKNIHPSKVVQVGDEVEVMVLDIDEERRRISLGIKQCKSNPWEDFSGQFNKGDKITGTIKSITDFGIFIGLDGGIDGLVHLSDISWNETGEEAVRRFKKGDELETVILSVDPERERISLGIKQLEDDPFSNFVAVNDKGAIVKGIVKEVDAKGAIVTLADDIEATLKASEISRDRVEDARNVLKEGEEIEAKIISVDRKSRVISLSIKSKDDAEEREAIQSLKNAPEAAADTTMAALLREAMAKQN

SEQ ID NO: 18294 - protein, 401 aa, Streptococcus pyogenes M1 GAS
MNEFEDLLNSVSEVNPGDVVTAEVLTVDNGQANVVIEGTGVEGVLTLRELTNDRDADINDFVKAGDTVEVLVLRQVVGKDTDTVTFLVSKKRLEARKAWDKLVGREGEVVTVKGTRAVKGGLSVEFEGLRGFIPASMIDTRFVRNTEKFVGQEFDAKIKEVDAAENRFILSRREVIEEAAKEARAEVFSKISEGAVVTGTVARLTSFGAFIDLGGVDGLVHVTELSHERNVSPKSVVSVGEEVEVKVLSIDEEAGRVSLSLKATTPGPWDGVEQKLAQGDVVEGKVKRLTDFGAFVEVLPGIDGLVHISQISHKRVENPKDVLSVGQEVTVKVLEVNAADERVSLSIKALEERPAQAEGDNKEEKRQSRPRRPKRESRRDYELPETQTGFSMADLFGDIEL

SEQ ID NO: 18295 - protein, 569 aa, Xylella fastidiosa 9a5c
MAVLVFNRVNQMTESFAELFEASQANLAKLKPGAIVTGTVVDVRGDVVVINAGLKSEGIVPIEQFRNDAGEIDVGVGDQVKVALDAIENGFGETILSREKAKRSMVWDELEEALEKNETISGRINGKVKGGFTVDIKDVRAFLPASLVDVRPVRDPAYLEGKELEFKLIKLDRKRNNVVVSRRAVVESEHSEEREQLLDKLQEGAVLTGTVKNMTDYGAFVDLGGVDGLLHITDMAWKRVRHPCEVVNIGDEVEVRVLKFDRERNRVSLGLKQLGEDPWDNISRRYPANCRVFGKVSNVTDYGAFVEIEAGVEGLVHVSEMDWTNKNVNPSKVVQVGDEVEVMILDVDEERRRISLGMKQVAANPWETFALTHKKGDKVSGQVKSITDFGIFIGLDGGIDGLLHLSDISWNTTGEDIVRNFKKGDTLETVVLAVDPERERISLGVKQLEQDPFGQYMATHPKGSKVIGTVKEVDAKGALIELDEGIEGYVSARDIANERVDDATQYLKVGDSVEAKFIGMDRKGRTLQLSIKAKDDAEMREVLEEYQSSSGGTTKLGTLLREQLGNKPE

SEQ ID NO: 18296 - protein, 381 aa, Listeria innocua
MSEDLFDVEVRNFEEGDKVTGTVTSVEDKQVYVGIPDSKLDGVVPISELSNIHVETASDVVSVGDTLDLIVTKVEDDVLVLSKRKVDAEKASDDIKAKFESGEVFEAVVSDVVKGGLVVDLGVRAFVPASLVEDHFVEDFADYKGTTLTFKVVEFEPENNRVILSHRAVVENEKANQKQALLNEIKEGDVIEGTVQRLANFGAFVDIGGVDGLVHISQISYKHIATPQEALEEGQKVKVKVIGIDPENERISLSIKATLPGPWDGISEKAPVGSVLEGKVVRLVTFGAFVEIFPGVEGLVHISQISHEHIGTPQEVLSEGQTVEVKVLEVNEDDKRLSLSIKDLQDAPVEEADYELPEESTGFQMSDLIGDKLKGLQNDDK

SEQ ID NO: 18297 - protein, 489 aa, Corynebacterium ammoniagenes
MPTSNTPQVAINDIGTAEDFLAAVDATIKYFNDGDIVEGTVVKVDHDEVLLDIGYKTEGVIPSRELSIKHDVDPDEVVEVGDQIDALVLTKEDKEGRLILSKKRAQYERAWGAIEELQAKEEPVTGTVIEVVKGGLIIDIGLRGFLPASLVEMRRVRDLEPYIGQELEAKIIELDKQRNNVVLSRRAFLEQTQSEVRSEFLHQLQKGQVRKGVVSSIVNFGAFVDLGGVDGLVHVSELSWKHIDHPSEVVTVGDEVTVEVLDVDLDRERVSLSLKATQEDPWRVFARTHAVGQIVPGKVTKLVPFGAFVRVEEGIEGLVHISELAQRHVEVPDQVVNVGEDVMVKVIDIDLERRRISLSVKQADEDYTEEFDPSKYGMADSYDEQGNYVFPEGFDSETNEWKEGFDEQRQAWEARYAESERRFQLHTAQIERHRAAAAEAAETEAASANYSSESNDAAPASEAPAESAGSLASDEQLAALREKLAGGEN

SEQ ID NO: 18298 - protein, 381 aa, Listeria monocytogenes EGD-e
MSEDLFDVEVRNFEEGDKVTGTVTSVEDKQVYVGIPGSKLDGVVPISELSNIHVETASDVVSVGDTLDLIVTKVEDDILVLSKRKVDAEKASDDIKAKFESGEVFEAVVSDVVKGGLVVDLGVRAFVPASLVEDHFVEDFADYKGTTLTFKVVEFEPENNRVILSHRAVVETEKASQKQALLSEIKEGDVIEGTVQRLANFGAFVDIGGVDGLVHISQISYKHIATPQEVLEEGQKVTVKVIGIDPENERISLSIKATLPGPWDGITEKAQVGSVLEGKVVRLVTFGAFVEIFPGVEGLVHISQISHEHIGTPQEVLSEGQTVEVKVLEVNEADKRLSLSIKELQDAPVEEADYELPEENTGFQMSDLIGDKLKGLQNDDK

SEQ ID NO: 18299 - protein, 400 aa, Streptococcus pneumoniae TIGR4
MNEFEDLLNSVSQVETGDVVSAEVLTVDATQANVAISGTGVEGVLTLRELTNDRDADINDFVKVGEVLDVLVLRQVVGKDTDTVTYLVSKKRLEARKAWDKLVGREEEVVTVKGTRAVKGGLSVEFEGVRGFIPASMLDTRFVRNAERFVGQEFDTKIKEVNAKENRFILSRREVVEAATAAARAEVFGKLAVGDVVTGKVARITSFGAFVDLGGVDGLVHLTELSHERNVSPKSVVTVGEEIEVKILDLNEEEGRVSLSLKATVPGPWDGVEQKLAKGDVVEGTVKRLTDFGAFVEVLPGIDGLVHVSQISHKRIENPKEALKVGQEVQVKVLEVNADAERVSLSIKALEERPAQEEGQKEEKRAARPRRPRRQEKRDFELPETQTGFSMADLFGDIEL

SEQ ID NO: 18300 - protein, 400 aa, Streptococcus pneumoniae R6
MNEFEDLLNSVSQVETGDVVSAEVLTVDATQANVAISGTGVEGVLTLRELTNDRDADINDFVKVGEVLDVLVLRQVVGKDTDTVTYLVSKKRLEARKAWDKLVGREEEVVTVKGTRAVKGGLSVEFEGVRGFIPASMLDTRFVRNAERFVGQEFDTKIKEVNAKENRFILSRREVVEAATAAARAEVFGKLAVGDVVTGKVARITSFGAFIDLGGVDGLVHLTELSHERNVSPKSVVTVGEEIEVKILDLNEEEGRVSLSLKATVPGPWDGVEQKLAKGDVVEGTVKRLTDFGAFVEVLPGIDGLVHVSQISHKRIENPKEALKVGQEVQVKVLEVNADAERVSLSIKALEERPAQEEGQKEEKRAARPRRPRRQEKRDFELPETQTGFSMADLFGDIEL

SEQ ID NO: 18301 - protein, 482 aa, Mycobacterium leprae
MSIPAVPSPQIAVNDVGSSEDFLAAIDKTIKYFNDGDIVEGTIVKVDRDEVLLDIGYKTEGVIPARELSIKHDVDPNEVVSVGDEVEALVLTKEDKEGRLILSKKRAQYERAWGTIEALKEKDEAVKGIVIEVVKGGLILDIGLRGFLPASLVEMRRVRDLQPYIGKEIEAKIIELDKNRNNVVLSRRAWLEQTQSEVRSEFLNQLQKGAIRKGVVSSIVNFGCVCRSGGVDGLVHVSELSWKHIDHPSEVVQVGNEVTVEVLDVDMDRERVSLSLKATQEDPWRHFARTHAIGQIVPGKVTKLVPFGAFVRVEEGIEGLVHISELAERHVEVPDQVVAVGDDAMVKVIDIDLERRRISLSLKADQRGLHRGVRPGKVRYGPTATTSRATTSSLEGFDPDSNEWLEGFDTQRAEWEARYAEAERRYKMHTIQMEKFAATEEAGHGSSEQPPASSTPSAKATGGSLASDAQLAALREKLAGSA

SEQ ID NO: 18302 - protein, 481 aa, Mycobacterium leprae
MSIPAVPSPQIAVNDVGSSEDFLAAIDKTIKYFNDGDIVEGTIVKVDRDEVLLDIGYKTEGVIPARELSIKHDVDPNEVVSVGDEVEALVLTKEDKEGRLILSKKRAQYERAWGTIEALKEKDEAVKGIVIEVVKGGLILDIGLRGFLPASLVEMRRVRDLQPYIGKEIEAKIIELDKNRNNVVLSRRAWLEQTQSEVRSEFLNQLQKGAIRKGVVSSIVNFGAFVDLGGVDGLVHVSELSWKHIDHPSEVVQVGNEVTVEVLDVDMDRERVSLSLKATQEDPWRHFARTHAIGQIVPGKVTKLVPFGAFVRVEEGIEGLVHISELAERHVEVPDQVVAVGDDAMVKVIDIDLERRRISLSLKQANEDYIEEFDPAKYGMADSYDEQGNYIFPEGFDPDSNEWLEGFDTQRAEWEARYAEAERRYKMHTIQMEKFAATEEAGHGSSEQPPASSTPSAKATGGSLASDAQLAALREKLAGSA

SEQ ID NO: 18303 - protein, 1330 aa, Anopheles gambiae str. PEST
SQQNTCVFCVRASENYWIKTKLNMVYVEPALPRGPSRPVVKHNRVKKHKTPKSHFGAKTLPAEQKAQRLRPKERWQAMQSEKEMEEEQLQQCFKGSNLVFGKVRAGMLLLGCVKQIRATELLISLPGRLNGIVQITNISEAYSKRLEHMYNTRSTDCPTLGDLYTVGDLVYMKVLRKVKDRRQVYLTLDPSKLHSDFKPAQLVEGLVLAATITVKEDHGYTMDIGVHNVRAFLPQEHLNGNRDDEGRNLFCSIHSVTQSGSGAVVVLKAFRPDEPRVLNVEEVAVETIVPGCQLTFTVGEPVEYGLRGMLFEDSITAYVNRNMLTKVTSNPEKYSMFKTLPATLLYVMPVTNEVFVSLRPYPNNRADCGQAHMVGSIVEKARVKSTDGGGVWLEFGNKCRALLPMGVIRKTAEAAAGGNVDESVMLSNFQVGTTHRVGVVYFDPLESTYIVSNSPDHAETMIQDSFDVEIGKTYKCRVLQLLSTGALVGVGRVTGIVKYEFFNRDSKLKVRDVVPMRAVCRGLDNDFLMFTNQPMLLNEKAPILMHWSQLDRNRKDQKFVGAVSQIQKSYVWVRFFNNLSGRINASVTVAGQDEAEVAKLRQGSIRLFTVLDFDEGANIIDLALKQTSDQPVRTAQLARVTVSYVHATGAEVLTENGEQGTIPAECFSEFGEHNSLYMRLLRGGETLTAVKTNPETYSARLTQYYQENPISLQSVRAGMVLKGSCVTVNGKPYVTPLLSDFHGRFPVSIPPKWHKIEDGSIIKLRVAHLNPTPTKGLLPAMKVETEMVEVCEDIFTEIGSFMGEYLQDVNRLIERFRELDHTFAHYSIGDRVECVIESTVAECNKMAVEVQAVGKRAKYPTKGIVTTVLPERPASSYKVGQQVPGRIVWIDVERKLVHVCVDEPLFSRIVLQQEDEEEPDMDVQRQCWVLFSNHYLNVCCVQSDPPCPLLDGCSDIVFHQLDGTEDTQTTGKKAVKRRNQESTTAHGKGLPGATNFWDTTPVFKRAQSDSSDDDDSDAEDQAETVPKKRATASERFEAMKQEEARLRKIEEELADPSLDPHTPDQFDRLVLAQPNNSMLWIRYMAFHMESAELDKARAVGRKALKAIHFRENAERLNVWIALLNLELRYETIDSFKEVLQEAIQYNDAFKVYTRALDILIDCQKPEEVQKILEQLLKKFRKQNDMWYLVADAWYRIGQGSKVKPLLSQALKSLPTRDHIPLILKFAFLHNRNENRDEAHLLFEQILTSYPKRTDIWSQYVDMLVKDNLVENARQILERAIMQRLPMKNMKTLYTKFVNFEEKHGDRESVRRVKHLAAEYVQAQLNSAGVK

SEQ ID NO: 18304 - protein, 566 aa, Agrobacterium tumefaciens str. C58 (U. Washington)
MSVSTPTRDDFAALLEESFASNDLAEGYVAKGIVTAIEKDVAIVDVGLKVEGRVPLKEFGAKSKDGTLKVGDEVEVYVERIENALGEAVLSREKARREESWVKLEAKFEAGERVEGVIFNQVKGGFTVDLDGAVAFLPRSQVDIRPIRDVTPLMHNPQPFEILKMDKRRGNIVVSRRTVLEESRAEQRSEIVQNLEEGQVVDGVVKNITDYGAFVDLGGIDGLLHVTDMAWRRVNHPSEILNIGQQVKVQIIRINQETHRISLGMKQLESDPWDGISAKYPVGKKISGTVTNITDYGAFVELEPGIEGLIHISEMSWTKKNVHPGKILSTSQEVDVVVLEVDPSKRRISLGLKQTLENPWQAFAFSHPAGTEVEGEVKNKTEFGLFIGLEGDVDGMVHLSDLDWNRPGEQVIEEFNKGDVVKAVVLDVDVEKERISLGIKQLGKDAVGEAATSGDLRKNAVVSCEVIAVNDGGVEVKLVNHEDITSFIRRNDLARDRDDQRPERFAVGQVFDARVVNFSKKDRKVMLSIKALEIAEEKEAVAQFGSSDSGASLGDILGAALKNRGE

SEQ ID NO: 18305 - protein, 572 aa, Agrobacterium tumefaciens str. C58 (Cereon)
MHSGDFMSVSTPTRDDFAALLEESFASNDLAEGYVAKGIVTAIEKDVAIVDVGLKVEGRVPLKEFGAKSKDGTLKVGDEVEVYVERIENALGEAVLSREKARREESWVKLEAKFEAGERVEGVIFNQVKGGFTVDLDGAVAFLPRSQVDIRPIRDVTPLMHNPQPFEILKMDKRRGNIVVSRRTVLEESRAEQRSEIVQNLEEGQVVDGVVKNITDYGAFVDLGGIDGLLHVTDMAWRRVNHPSEILNIGQQVKVQIIRINQETHRISLGMKQLESDPWDGISAKYPVGKKISGTVTNITDYGAFVELEPGIEGLIHISEMSWTKKNVHPGKILSTSQEVDVVVLEVDPSKRRISLGLKQTLENPWQAFAFSHPAGTEVEGEVKNKTEFGLFIGLEGDVDGMVHLSDLDWNRPGEQVIEEFNKGDVVKAVVLDVDVEKERISLGIKQLGKDAVGEAATSGDLRKNAVVSCEVIAVNDGGVEVKLVNHEDITSFIRRNDLARDRDDQRPERFAVGQVFDARVVNFSKKDRKVMLSIKALEIAEEKEAVAQFGSSDSGASLGDILGAALKNRGE

SEQ ID NO: 18306 - protein, 558 aa, Xylella fastidiosa Temecula1
MTESFAELFEASQANLAKLKPGAIVTGTVVDVRGDVVVINAGLKSEGIVPIEQFRNDAGEIDVGVGDQVKVALDAIENGFGETILSREKAKRSMVWDELEEALEKNETISGRINGKVKGGFTVDIKDVRAFLPASLVDVRPVRDPAYLEGKELEFKLIKLDRKRNNVVVSRRAVVESEHSEEREQLLDKLQEGAVLTGTVKNMTDYGAFVDLGGVDGLLHITDMAWKRVRHPCEVVNIGDEVEVRVLKFDRERNRVSLGLKQLGEDPWDNISRRYPANCRVFGKVSNVTDYGAFVEIEAGVEGLVHVSEMDWTNKNVNPSKVVQVGDEVEVMILDVDEERRRISLGMKQVAANPWETFALTHKKGDKVSGQVKSITDFGIFIGLDGGIDGLLHLSDISWNTTGEDIVRNFKKGDTLETVVLAVDPERERISLGVKQLEQDPFGQYMATHPKGSKVIGTVKEVDAKGALIELDEGIEGYVSARDIANERVDDATQYLKVGDSVEAKFIGMDRKGRTLQLSIKAKDDAEMREVLEEYQSSSGGTTKLGTLLREQLGNKPE

SEQ ID NO: 18307 - protein, 1842 aa, Giardia lamblia ATCC 50803
MSSDYQLLTTARPAASQLHRGTMVLAIVANVRPEYMLVNLPFGILGNVSDVNAIDSERVRPLTELYKAGDYVLGVVVGQDATGKPILGLKPSLFHQRDFSRKSLVVCQIETVEDHGWIAEVKDARETSCFLSKSRVPEELHSRLKPGLVVQCAVVDLNASGTLLQVSLQKLDLTAAAAFDGYNQVVPGQIIKAEVVHNASTHSVVRLISTGGKSSQKGMRSAKLYGYVLSEHFRRPADPSSGYATYTGFQGKFKVIYLDLNPQSTDVDGPLIYLSNMDSVLDHAAPTQIYSVGQVLQEGKLTMVQTVKGAVYASLDSDLSSFVYIPVESTHHGAAAEAQIGEPINLKTKIIGYRQFDDLYIGTANPGDIVSSTEAEYHSGMIIDKKIPVKVTKVLDTGVHVSIEVSPARSLHGMINQPHYGSHLKGHNIPVGLNINRHHGTLRVIAYDEPRQVYYLSLANLGSDPLFSSKDTVKPGMVSRGVVTSFIDNAKCSAVIQFTNLYNGICANANGMEIGQVYEFICVRNDEKYTTVDRLSESQRGDDAAKLRSSYADGLMRVLNYRHFIKFELPYSFTVDGDCSNKIPLGTILSRENATVEIRSIALGGFKLGVKLSGAQEESIHVFLPHGCIAFPGKSAELVRLYLGANDSEEEQDVFSILPCIRLLTILSTRDRVSVYIGASSSFLANKEHVLPAETDVMTRGQTYQAVVTHMSVSGLTARLSANTEIFYPDFGNHELDNICPLTLIQVRVVKVGERRANRDRKVDVSISGYCHNGVFKAPLGAQKIESMVDSSIATRYTRLVLPQTQQLNDGISSAGDCQNGSILKGSYLFSNTSPDAYCAIYDLGSGIVGRMTLEAVLLSRLVAKLVETSTKPAQLSSLITAFSEEIIKFVAGGELTLTAYFEKHGHHSASDSIVDVCVRSLVTLHGDQELSTICADTDSAAGEQSCEIVDLYPASLSMAGLRALRSALSKSGCTSIGMVRYVTEHYMLLRDLFDNCLVFVHAVDVFETPAAVRPLRELYKEGSLITITSFTSKEVPNPVIVAGINRIGTLDPLEENMLSSPVGLCSIAMTKPTNTLTGLQHTICQVLPSGALRLNGHTSMCFLTATSPVEFCSRRGLFLAPVLSVTRLFNDPQDFSNHADAFVHDILGYHKCIRIGPDNISLRPIDFQVSSMSRHSFISVGQERLFLPQTAEDLSIHDTYVGFIRPYSKIGAGLQVVVSESITIHVKMKEISEEFISPEEVQEKYPSNTMVRVRYLDTSTFNDMPQYNGTIKPTVVNNPNIKHPSVIIKAGACLIGRVDNVMDDRGVFITVEDCYPLTRVRARISDSIDVSGHGPMNSEKIVLNNANRCSNSYYKGQRLYFIVLEPTAKGASVGLKAAHFLAAGIDITNLPVLKQDRTRRNKQDKSRAIHHEELLNQATTSSEAQGLKPPAVEADQSRFEPVRKRTRSYDLFAGELDDDHNQSQGSEKQEEDDKQEENTESDSSETEGPVINFLNFGTLKRPVADDSSYSDDYQEANDDILNNGVREYEVRQAPKMTAEQKRVKEEKDIREREEELLTNAAPQSEADFERLLAGNEQSSYLWIRYVAFHVDRASIDKAEAVLDRAMTKICPDKEVDYRNLWLAKIALKEKFHGPEAGMNELYEGIRRNDPNELLRIYCSGKLDQGDWESAARGYDVLFSKKERKRIYENWRDYFLFLYNVKGHDIPANVVEGNRIKARGQELQKASSCLSQDVLLRLLCDSARAEYKINDVTRGRAAFDKLVGTMPQRMDIWGQYLDMEEKHVAPINPQDVRSLYERCCALRLSLKKMSYVLKRFYNFEKKFGTATTQERVKEIARAYANS

SEQ ID NO: 18308 - protein, 565 aa, Magnetospirillum magnetotacticum
MTNTATAQAVDDFAALLDETLGVGGSFEGSVITGTIVEIDGDVAVIDVGLKSEGRVPLKEFATAGRATDIKAGDQVDVFVERYEDRNGEVVLSREKAKREEAWTLLEKSFEAQQRVTGVIFGRVKGGFTVDLSGAVAFLPGSQVDIRPVRDITPLLGTPQPFQILKMDRSRGNIVVSRRAVLEETRAEQRSELIENLKEGQILEGVVKNITDYGAFVDLGGVDGLLHVTDIAWKRINHPSEALHIGQTVKVQVIRFNSETQRISLGIKQLDADPWEGVEAKYPVDAKFSGRVTNITDYGAFVELEPGVEGLVHVSEMSWTKKNVHPGKIVSTSQEVEVMVLDVDPQKRRISLGLKQTMNNPWEGFLDRFPQGTLVEGEIKNITEFGLFIGLPGDIDGMVHLSDLDWATPGEQAIQNFKKGDVVKAKVLDVDVEKERISLGIKQLGADPYQDAVASIKKGDVVTCTVTQVTENGLEVTVEGMTGFIRKSELSRERSEQRPERFAVGEKLDAKITAFEKAARKITLSVKAREVEEEKQAMAEYGSSDSGASLGDILGAAMRKAQEKE

SEQ ID NO: 18309 - protein, 384 aa, Leptospira interrogans serovar lai str. 56601
MKESEKELFEKMLDASFKKKKAMEAGTKITAIVNSAKKDFVFVTAKEGKLPGIISSEEFMESGLPNPGEELEAYFLKEDHGDVHFTTCLSGDLLNKDLLEIAKKAEIPVLGQFVSEGDSGADVKIGEFSGFCPFSQIDPELKKSGLIGKRLKFLIQDFGNRNKLVVSQKKISDRAKEAKLGVLKQELKEGMFVTCKVKTIQNFGLIVEMDGGVTALVPISEATYKKNPELEKEFQVGQTLRARVLRIDWENQKFALTVKDFLKDPWAQTVPFKEGDIVKGTIDSLKPFGVFVKLDDHFNGLVPGRETGISNRVPLSQSFKPGEVVDVFVMEVNPEKKQISLSIQKAKEIQERMDYSSYLSVDTSGSTSSFGAILQNSLNKNKKK

SEQ ID NO: 18310 - protein, 560 aa, Leptospira interrogans serovar lai str. 56601
MTNKEEKSTFAEVFKQWEQSIHEEPELRKDQVVEGKIVSVDNDYVYVAIEGLKQEGRIPRGDFDEAPERGNYVSAIVKRKESQDSGCILSKKEADQRKGWEIVKEAFKNGYQVTGRLVNEIKGKGYIVNVEGVELFLPASQLSYKFKEGETFKNKELEFKIIELNDRTRSGVVSRKKLLDEVNEEKWDALLLKLKVGDKVKAIVSKIASFGVFCEVDGVTGLLRQRDISYKKYAPFKQYFQVGQEVELVILELDKENNKLALGLKQLYEDPWVWAERSLEKEMVIRGTVTSLTKFGAFVELKEGLEGLIHTSELAWSKKPPQPKDILKKGQEVEALVLDIDFKNRRLSLGLKQLQPNPWDQLGPEIRRGNVLEGVITGITKYGAFVEVENGIEGLIHISDITWDEKVANPTSQLKKGDTVRYMILDVNLDAQRISCGLKQLMENPYEIFRNEHPVGTIVEGKVKSIKEFGIFVEVAPGIEGLVHISEVPNGKEVNLTELYKSDEIVKTAVIKVDVKNKKISLSIKDFDKALEREEMSKYLKTSDAPSRESLGSFLNTSLR

SEQ ID NO: 18311 - protein, 827 aa, Fusobacterium nucleatum subsp. nucleatum ATCC 25586
MEIIRAKHMGFCFGVLEAINVCNSLVEEKGRKYILGMLVHNKQVVEDMERKGFKLVTEDELLNDMDELKEDDIVVIRAHGTSKSVHEKLKERKVKVFDATCIFVNKIRQEIEIANENGYSILFMGDKNHPEVKGVISFADDIQIFESFEEAKKLKIDLDKTYLLSTQTTLNKKKFEEIKKYFKENYKNVVIFDKICGATAVRQKAVEDLAVKVEVMIIVGDTKSSNTKKLYEISKKLNDNSYLVENEEQLDLSIFRGKEVVGITAGASTPEETIMNIEKKVRGIYKMSNVNENQNEFSLMLEEFLPNQEKRVEGVIESMDQNFSYLDVPGERTAVRVRTDELKDYKVGDTVEVLITGLSEEDDDQEYITASRRKIEVEKNWEKIEDSFKNKTILDAKVTKKIKGGYLVEAFLYPGFLPNSLSEISDSEEKVNGKKIQVIVKDIKMDPKDKKNRKITYSVKDIRLAEQEKEFAGLAVGQIVDCVVTEVLDFGLAVDINTLKGFIHISEVSWKRLDKLSDNYKVGDKIKAVVVSLDEAKRNVKLSIKKLEEDPWATVANEFKVDDEIEGIVTKVLPYGAFVEIKPGVEGLVHISDFSWTKKKVNVADYVKEREKIKVRITDLHPEDRKLKLGIKQLVANPWETAEKDFAIDTVIKGKVVEVKPFGIFVEIADGIDAFVHSSDYNWVGEEIPKFEIGNEVELKITELDLNNKKIKGSLKALRKSPWEHAMEEYKVGTTVEKKIKTVADFGLFIELIKGIDGFIPTQFASKEFIKNIRDKFSEGDVVKAQVVEVNKETQKIKLSIKKIEIEEEKREEREQIEKYSTSSSEE

SEQ ID NO: 18312 - protein, 559 aa, Xanthomonas campestris pv. campestris str. ATCC 33913
MTESFAELFEASQANLAKLKPGSIVTGTVVEVRGDVVVINAGLKSEGIVPIEQFRNDAGEIDVGVGDQVKVALDSIENGFGETVLSREKAKRAMVWDELEEALEKNETITGRISGKVKGGFTVDIKDVRAFLPGSLVDVRPVRDPAYLEGKELEFKLIKLDRKRNNVVVSRRAVVESEHSEEREQLMDKLQEGAILKGVVKNLTDYGAFVDLGGIDGLLHITDMAWKRVRHPSEVVNVGDELDVRVLKFDRERNRVSLGLKQLGEDPWDNIARRYPANSRVFGKVSNVTDYGAFVEIEPGVEGLVHVSEMDWTNKNVNPSKVVQVGDEVEVMVLDVDEERRRISLGMKQVAANPWETFAATHKKNDKVSGQIKSITDFGIFIGLDGGIDGLVHLSDISWNTTGEDVVRNYKKGDTLEAVVLAVDPERERISLGVKQLEQDPFGQYMASNPKGSKVEGVVREVDAKGATIDLADGIEGYVAARDIANERVDDATQHLKVGDKIEAKFVGMDRKGRTLQLSIKAKDDAEMREVLEEYQSASGGTTQLGALLRAQLNSNKSE

SEQ ID NO: 18313 - protein, 561 aa, Xanthomonas axonopodis pv. citri str. 306
MTESFAELFEASQANLAKLKPGSIVTGTVVEVRGDVVVINAGLKSEGIVPIEQFRNDAGEIDVGVGDQVKVALDSIENGFGETVLSREKAKRAMVWDELEEALEKNETITGRISGKVKGGFTVDIKDVRAFLPGSLVDVRPVRDPAYLEGKELEFKLIKLDRKRNNVVVSRRAVVESEHSEEREQLMDKLQEGAILKGVVKNLTDYGAFVDLGGIDGLLHITDMAWKRVRHPSEVVNVGDELDVRVLKFDRERNRVSLGLKQLGEDPWDNIARRYPANSRVFGKVSNVTDYGAFVEIEPGVEGLVHVSEMDWTNKNVNPSKVVQVGDEVEVMVLDVDEERRRISLGMKQVAANPWETFAATHKKNDKVSGQIKSITDFGIFIGLDGGIDGLVHLSDISWNTTGEDVVRNYKKGDTLEAVVLAVDPERERISLGVKQLEQDPFGQYMASNPKGSKVEGVVREVDAKGATIDLADGIEGYVAARDIANERVDDATQHLKVGDKIEAKFVGMDRKGRTLQLSIKAKDDAEMRETLEDYQSASASGGMTQLGALLRAQLNNNKSE

SEQ ID NO: 18314 - protein, 565 aa, Caulobacter crescentus CB15
MSFNPTRDDFEALLNDSMGGRDFAEGTVVKGKVVGIEKDFAIIDVGLKTEGRVQLKEFGVDENGKATVKAGDTVEVFLERLENAMGEAVISREKAKREEAWTRLEGVYARNEPVMGAIVGRVKGGFTVDLGGASAFLPGSQVDIRPVRDVGPLMGKEQPFAILKMDRPRGNIVVSRRAILEEARAEQRTELVSQLQEGEIREGVVKNITDYGAFVDLGGIDGLLHVTDMSWKRVNHPSQVLAVGDTVKVQIVKINPDTQRISLGMKQLQSDPWDGVEAKYPVGAKFTGRITNITDYGAFVELEAGVEGLVHVSEMSWTKKNVHPGKIVSTSQEVDVVVLDVDPSKRRVSLGLKQALANPWEAFLEAHPVGSTVEGEVKNATEFGLFVGLDNDIDGMVHLSDIDWSVPGEEAMARYKKGDMVKAKVLDVDVEKERISLGIKQLAGDPMSGDTYRKNQTVTVTVTEVTSGGIEVRFGEDDAPMTAFIRKSDLSRDRQEQRPERFAVGDRVDAQITNVDKAARRVSLSIKSLEMAEEKEAIEQFGSSDSGASLGDILGAALRERASKD

SEQ ID NO: 18315 - protein, 382 aa, Bacillus anthracis str. A2012
MVEKMNEEVMDSKELQVGDVVTGSVTKVEEKQVLVNVGYKTDGVIPISELANVHIEKASDVVELDQTLELKVIKLEENDLVLSKRAVDAEKAWVELQEKFNSGHVFDVTVKDIVNGGLVVDLGVRGFIPASLVEVHYVEDFTDYKGKTLAVKIVELDREKNRVILSHKAVVELELDSKKKEAISSLKEGDVVEGTVQRLTDFGAFVNVGGVDGLVHISQISHERVEQPSEVLEQGQKVKVKVLSVDADTQRISLSIKAAQPGPWENVGGEVKAGDIREGVVKRLVTFGAFVEILPGVEGLVHVSQIANRHVKNPNEVLEMGQEVKVKVLEVHVAEKRISLSIKEALEENNVTEDYSQYEPNADSATFQLSDIIGEQLKKLKK

SEQ ID NO: 18316 - protein, 556 aa, Campylobacter jejuni subsp. jejuni NCTC 11168
MSEVNKKVQDGVDDYLEEEDFGQLLEAFDKSREEATTEGVIVEIKNDEVYVDIGKKSEGILALSEIQGDNSKLLFNVGDSIKVAVMGSRGGRSLLSHKKALRKEKVIEFIKNYQENQDDIFTVKVVGKNKGGLIVVDENDVEFFLPKSQYGFKETNNIIGKTFKVKIIKIDKDEQSIIVSRKKTLDDERRKRKELINNVAQQEDLIEGIVKKITTYGMFVDVGGVDGLVHYSEISYKGPVNPGTLYKEGDKVPVKVIKYDKERKHLSLSIKAALPDPWSEIKDTLDIGDTIKVIVSNIEPYGAFVDLGNDIEGFLHISEISWDKNIKNPKDYINKGQEIDVEVIEINPNERRLRVSLRNLLSRPFDEFMKSYKIADVVEGEITSVTSFGAFVKLGGIEGLLHNEDASWDRNDKCKDKFSQGDKIKVKIIKIDEENQKISLSTKELSSSPVQEYAKIHKVGDIVKGAIRDIKDFGVFVELSKNVDALIHKEDISTSMLENLKIGDDIEAAIVFIDEKKNRIRLSVKNLVRIKEREVLNEINNDDKVTLGDIIKDQLA

SEQ ID NO: 18317 - protein, 550 aa, Chlorobium tepidum TLS
MESLYTSTLSEISEEEIVKGRIVSISNKDVTIDVGFKSEGIVSLLEFRDDDEIKVGDDVEVYLENIEDKMGQLILSKRKADVLRIWDKIYDSIENDTIINGKIINRVKGGMTVSLSGVEAFLPGSQIDVKPVRDFDALVGKTMDFRVVKINPVTQNIVVSHKVILEEEYAAKREEMLANIKVGMVLEGTVKNITDFGIFVDLGGLDGLVHITDITWGRINHPSEVVELDQPIKVVVVGFDENTKRVSLGMKQLEAHPWENIEIKYPVGIKATGRVVSITDYGAFVEIEKGIEGLVHISEMSWTQHIKHPSQFVSLNQEVEVVILNIDKEHTKLSLSMKRVSEDPWIALSEKYVEGSLHKGTVSNITDFGVFVELEPGVDGLVHISDLSWTKKIRHPSELVKKGQELEVKVLKFDVNARRIALGHKQINNDPWGEFEQKYAVGAECTGAISQIIEKGVIVILPGEVDGFVPVSHLLQGGVKDIHSSFKIGDELPLRVIEFDKENKRIILSALEYFKDKSKEEIEAYLQAHPNEKKEIEAASAELEPQPKGR

SEQ ID NO: 18318 - protein, 378 aa, Clostridium perfringens str. 13
MSENLTMSELMDSFELKHFHKGEIVKGKVISVKNDEIIVNIGHFADGVVPRNEISNDKNFDINSINVDDDIFVMVLSGDDGEGNVLLSKKRADAIKVCDDLKEAFEEEKSIKVSLKEVVKGGIVGDFNGLRVFMPASQCAGRRIENLEELVGKTLEVRVIEFNKENRKVVVSRRVIDEEIRNNEKKALWSSIKEGEKRKGKVTRLAKFGAFVDIGGVEGLVHLSDMSWSRVHKPEEVVSVGDEVEVFVSEVDMDRERIALSLKDVIKNPWETLEGLKVGNVVLGKVTNFIKVGAFVEVLPGIEGLVHISEITDENIAKPSDILELGQEVKVKILNIDDENKKMSLSIKDAVETSNEYMQYNDEEEGYSLADLFKGLNL

SEQ ID NO: 18319 - protein, 485 aa, Corynebacterium efficiens YS-314
MPTNNAPQVAINDIGSAEDFLAAIDATIKYFNDGDIVEGTVVKVDHDEVLLDIGYKTEGVIPSRELSIKHDVDPDEVVQVGDQIDALVLTKEDKEGRLILSKKRAQYERAWGAIEELKEKDEPVTGTVIEVVKGGLILDIGLRGFLPASLVEMRRVRDLDPYIGQELEAKIIELDKNRNNVVLSRRAFLEQTQSEVRSEFLHQLQKGQVRKGVVSSIVNFGAFVDLGGVDGLVHVSELSWKHIDHPSEVVTVGDEVTVEVLDVDLDRERVSLSLKATQEDPWRVFARTHAVGQIVPGKVTKLVPFGAFVRVEEGIEGLVHISELAQRHVEVPDQVVTVGEEVMVKVIDIDLERRRISLSLKQADEDYTEEFDPSKYGMADSYDEQGNYIFPEGFDPETNEWLEGFDEQRQAWEARYAESERRFQAHTAQIERRRQQAEEAAAEAPAGNYSSESEDAAPSAAVEETGGSLASDEQLAALREKLAGN

SEQ ID NO: 18320 - protein, 391 aa, Staphylococcus aureus subsp. aureus MW2
MTEEFNESMINDIKEGDKVTGEVQQVEDKQVVVHINGGKFNGIIPISQLSTHHIDSPSEVVKEGDEVEAYVTKVEFDEENETGAYILSRRQLETEKSYSYLQEKLDNNEIIEAKVTEVVKGGLVVDVGQRGFVPASLISTDFIEDFSVFDGQTIRIKVEELDPENNRVILSRKAVEQEENDAKKDQLLQSLNEGDVIDGKVARLTQFGAFIDIGGVDGLVHVSELSHEHVQTPEEVVSIGQDVKVKIKSIDRDTERISLSIKDTLPTPFENIKGQFHENDVIEGVVVRLANFGAFVEIAPGVQGLVHISEIAHKHIGTPGEVLEPGQQVNVKILGIDEENERVSLSIKATLPNEDVVESDPSTTKAYLENEEEDNPTIGDMIGDKLKNLKL

SEQ ID NO: 18321 - protein, 486 aa, Corynebacterium glutamicum ATCC 13032
MPTNNAPQVAINDIGSAEDFLAAIDATIKYFNDGDIVEGTVVKVDRDEVLLDIGYKTEGVIPSRELSIKHDVDPDEVVEVGDQIDALVLTKEDKEGRLILSKKRAQYERAWGAIEELKEKDEPVTGTVIEVVKGGLIIDIGLRGFLPASLVEMRRVRDLDPYIGQELEAKIIELDKNRNNVVLSRRAFLEQTQSEVRSEFLHQLQKGQVRKGVVSSIVNFGAFVDLGGVDGLVHVSELSWKHIDHPSEVVTVGDEVTVEVLEVDLDRERVSLSLKATQEDPWRVFARTHAVGQIVPGKVTKLVPFGAFVRVEEGIEGLVHISELAQRHVEVPDQVVAVGEEVMVKVIDIDLERRRISLSLKQADEDYTEEFDPSKYGMADSYDEQGNYIFPEGFDAETNEWLEGFDEQRQAWEARYAESERRFTAHTAQIERRRQQAEEAAAEAPAGNYSTDSAEDAPAAEAVEESAGSLASDEQLAALREKLAGN

SEQ ID NO: 18322 - protein, 401 aa, Streptococcus pyogenes MGAS315
MNEFEDLLNSVSEVNPGDVVTAEVLTVDNGQANVVIEGTGVEGVLTLRELTNDRDADINDFVKAGDTVEVLVLRQVVGKDTDTVTFLVSKKRLEARKAWDKLVGREGEVVTVKGTRAVKGGLSVEFEGLRGFIPASMIDTRFVRNTEKFVGQEFDAKIKEVDAAENRFILSRREVIEEAAKEARAEVFSKISEGAVVTGTVARLTSFGAFIDLGGVDGLVHVTELSHERNVSPKSVVSVGEEVEVKVLSIDEEAGRVSLSLKATTPGPWDGVEQKLAQGDVVESKVKRLTDFGAFVEVLPGIDGLVHISQISHKRVENPKDVLSVGQEVTVKVLEVNAADERVSLSIKALEERPAQAEGDNKEEKRQSRPRRPKRESRRDYELPETQTGFSMADLFGDIEL

SEQ ID NO: 18323 - protein, 559 aa, Buchnera aphidicola str. Sg (Schizaphis graminum)
MNESFAQLFEESLKEIKTRPGSIIRGTIVSIEKDIVLVDAGLKSESAIPVEQFKNAQGLLDVKVGDQIDVALDAIEDGFGETLLSREKAKRHEAWLILEQAHEKSETVIGIINGKVKGGFTVELNEIRAFLPGSLVDVRPVRDTIHLEGKELEFKVIKLDQKRNNVVVSRRAVIESENSAERDQLLESLQEGIEIKGIVKNLTDYGAFVDLGGVDGLLHITDMAWKRVKHPSEIVNVGDEINVKILKFDKERTRVSLGLKQLGEDPWIAISNRYPEGIKLSGRVTNLTDYGCFVEIEEGVEGLVHVSEMDWTNKNIHPSKVVAVNNIVDVIVLDIDEERRRISLGLKQCKINPWQEFSETHKKGIHVSGKIKSITDFGIFIGLKGGIDGLVHLSDISWKISGEEAVKNYKKGDEISAVVLQVDAERERISLGIKQLEEDPFNVYVSNHKKGAIITGIIKDFDKKTVTVKLSDGVEGNIKFSDSSRVNSEEIIKKLKIDDTILVKISNFDRKNRIINLTFHILDENNNKKDLKNKINVKSNDESFSNVMAEAFKAAQNTE

SEQ ID NO: 18324 - protein, 530 aa, Thermobifida fusca
MRIRGRPHLWCGGPPIRAFPVGSESNVFSQRVQTSIHVRTGVHPHMTSSTEATSTPQVAVNDIGSEEAFLAAIDETIKYFNDGDIVEGTIVKVDRDEVLLDIGYKTEGVIPSRELSIKHDVDPHEVVAVGDHVEALVLQKEDKEGRLILSKKRAQYERAWGTIEKIKEEDGVVTGTVIEVVKGGLILDIGLRGFLPASLVEMRRVRDLQPYVGRELEAKIIELDKNRNNVVLSRRAWLEQTQSEVRQTFLNTLQKGQIRKGVVSSIVNFGAFVDLGGVDGLVHVSELSWKHIDHPSEVVEVGQEVTVEVLDVDMERERVSLSLKATQEDPWQQFARTHQIGQIVPGKVTKLVPFGAFVRVEEGIEGLVHISELAERHVEVPEQVVQVGTEIFVKIIDIDLDRRRISLSLKQANESISPDQTEFDPTMYGMVAEYDEHGNYKYPEGFDPETGEWMEGYEAQRDEWERQYALAQARFEAHRKQVQEAQAAEAAAAQEQQADDDSGSGQGGGELASDEALAALREKLAGGGES

SEQ ID NO: 18325 - protein, 422 aa, Leuconostoc mesenteroides subsp. mesenteroides ATCC 8293
MFFTIQELKYLVHYIHSVNCRRTFDVMSETNNELLAALESADQIKVGDVVTGEVLAVDNDNQAVIGLHTGEEGVVPAREYSDDRNINLADELKVGDSVEAVVISNVTSDKEGVSYLLSKKRLEARKAWENLSFGEGDTVDAKVINAVRGGLVVDVNGVRGFVPASMVADRFVSDLNQFKNKDIKAQVIEIDAAKARLILSRKAVAAQERAAQLAEAFEKLSVGEVVEGKVARLTDFGAFVDLGGVDGLVHVSEISHDRVKNPADVLTKGETVNVKILALDAEKGRISLSIKATQPGPWDKVAEEAPAGTVLEGTVKRVKDFGAFVEIFPGIEGLVHVSQISHKRIENPSEVLKSGDKVQVQVLDVKPAEERISLSMKALEEKPEREDRGNSKDSSASRADIAAYKQQDDSAATLGDLFDGKF

SEQ ID NO: 18326 - protein, 557 aa, Microbulbifer degradans 2-40
  unsure (1)..(557): unsure at all Xaa locations
MLNIIGIAMIESFAELFEESLKTVDMVPGSIVTGVVIDIDQDWXXXXXXXXXXXXXXXXXIGDEVQVALESVEDGFGETRLSREKAKRAESWKVLEAAHDAEEVITGVINGKVKGGFTVDVAGIRAFLPGSLVDVRPVRETTHLEGKELEFKVIKLDQRRNNVVVSRRAVMEQANSEEREELLANLQEGMAVKGIVKNLTDYGAFVDLGGVDGLLHITDMAWKRIKHPSEIVAVGDEIDVKVLKFDRERNRVSLGLKQLGEDPWSAITQRYPEGAKVKARITNLTDYGCFAEIEEGVEGLVHVSEMDWTNKNIHPSKVVSLGDEVEVMILDIDEERRRISLGIKQCQENPWDAFSNQFAKGDKISGKIKSITDFGIFIGLDGGIDGLVHLSDISWNEAGEEAVRKFKKGDEIETVVLAIDPERERISLGVKQLDEDPFSAYVAENDKGTIVTGTVKEVDAKEAVILLADDITGTLKASEISRDKVEDARNVLKEGDEVEAKITNVDRKNRAIILSVKAKDVADEKAAIKEHSTKAAEAAQPATIGDLIKAEMENKNS

SEQ ID NO: 18327 - protein, 473 aa, Tropheryma whipplei str. Twist
MNMKVIDELSSEDLLLSEIDKTVKSFSDGDIVVGTVVRVYRDEVLVDVGYKTEGVIPVKELSLRADVDPNELLEVGSTVEALVFQKEDSQGRLILSKKRAQYEKAWSDLEKIKDSDLTVTGKVIEIVRGGLIVDIGLRGFLPASLIDIRRVRDLSSYLGMEIEAKVLELDRQRNNVVLSRRVLLEQNQSEARTSLFGNLHKGQVRKGTVSSIVSFGAFVDLGGIDGLVHISEISWKHVTQPSEVLKVGEEVTVEILEVDSERHRVSLSLRATQEDPWQVFAHDHAIGQIMPGVVTKVMNFGVFVRLAEDVEGLAHVSELLDSSLESTEDVFSPGDEVFVKIVDIDIDSRRISLSLKQATAALTLDSKGFDPALYGMLAEYDDDGNYKYPEGFDPEANQWKEGFEEEKARWEQGYAVARDVWHAHTVFVSEFQKKLEALSVSNAPEALPSAESVSAIDSDTTNSPESAKGSEQD

SEQ ID NO: 18328 - protein, 566 aa, Brucella suis 1330
MSQSNPTRADFESLLAESFAEHDLAEGYVVKGRIVAIEKDMAIIDAGLKVEGRVPLKEFGAKGKDGTLKPGDEVEVYVERIENALGEAVLSREKARREESWVKLEQKFANGERVDGVIFNQVKGGFTVDLDGAVAFLPRSQVDIRPIRDVTPLMHVPQPFEILKMDKRRGNIVVSRRTVLEESRAEQRSEIVQNLEEGQVVEGVVKNITDYGAFVDLGGIDGLLHVTDMAWRRVNHPSEILTIGQTVKVQIIRINQETHRISLGMKQLESDPWDGIGAKYPIGKKITGTVTNITDYGAFVEIEPGIEGLIHVSEMSWTKKNVHPGKILSTTQEVEVVVLEVDPVKRRISLGLKQTLDNPWTTFAQKYPVGTVVEGEVKNKTEFGLFIGLDGDVDGMVHLSDLDWNRPGEQVIEEYNKGEVVKAVVLDVDVEKERISLGIKQLSGDKVGEAAASGELRKNAVVTCEVTAVTDGGLEVRLVDHDLDSFIRRSDLSRDRDEQRPERFTVGQKVDARVIAFDKKTRKLQVSIKALEIAEEKEAVAQYGSSDSGASLGDILGAALKKQEKN

SEQ ID NO: 18329 - protein, 484 aa, Bifidobacterium longum DJO10A
  unsure (1)..(484): unsure at all Xaa locations
MAENNTEVTKVAINDIGTEEDFIKAVDSTIKNFDDGDLVEGTVVKIDHDEVLLDIGYKTEGVIPSRELSIKKDVDPDEVVEVGDTIEALVVTKEDKEGRLILSKKRAQYERAWGDIEKIKEADGVVEGTVIEAVKGGLIVDIGLRGFLPASLVEMRRVRDLSPYIGQKIKAKILELDKNRNNVVLSRRQYLEETQSEVRETFLSQLKKGQIREGVVSSIVNFGAFVDLGGVDGLIHVSELSWKHIDHPSEVVKVGDKVTVEVLDVDLDRERISLSLKATQEDPWQRFARTHVPGQIVKGKVTKIVQFGVFISVEDGIEGLVHISELANRHVENPETVVKPGETVFVKVIDVDLDRRRXXXXXXXXXXXXXXXXXRRAGQLQVPRRLRPEHQRVDRWLREAARGVGVSVRRRSRAVGGAQGVRGQGAGERCRIRSRRRPGPEGREAGRGDLQLLFRCSDYRYPRRLRSARRPARPAARQVSLPRS

SEQ ID NO: 18330 - protein, 294 aa, Haemophilus somnus 129PT
MSESFAQLFEESLKDLETRVGSIVNATVVAIEKGFVYVDAGLKSEARIPAEEFQNAQGELDVKVGDVVNVALDAVEDGFGETKLSREKAVRQESWIDLEKAYEEQATVIGLINGKVKGGFTVELNGVRAFLPGSLVDTRPTREADHLLGKEQEFKVIKLDQKRNNVVVSRRAVIESENSQEREEILANLAEGSEVKGTVKNLTDYGAFVDLGGVDGLLHITDMAWKRVKHPGEIVSVGDEITVKVLKFDKDKTRVSLGLKQLGQDPWVAIAENHPVNSKLTGKVTNLTDYGCFV

SEQ ID NO: 18331 - protein, 591 aa, Pseudomonas syringae pv. syringae B728a
  unsure (1)..(591): unsure at all Xaa locations
MKSRFAVLPDDEEACGRPVIVPQAFFYLNETHVXXXXXXXXXXXXXXXXXIITAIIVDIDYQAGWVTVHAGLKSEGLIPLEQFHNDAGELTIKIGDEVHVALDAVEDGFGETKLSREKAKRAECWIVLEAAFAAEEVVKGVINGKVKGGFTVDVNGIRAFLPGSLVDVRPVRDTTHLEGKELEFKVIKLDQKRNNVVVSRRSVLEAENSAEREALLESLQEGQQVKGIVKNLTDYGAFVDLGGVDGLLHITDMAWKRIKHPSEIVNVGDEIDVKVLKYDRERNRVSLGLKQLGEDPWVAIKARYPESTRVTARVTNLTDYGCFAELEEGVEGLVHVSEMDWTNKNIHPSKVVQVGDEVEVMVLDIDEERRRISLGIKQCKSNPWEDFSGQFNKGDKISGTIKSITDFGIFIGLDGGIDGLVHLSDISWNEVGEEAVRRFKKGDELDTVILSVDPERERISLGIKQLESDPFSEYVTVNDKGAIVRGIVKEVDAKGAIITLADDIEATLKASEISRDRVEDARNVLKEGEEIEAKIISVDRKSRVISLSIKSKDVEDEKEAIQSLRSKPEVAESTGPTTIGDLLRAQMEKQN

SEQ ID NO: 18332 - protein, 561 aa, Pseudomonas fluorescens PfO-1
MSESFAELFEESLKTLNLQAGSIITGVIVDIDYQARWVTVHAGLKSEALIPLEQFYNDAGELNINVGDEVHVALDSVEDGFGETKLSREKAKRAECWIVLEAAFAAEEVVKGVINGKVKGGFTVDVNGIRAFLPGSLVDVRPVRDTTHLEGKELEFKVIKLDQKRNNVVVSRRSVLEAENSAEREALLESLQEGQQVKGIVKNLTDYGAFVDLGGVDGLLHITDMAWKRIKHPSEIVNVGDEIDVKVLKYDRERNRVSLGLKQLGEDPWVAIKARYPEGTRVTARVTNLTDYGCFAELEEGVEGLVHVSEMDWTNKNIHPSKVVQVGDEVEVMVLDIDEERRRISLGIKQCKSNPWEDFSGQFNKGDKISGTIKSITDFGIFIGLDGGIDGLVHLSDISWNEVGEEAVRRFKKGDELDTVILSVDPERERISLGIKQLESDPFSEYVSVNDKGAIVKGTVKEVDAKGAIIVLADDIEATLKASEISRDRVEDARNALKEGQEVEAKIISVDRKSRQISLSIKSKDDAEEKEAIQSLKAAPEGEAADTTMAALLRQAMAKQN

SEQ ID NO: 18333 - protein, 491 aa, Bifidobacterium longum NCC2705
MAENNTEVTKVAINDIGTEEDFIKAVDSTIKNFDDGDLVEGTVVKIDHDEVLLDIGYKTEGVIPSRELSIKKDVDPDEVVEVGDTIEALVVTKEDKEGRLILSKKRAQYERAWGDIEKIKEADGVVEGTVIEAVKGGLIVDIGLRGFLPASLVEMRRVRDLSPYIGQKIKAKILELDKNRNNVVLSRRQYLEETQSEVRETFLSQLKKGQIREGVVSSIVNFGAFVDLGGVDGLIHVSELSWKHIDHPSEVVKVGDKVTVEVLDVDLDRERISLSLKATQEDPWQRFARTHVPGQIVKGKVTKIVQFGVFISVEDGIEGLVHISELANRHVENPETVVKPGETVFVKVIDVDLDRRRISLSLKQANDSVDPASEDFDPAIYGMPAEYDEQGNYKYPEGFDPNTNEWIAGYEKQREEWESQYAAAHELWEEHKEFVAKELENAAESAAADGQGPKEEKPVEETSNYSSAAPTTGTLADSDQLAALRDQLLGK

SEQ ID NO: 18334 - protein, 574 aa, Desulfovibrio desulfuricans G20
MTTETIDTSLDAEMSFESALENYLSSDFGDLEEGSIVKGEVVRVDGDYVLVDVNFKSEGQIAASEFKDAEGNLAIKVGDTVDVFVARKNEMEGTITLSFEKAKRMQVFDKLEEVQESEGTTCGRIIRRIKGGYTVDLGGVEAFLPGSHVDLRPVPDMDALVNQEFDFRVLKINRRRSNVIVSRRVLLEEERDSKRQDLLKTLEEGQIVTGKAKNITEYGVFVDLGGLDGLLHITDMSWKRIRHPKELVSLGQELELKILSFDRDSQKVSLGMKQLVNDPWADITSKYPENARLNGKVTNLVDYGAFVELEPGVEGLVHISEMSWTRKLRHPSQMVRVGDEVEVVILGVDPDKKRISLGMKQVKPNPWEVVAEKYPEGTILEGVIKNITEFGMFIGIEDGIDGLIHVSDISWTKKIRHPNELYNVGDTVQAKVLTVDQESEKFTLGVKQLTEDPWSKVPANYPVGTLVNGVVTNITDFGLFVEVEEGIEGLVHVSEISQKKVKSPSEMFKEGVTIQAKVIHVSAEERRLGLSIKQIKDDEERRRPKEFRSGPAEAGGQTLGDILKLKLEEDAADN

SEQ ID NO: 18335 - protein, 400 aa, Streptococcus agalactiae 2603V/R
MNEFEDLLNSVSEVNPGDVVTAEVLTVDNGQANVVIDGTGVEGVLTLRELTNDRDADINDFVKAGDTVEVLVLRQVVGKDTDTVTFLVSKKRLEARKAWDKLVGREGEVVTVKGTRAVKGGLSVEFEGLRGFIPASMIDTRFVRNTEKFVGQEFDAKIKEVDAAENRFILSRREVVEESAAAARKEVFSNIEVGSVVTGKVARLTSFGAFIDLGGVDGLVHVTELSHERNVSPKSVVTVGEEVEVKVLSIDEEAGRVSLSLKATTPGPWDGVEQKLAAGDVIEGKVKRLTDFGAFVEVLPGIDGLVHISQISHKRVENPKDVLSAGQEVTVKVLEVNSDAERVSLSMKALEERPAQAEGEKEEKRQSRPRRPRRQEKRDYELPETQTGFSMADLFGDIEL

SEQ ID NO: 18336 - protein, 559 aa, Pseudomonas aeruginosa PAO1
MSESFAELFEESLKSLDMQPGAIITGIVVDIDGDWVTVHAGLKSEGVIPVEQFYNEQGELTIKVGDEVHVALDAVEDGFGETKLSREKAKRAESWIVLEAAFAADEVVKGVINGKVKGGFTVDVNGIRAFLPGSLVDVRPVRDTTHLEGKELEFKVIKLDQKRNNVVVSRRSVLEAENSAEREALLESLQEGQQVKGIVKNLTDYGAFVDLGGVDGLLHITDMAWKRIKHPSEIVNVGDEIDVKVLKFDRERNRVSLGLKQLGEDPWVAIKARYPEGTRVMARVTNLTDYGCFAELEEGVEGLVHVSEMDWTNKNIHPSKVVQVGDEVEVQVLDIDEERRRISLGIKQCKSNPWEDFSSQFNKGDRISGTIKSITDFGIFIGLDGGIDGLVHLSDISWNEVGEEAVRRFKKGDELETVILSVDPERERISLGIKQLEDDPFSNYASLHEKGSIVRGTVKEVDAKGAVISLGDDIEGILKASEISRDRVEDARNVLKEGEEVEAKIISIDRKSRVISLSVKSKDVDDEKDAMKELRKQEVESAGPTTIGDLIRAQMENQG

SEQ ID NO: 18337 - protein, 827 aa, Fusobacterium nucleatum subsp. vincentii ATCC 49256
MEIIRAKHMGFCFGVLEAINVCNSLVEEKGRKYILGMLVHNKQVVEDMQRKGFKLVTENELLEDMDGLKEGDIVVIRAHGTSKSVHEKLKERKVKVFDATCIFVNKIRQEIEIANENGYSILFMGDKNHPEVKGVISFADDIQIFEGFEEAKKLKIDLDKTYLLSTQTTLNKKKFEEIKKYFKENYKNVIIFDKICGATAVRQKAVEDLAIKVEVMIIVGDTKSSNTKKLYEISKKLNGNSYLVENEEQLDLTIFRGKEVVGITAGASTPEETIMNIEKKIRGIYKMSNANENQNEFSLMLEEFLPNQEKRVEGVIESMDQNYSYLDVPGERTAVRVRTDELKGYKVGDTVEVLITGLSEEEDDQEYITASRRKIEVEKNWEKIEDSFKNKTILDAKVTKKIKGGYLVEAFLYPGFLPNSLSEISDSEEKVNGKKIQVIVKDIKVDPKDKKNRKITYSVKDIRLAEQEKEFAGLTVGQIVDCVVTEVLDFGLAVDINTLKGFIHISEVSWKRLDKLSDVYKVGDHIKAVIVSLDEAKRNVKLSIKKLEEDPWATVANEFKVDDEVEGTVTKVLPYGAFVEIKPGVEGLVHISDFSWTKKKVNVAEYVKEGERVKVRITDLHPENRKLKLGIKQLVANPWETAEKDFAVGTVIKGKVVEVKPFGIFVEITDGIDAFVHSSDYSWIGEETPKFEIGNEVELKITELDLNDKKIKGSLKALRKSPWEHAMEEYKVGTTVEKKIKTVADFGLFIELTKGIDGFIPTQFASKEFIKNIRDKFNEGDIVKAQVVEVNKDTQKIKLSIKKIEIEEEKREEREQIEKYSTSSSEE

SEQ ID NO: 18338 - protein, 399 aa, Streptococcus mutans UA159
MNEFEDLLNSVSEVNPGDVVTAEVLTVDGEQANLVIDGTGVEAVLTLRELTNDRNADINDFVKAGDKVEVLVLRQVVGKDTDTVTFLVSKKRLEARKAWDKLVGREGDVVTVKGTRAVKGGLSVEFEGLRGFIPASMIDTRFVRNTEKFVGQQFEAKIKEIDPSENRFILSRRDVVEAAAAKAREEVFSRLAVGDIVTGTVARLTSFGAFIDLGGVDGLVHITELSHERNVSPKSVVTVGEEIQVKVLAIDEEAGRVSLSLKATTPGPWDGVEQKLAAGDVIEGKVKRLTDFGAFVEVLPGIDGLVHISQISHKRVENPKDVLSVGQDVTVKVLDVNTADERVSLSIKALEERPAQDESNGEKRQSRPRRQKRQDKRDYELPETQTGFSMADLFGDIEL

SEQ ID NO: 18339 - protein, 555 aa, Shewanella oneidensis MR-1
MTESFADLFEQSLQTLEFRPGSIVRGTVVAIENGMVLVDAGLKSESPIPAEQFKNAQGVLEIAVGDEVDVALDSVEDGFGETQLSREKAKRHEAWIVLEKAYEDAETVIGIINGKVKGGFTVELNGIRAFLPGSLVDVRPVRDTAHLEYKELEFKVIKLDQKRNNVVVSRRAVIESESSAERDALLENLQEGQAVKGIVKNLTDYGAFVDLGGVDGLLHITDMAWKRVKHPSEIVNVGDEINVKVLKYDRERTRVSLGLKQLGEDPWLEISKRYPENTKLTGRVTNLTDYGCFVEIEEGVEGLVHVSEMDWTNKNIHPSKVVNLGDEVEVLVLDIDEERRRISLGLKQCKTNPWDDFATRYNKGDKVSGKIKSITDFGIFIGLDGGIDGLVHLSDISWNGTGEDAVSEYKKGDEIHAVVLSVDPERERISLGVKQTEDDPFNAYLADKKKGTIVHGTVSAVDAKGVTVELADTVEGYIRVADISRERIEDASTVYSVGDAIEAKFMGVDRKNRSISLSIKAKDEAEEKEVMATLNKQEDAVISNAMAEAFKAARK

SEQ ID NO: 18340 - protein, 387 aa, Clostridium tetani E88
MSKINEDLTMENMIEEIDKNMKKVKEKDIVKGKVISVSEDEVLINIGYVADGIIKKSDLEDIDFKEEFKKDEEVYVYVVKLNDGEGNVILSKRIADKIRTLDKLEKDFKEGNIFKIKIEEIVKGGVITHINGVRAFIPASHISSKFVQDLNEFLGKEKDVKVIEFNRKDNKLVLSAKEVEDEKLTKKREELWKTLKEGEKINGKVVRLVKFGVFVDIGGIEGLVHLSDLSWKRVNNPSDIVKEGDEVEVFILNVDKKRERLGLALKDIKEDPWKKALDNHKIGTVEHGTVVKLVEFGAFVELKDGLEGLLHISEISEERILKPEEVLKIGDKIKVKILDINKENRKMSLSKKAAEDKSSAEMEKYSDKEEGVSLGEILGDKLKDFKF

SEQ ID NO: 18341 - protein, 635 aa, Clostridium tetani E88
MSIILAKKSGFCYGVKRAVDTCLKIKQNYPDKIIYTLGPLIHNNDVVDFLKTKNIFSIGYENIDTLKEGDIIILRSHGVTLETIQKLKEKKLNIIDATCPYVSNIQKKAQKYYKEGYSILIVGDKNHPEVIGINGWCNNSAIICRKAEEIEDLPKKICVVSQTTEKKEHWISVLSKVVNECREVVAFNTICNATEVRQLSAEDLSKEVDFMIVIGSKSSSNTTKLYEICKNNCSNTIHIENAGELPDYISNKYSKIGVTAGASTPDWIIKEAIFKMSNKNLNEQLEYMENNDIQISIGQEVEGEIVSIVSSNEAYVNIGYKSDAILLLSEVTKDNDEDINNFVKKGDIIKGKIIKLGSENKPPVISVIELNRENAYVELKEAFENKEKVVVKVKEDVNGGLISIYKNIVRVFIPASHVELRHVDDLSIYKGCELTVNIIEFEEGRNNTRIVASRRDLLKEEQSKVEEETWSSLEKDTIKEGEVRRLTDFGAFVNINGVDGLLHVSEISWGRVEKPSDMLKVGDKIKVYIKDIDKDKKKLALSIKDLTKDPWKDVEVKYPVGNIVLGTVVRFASFGAFVELEPGVDGLIHISQISHKRVDRVEDELSIGEQVKAKIVEVDGEKRKIGLSIKEVNDI

SEQ ID NO: 18342 - protein, 557 aa, Yersinia pestis CO92
MIESFAQLFEESLKTIETRPGSIVRGVVVSIDKDIVLVDAGLKSESAIPAEQFKNAQGELEIQVGDEVDVALDAVEDGFGETLLSREKAKRHEAWLMLEKAYEEAATVTGVINGKVKGGFTVELNGIRAFLPGSLVDVRPVRDTLHLEGKELEFKVIKLDQKRNNVVVSRRAVIESENSAERDQLLENLQEGMEVKGIVKNLTDYGAFVDLGGVDGLLHITDMAWKRVKHPSEIVNVGDEITVKVLKFDRERTRVSLGLKQLGEDPWVAIAKRYPESTKLTGRVTNLTDYGCFVEIEEGVEGLVHVSEMDWTNKNIHPSKVVNVGDVVEVMVLDIDEERRRISLGLKQCKSNPWQLFAETHNKNDRVEGKIKSITDFGIFIGLDGGIDGLVHLSDISWNVAGEEAVREYKKGDEIAAVVLQVDAERERISLGVKQLAEDPFNNYLSVNKKGAIVTGKVTAVDAKGATVELAGGVEGYLRAFEATRDRVEDATLVLNVGDEVEAKYTGVDRKNRVISLSVRAKDEADEKDAIATVNTKPEESNFSSAMAEAFKAAKGE

SEQ ID NO: 18343 - protein, 556 aa, Vibrio vulnificus CMCP6
MTESFAQLFEEFLNETEFQQGTIVKGTVVAIENGYVLVDAGLKSESAIPAEQFKNAAGELEVEVGSEVDVALDAVEDGFGETQLSREKAKRHEAWIVLEKAYEEAATVVGIINGKVKGGFTVELNGIRAFLPGSLVDVRPIRDTAHLENKELEFKVIKLDQKRNNVVVSRRAVIESESTVERDELLETLQEGSEVKGIVKNLTDYGAFVDLGGVDGLLHITDMAWKRVKHPSEIVNVGDEILVKVLKFDRDRTRVSLGLKQLGEDPWVAIAKRYPEGHKLSGRVTNLTDYGCFVEIEEGVEGLVHVSEMDWTNKNIHPSKVVNVGDEVEVMVLEIDEERRRISLGLKQCKANPWQSFAEAQAKGDKVTGKIKSITDFGIFIGLDGGIDGLVHLSDISWNVAGEETVREFKKGDEISAVVLAVDAERERISLGIKQMENDPFNAYVADNKKGALVNGTVTAVDAKGATIELEDGVEGYIRASEVSRDRVEDATLILSVGDKVEAKFTGVDRKNRVINLSIKAKDEAEEQEAMASINKADEAAFGNAMADAFKAAKGE

SEQ ID NO: 18344 - protein, 473 aa, Tropheryma whipplei TW08/27
MNMKVIDELSSEDLLLSEIDKTVKSFSDGDIVVGTVVRVYRDEVLVDVGYKTEGVIPVKELSLRADVDPNELLEVGSTVEALVFQKEDSQGRLILSKKRAQYEKAWSDLEKIKDSDLTVTGKVIEIVRGGLIVDIGLRGFLPASLIDIRRVRDLSSYLGMEIEAKVLELDRQRNNVVLSRRVLLEQNQSEARTSLFGNLHKGQVRKGTVSSIVSFGAFVDLGGIDGLVHISEISWKHVTQPSEVLKVGEEVTVEILEVDSERHRVSLSLRATQEDPWQVFAHDHAIGQIMPGVVTKVMNFGVFVRLAEDVEGLAHVSELLDSSLESTEDVFSPGDEVFVKIVDIDIDSRRISLSLKQATAALTLDSKGFDPALYGMLAEYDDDGNYKYPEGFDPEANQWKEGFEEEKARWEQGYAVARDVWHAHTVFVSEFQKKLEALSVSNAPETLPSAESVSAIDSDTTNSPESAKGSEQD

SEQ ID NO: 18345 - protein, 429 aa, Lactobacillus plantarum WCFS1
MSENENSQEKNELLDALNSVEEVNVGDVVKGEVLAIDDDKQVIVGIQGTGVEGVVPLKELSTQRVDDVNEAAKVGDVLDLVVISRIGSDKENGSYLLSHRRLEARKVWDDVEKEYEAGHTIKAPVTQVVKGGLVVDAGVRGFIPASMIDDHYVEDLNAYKGQELELKIIEIEPSENRLILSHRAVVEKQREAQREEALKTLQAGDVVEGKVARLTNFGAFVDLGGIDGLVHVSEISYERVEKPADVLKVGQEVTVKILSVDADRERVSLSIKATLPEPWDGIEEKAPQGAVLDGKVKRLTSFGAFVEVFPGVEGLVHISQISHQHIATPNDVLKVGQEIKVKVLDVRPDEKRLALSIKALEEKPQTADDDNESQPERRSNNNRRRNNNRDNRTASERSTANAPEESTGFTLGDLIGDELKNAESNNDEN

SEQ ID NO: 18346 - protein, 376 aa, Oceanobacillus iheyensis HTE831
MSEESKDLQTMEVGTTVTGTVVKLEDKQVLVDIGYKTEGILPIGELSSLHVEATTDVLTEGDTVTLKVKKIDDDEIILSKRAIDSETAWEELEQKYNSGEAFDTTVKEVVKGGLVVDVGVRGFIPASLVETYYVEDFSDYLNKTLKVKIADLDRSQNRVILSHRAIVEDEEKNRKNDVLQSLEPGQVIEGTVQRITNFGAFVDLGGVDGLVHISQLAHEHVEKTSDVVSEGDKIKVEVLSVDLDNERISLSHKNTLPGPWANVEEQVKVGSTIEGTVKRLVSFGAFVELLPGVEGLVHISQIANRHIGTPQEVLEIGQTVQVKVLDVSEQDQRISLSIKELEEEQEAKEYKQYEKDDDQSGFQLGDFIGDKLDKYK

SEQ ID NO: 18347 - protein, 563 aa, Pseudomonas syringae pv. tomato str. DC3000
MSESFAELFEESLKTLNLQAGSIITAIIVDIDYQAGWVTVHAGLKSEGLIPLEQFHNDAGELTIKIGDEVHVALDAVEDGFGETKLSREKAKRAECWIVLEAAFAAEEVVKGVINGKVKGGFTVDVNGIRAFLPGSLVDVRPVRDTTHLEGKELEFKVIKLDQKRNNVVVSRRSVLEAENSAEREALLESLQEGQQVKGIVKNLTDYGAFVDLGGVDGLLHITDMAWKRIKHPSEIVNVGDEIDVKVLKYDRERNRVSLGLKQLGEDPWVAIKARYPESTRVTARVTNLTDYGCFAELEEGVEGLVHVSEMDWTNKNIHPSKVVQVGDEVEVMVLDIDEERRRISLGIKQCKSNPWEDFSGQFNKGDKISGTIKSITDFGIFIGLDGGIDGLVHLSDISWNEVGEEAVRRFKKGDELDTVILSVDPERERISLGIKQLESDPFSEYVTVNDKGAIVRGIVKEVDAKGAIITLADDIEATLKASEISRDRVEDARNVLKEGEEIEAKIISVDRKSRVISLSIKSKDVEDEKEAIQSLRSKPEVAESTGPTTIGDLLRAQMEKQN

SEQ ID NO: 18348 - protein, 556 aa, Vibrio parahaemolyticus RIMD 2210633
MTESFAQLFEEFLNETEFQQGSIVKGTVVAIENGFVLVDAGLKSESAIPAEQFKNAAGELEVEVGAEVDVALDAVEDGFGETQLSREKAKRHEAWIVLEKAYEEAETVVGIINGKVKGGFTVELNGIRAFLPGSLVDVRPIRDTAHLENKELEFKVIKLDQKRNNVVVSRRAVIESENSVERDELLETLQEGSEVKGIVKNLTDYGAFVDLGGVDGLLHITDMAWKRVKHPSEIVNVGDEIQVKVLKFDRERTRVSLGLKQLGEDPWVAIAKRYPEGHKLTGRVTNLTDYGCFVEIEEGVEGLVHVSEMDWTNKNIHPSKVVNVGDEVEVMVLEIDEERRRISLGLKQCKANPWQSFAEAQAKGDKVTGKIKSITDFGIFIGLEGGIDGLVHLSDISWNVAGEEAVREYKKGDEISAVVLAVDAERERISLGIKQMENDPFNAYVADNKKGTLVNATVTAVDAKGATVEIAEGVEGYIRASEVSRDRVEDASLILSAGDVVEAKFTGVDRKNRVINLSIKAKDEAEEQEAMASINKQDEAAFGNAMADAFKAAKGE

SEQ ID NO: 18349 - protein, 382 aa, Bacillus subtilis subsp. subtilis str. 168
MTEEMNQIDVQVPEVGDVVKGIVTKVEDKHVDVEIINVKQSGIIPISELSSLHVEKASDVVKVDDELDLKVTKVEDDALILSKRAVDADRAWEDLEKKFETKEVFEAEVKDVVKGGLVVDIGVRGFIPASLVEAHFVEDFTDYKGKTLSLLVVELDRDKNRVILSHRAVVESEQANKKQELLQSLEVGSVLDGKVQRLTDFGAFVDIGGIDGLVHISQLSHSHVEKPSDVVEEGQEVKVKVLSVDRDNERISLSIKDTLPGPWNQIGEKVKPGDVLEGTVQRLVSFGAFVEILPGVEGLVHISQISNKHIGTPHEVLEEGQTVKVKVLDVNENEERISLSMRELEETPKADQEDYRQYQAKEETSTGFQLGDLIGDKLNKLK

SEQ ID NO: 18350 - protein, 553 aa, Borrelia burgdorferi B31
MRMENQKDLQENYLKVLERVELGSRVSGTVVNIMKDYVLVDIGYKSEGFIKIEEFENVPQVGDRLEAIVVRIGGELGLILSVEKLNSLNFQDKVYEYIQNKKIIKGKVLVELPNGYKIQINENVSGFMPFYLSSKSKDEKLKRGSVVEFYILEASEADGLRLILDRRTLEKERDLAKRIELVSSYNEEDVVDGVVERITEYGAIVKIKNFVTGILHKRNIAFNQVENVEDFVRVGDKLKLKIIKINPQTGKMELSLKALKANPWDSVDVKYKIDSIVKGKVVKILPFGAVIELDSELSGFLHISNFSWIRVVKSPQELIKLGQIVEVKILEIDKENQKISLGIKQINENPWERLTEKYPIGRVVQGVVTNITKTGAFVNIEEGIDAYVSKFDISWLEEIDPEEYFKIGDLVNGKVLEVDKRKRNVRLGIKQLEESPWEDFSKSYKKGDTIEVEIVEKKSKGFQVRVYNKIMGFISKIQLGDTKESSLETFEKLNVGDKLKVVITSIDSKDKSVLLSYREYENQRSREEISSYLFKGNDEESYKPFENLLKRDE

SEQ ID NO: 18351 - protein, 582 aa, Bradyrhizobium japonicum USDA 110
MNPTAGKTSATGEQMASTSADTYSPSRDDFAAMLDESFAGGNLQESSVVKGKVVAIEKDMAVIDVGLKTEGRVALREFSGPGRDSEIKVGDEVEVFLDRIENALGEAVLSRDKARREESWGKLEKAFQNNEKVNGVIFNQVKGGFTVDLDGAVAFLPRSQVDIRPIRDVAPLMNNSQPFQILKMDRRRGNIVVSRRTVLEETRAEQRQELVQNLEEGQVIDGVVKNITDYGAFVDLGGIDGLLHVTDIAWRRVNHPTEVLSIGQTVKVKIIKINHETHRISLGMKQLLDDPWQGIEAKYPLGARFTGRVTNITDYGAFVELEPGIEGLIHVSEMSWTKKNMHPGKIVSTSQEVEVQVLEVDSVKRRISLGLKQTMRNPWEVFVEGHPTGSVVEGEVKNKTEFGLFLGLEGDVDGMVHLSDLDWKLPGEQVIDNYKKGDMVKAVVLDVDVEKERISLGIKQLEGDPFAEPGDVKKGAVVTCEVLEVKESGIEVKIAGTDFTTFIKRSELARDRNDQRAERFAVGEKVDARVIQFDKKARKVQVSIKALEVAEEKEAIAQYGSSDSGATLGDILGTALKNRDSK

SEQ ID NO: 18352 - protein, 576 aa, Brucella melitensis 16M
MAIPDAPGVYMSQSNPTRADFESLLAESFAEHDLAEGYVVKGRIVAIEKDMAIIDAGLKVEGRVPLKEFGAKGKDGTLKPGDEVEVYVERIENALGEAVLSREKARREESWVKLEQKFANGERVDGVIFNQVKGGFTVDLDGAVAFLPRSQVDIRPIRDVTPLMHVPQPFEILKMDKRRGNIVVSRRTVLEESRAEQRSEIVQNLEEGQVVEGVVKNITDYGAFVDLGGIDGLLHVTDMAWRRVNHPSEILTIGQTVKVQIIRINQETHRISLGMKQLESDPWDGIGAKYPIGKKITGTVTNITDYGAFVEIEPGIEGLIHVSEMSWTKKNVHPGKILSTTQEVEVVVLEVDPVKRRISLGLKQTLDNPWTTFAQKYPVGTVVEGEVKNKTEFGLFIGLDGDVDGMVHLSDLDWNRPGEQVIEEYNKGEVVKAVVLDVDVEKERISLGIKQLSGDKVGEAAASGELRKNAVVTCEVTAVTDGGLEVRLVDHDLDSFIRRSDLSRDRDEQRPERFTVGQKVDARVIAFDKKTRKLQVSIKALEIAEEKEAVAQYGSSDSGASLGDILGAALKKQEKN

SEQ ID NO: 18353 - protein, 576 aa, Buchnera aphidicola str. Bp (Baizongia pistaciae)
MLKLYFTIINMTESFAQLFEESLKNIKTRPGSIIQGTVVAITKDTILVDAKLKSESKIPIDQFKNSQGELEVKVGDQIDVALDAIEDGFGETLLSREKAKRHEAWLTLEQAYKDSKTVVGLINGKVKGGFTVELEDIRAFLPGSLVDIRPVRETMHLEGKELEFKVIKLDQKRNNVVVSRRAVIESEYNAERNLLLETLQEGLIVSGIVKNLTDYGAFVDLGGVDGLLHITDMAWKRVKHPSEIVNIGDEVKIKILKFDREKIRVSLGLKQLSDDPWTKISERYPEKTKITGRVTNLTDYGCFVEIEEGVEGLVHVSEMDWTNKNIHPSKMVQVNSVVKVMILDIDEERRRISLGLKQCKNNPWMEFSKKYNKGSHVVGKIKSITDFGIFIGLEGSIDGLVHLSDISWNISGEESVKKYKKGEEVLAVVLQVDPDRERISLGIKQLQEDPFAKYVSSHKKGSLVSGTIKKIDNNVIVVSLSEHIDGLIKFLNISDEIMNVHDNKPWNKAKIGEIVEVKLNSIDKKERIIYLSILEKQELKISNDIKKNNSHKQEIDKDKNFSNAMTEAFKAAKNVD

SEQ ID NO: 18354 - protein, 403 aa, Enterococcus faecalis V583
MTDFEDKQVANNETMEDAMNSVQEVSVGDIVKGEVLAIEDKQVVVGIEGAGVEGVVPAKELSTLPVEDVHELVKVGDVLDLVVITSIGKDKENGSYLLSKRRLDAKKVWEEIEQDFQAGKVIEAPVTNVVKGGLVVDVGVRGFVPASMVEDHFVADFSEYKGQTLAFKIIEIEPSENRLILSHKAVVEAEKESKKEELLSSLHDGDVVEGKVARLTDFGAFIDLGGVDGLVHVSEIAHQHVGKPSDALTVGEDVQVKILSINPEEGRISLSIKETLPGPWTDIETKAAAGTVLDGTVKRLTSFGAFVEVFPGVEGLVHISQISHKHIATPHEVLHEGDQVQVKVLEVNPEEHRIALSIKALEPKPESQEEPKEEQEYELPEENTGFTMGDILGDALSDAKEEE

SEQ ID NO: 18355 - protein, 599 aa, Bacteroides thetaiotaomicron VPI-5482
MENLKNVAPIEDFNWDAYENGEAVTSASHEDLEKAYDGTLNKVNDREVVDGTVIAMNKREVVVNIGYKSDGIIPLNEFRYNPDLKVGDTVEVYIENQEDKKGQLVLSHRKARATRSWDRVNAALENEEIIKGFIKCRTKGGMIVDVFGIEAFLPGSQIDVKPIRDYDVFVGKTMEFKVVKINQEFKNVVVSHKALIEAELEQQKKEIIGKLEKGQVLEGTVKNITSYGVFIDLGGVDGLIHITDLSWGRVSDPKEVVELDQKLNVVILDFDDEKKRIALGLKQLTPHPWDALDTDLKVGDKVKGKVVVMADYGAFIEIATGVEGLIHVSEMSWSQHLRSAQDFMKVGDEVEAVVLTLDREERKMSLGIKQLKQDPWETIEEKYPVGSKHTAKVRNFTNFGVFVEIEEGVDGLIHISDLSWTKKVKHPSEFTQIGADIEVQVLEIDKENRRLSLGHKQLEENPWDVFETVFTVGSVHEGTIIEMLDKGAVVALPYGVEGFATPKHLVKEDGSQAQLDEKLEFKVIEFNKDAKRIILSHSRIFEDVAKAEERAEKKAASGAKKSSNNKREDAPMIQNQAASTTLGDIDALAALKEQLEGKK

SEQ ID NO: 18356 - protein, 382 aa, Bacillus cereus ATCC 14579
MVEKMNEEVMDSKELQVGDVVTGSVTKVEEKQVLVNVGYKTDGVIPISELANVHIEKASDVVELDQTLELKIIKLEEDDLVLSKRAVDAEKAWVELQEKFTSGHVFDVIVKDIVNGGLVVDLGVRGFIPASLVEVHYVEDFTDYKGKTLAVKIVELDREKNRVILSHKAVVELELDSKKKEAISSLKEGDVVEGTVQRLTDFGAFVNVGGVDGLVHISQISHERVEQPSEVLEQGQKVKVKVLSVDADTQRISLSIKAAQPGPWENVAGEIKAGDIREGVVKRLVTFGAFVEILPGVEGLVHVSQIANRHVKNPNEVLEMGQEVKVKVLEVHVAEKRISLSIKEALEENNVTEDYSQYEPNADSATFQLSDIIGEQLKKLKK

SEQ ID NO: 18357 - protein, 551 aa, Coxiella burnetii RSA 493
MSETFAELFEKSLTETDLRPGALVKATVVEVRPDRVIVNAGLKSEGIIPASEFRNEEPHVGDEFFVVIEASDNGFGETRLSREKARRAKAWSELEKAYKAGEMVKGVIIERVKGGFTVDLNSVRAFLPGSLVDVKPVRDPGYLEDKEIDFKIIKMDQRRNNVVVSRRAVMEAETSAERQARLEELQEGQEIKGVIKNITDYGAFVDLGGVDGLLHITDMAWGRVKHPSDLLNVGDEVHVKVLKFDRDKKRVSLGMKQLADDPWAKIERRYPVNSRVFGKVTNITDYGCFVKLEEGVEGLVHTSELDWTNKNIHPSKVVQSGEEVEVMVLEIDEERRRISLGIKQCKRNPWQEFAEKHEKDEKITGKVRSITDFGMFIGLEGDIDGLVHLSDISWTESGEEAIRNYKKGDEVQAVILGIDPERERISLGIKQLEGDPFMEFVESYDKDAVIQAKVKEVESKQAVLELADQVLGQMRLADYTYDRVKDLTQELNVGDEVAVKIVNVDRKNRLINVSHKAVEGRSEKGTRTVSDVPTKTTLGDLLKEKIQSKDE

SEQ ID NO: 18358 - protein, 501 aa, Streptomyces avermitilis MA-4680
MTSSTETTSTTPQVAVNDIGNEEAFLAAIDETIKYFNDGDIVDGVIVKVDRDEVLLDIGYKTEGVIPSRELSIKHDVDPNEVVKVGDEIEALVLQKEDKEGRLILSKKRAQYERAWGTIEKIKEEDGIVTGTVIEVVKGGLILDIGLRGFLPASLVEMRRVRDLQPYVGKELEAKIIELDKNRNNVVLSRRAWLEQTQSEVRQTFLTTLQKGQVRSGVVSSIVNFGAFVDLGGVDGLVHVSELSWKHIDHPSEVVEVGQEVTVEVLDVDMDRERVSLSLKATQEDPWQQFARTHQIGQVVPGKVTKLVPFGAFVRVDEGIEGLVHISELAERHVEIPEQVVQVNDEIFVKVIDIDLERRRISLSLKQANEAFGGDPASVEFDPTLYGMAASYDDQGNYIYPEGFDPETNDWLEGFESQREVWETQYAEAQQRFEQHQAQVIKSREADAQAEAEGAAAPAAGGSGAGVSGGSYSSESDDNSGALASDEALAALREKLAGGQS

SEQ ID NO: 18359 - protein, 581 aa, Chlamydophila caviae GPIC
MPKQSEYTWGSKKILDTIDCLAEDVVEFKDLLCSTHGITSSDEETTSEIQPGAILKGTVVDINKDFVVVDVGLKSEGVIPMSEFIDSSEGLVLGAEVEVYLDQTEDEEGKVVLSREKATRQRQWEHILAHCEEGSIVKGQIIRKVKGGLIVDIGMEAFLPGSQIDNKKIKNLDDYVGKVCEFKILKINIDRRNVVVSRRELLEAERISKKAELIEQINIGERRRGIVKNITDFGVFLDLDGIDGLLHITDMTWKRIRHPSEMVELNQELEVIILSVDKEKGRVALGLKQKEHNPWEDIEKKYPPGKRIVGKIVKLLPYGAFIEIEEGIEGLIHVSEMSWVKNVVDPSEVVNKGDEVEAIVLSIQKDEGKISLGLKQTEHNPWDNIEEKYPIGLHVHAEIKNLTNYGAFVELEPGIEGLIHISDMSWIKKVSHPSELFKKGSTVEAVILSVDKESKKITLGVKQLSSNPWNEIEEMFPTGSNISGVVTKITAFGAFVELQNGIEGLIHVSELSEKPFSKIEDIISIGDSVSAKVIKLDPDHKKVSLSVKEYLADKQHDHMDTDLNNLDLDDLVGSDKKKKGK

SEQ ID NO: 18360 - protein, 543 aa, Thermotoga maritima
MEPFEFNDEILSQYEPEEFRRGQIVKGVVIGKEDDGVVVDFGGKSEGFVPENELIKSLDEYKVGENLTLQILNLNYEERSILSERRPVLRKTLEELRKDYEEKKPVKARIVSQTKGGYNVLLKGVVSAFLPGSHSLLRRNDPMPEKEIEVIILEMAQTRRGPRIVVSRRALQDKKIEEFFSEKKVGDIVEGTVKGISNAGVEVEISEGVRGFIPRSELSYDTRISPEDIVKPGQNITAKIIELDKVKKNVILSLKKLMPDPWEKVEEKYPVGKVVSGEVTSIHPFGFFVRLEPGVEGLVPRSEVFWGNARKSLEEVVSVGDLVEVEVINVDKENRKLTLSYRKAKGDPWENIEDRYNVNNVVTGKVTGIIKQGAFVELEEGVEGFVPVSEISWKRIDEPGEILKIGEKVKVKILKIDKENRKITLSIKRTQENPWERALKELKPDSIVSGTIKKIVNSGVVVEVEEYDVEGFVPNNHLLSEPETGKALNLVVLRIDPDEVFGGRMILSEKRYEERKNIEEYKKMVEKESSQKSIGDLLKKNGE

SEQ ID NO: 18361 - protein, 536 aa, Thermus thermophilus
MEDKATQTPEQTFSMEAALQETEARLEKRVRPGQILTGKVVLVGSEGVAVDIGAKTEGIIPFNQLTTKPLSEEELRNLLSPGDEVKVQVLRVDPETGQILLSRKKIEAQEKWDRIQELYEKGEPVTVTIKERVKGGVVAELDGIQGFMPASQLDLRRVPNLDEFVGQQVLAKIIEFHRRKGRVILSRRAVLEEEQKKAREAFLKSLEPGQVVEGTVVEVTDFGVFVNLGPVDGLVHRSEITWGRFNHPREVIQKGQKVKARVLSVDPEKERVNLSIKALIPDPWTTVAEKYPVGTRVRGKVVGLTQFGAFVEVEPGLEGLIHISELSWTKRPKHPSEVVKEGDEVEAVVLRLDPEERRLSLGLKQTQPDPWQQLTEKYPPGTVLKGKVTGVTDFGVFVEIEPGIEGLVHVSELDHKRVENPAALFKKGDEMEVVVLNIDPVEQRVSLSRKRLLPPPLPQEEERPRRARSGKERARRKGAPRREDRREYEYGAVAEYNLYDASSVPTTTATVKLGDLYGDLLASLGLEEEAEEKSRG

SEQ ID NO: 18362 - protein, 263 aa, Porphyra purpurea
MTKNNESFTHRNFAAVLQKYKYDLNLGDIVAGTIFSFELNGVLVDIGTPVSAYLPIQEVSSNQELNNFNSLNINDTREFFLLDYNVESRQLILSIRRLEYIRAWKRIRQLLAEDSLLDVRIKGFNKGGMIVNLEGISGFVPNSHLNNFSKNTSSTNKFIKLKLLNVEEKSNNLILSHRRALIAQASSNLIVGNIIEGVINQITPYGLFIKAGNLKGLVHISEINVKQVERIPSQFKIGDTIKAVIIHVDKKQGRLSLSMKHLK

SEQ ID NO: 18363 - protein, 591 aa, Prevotella intermedia
MANFENVNPLSDFNWDDFENGVTVGGDKEELTKAYDNTLNKIQEHQVVEGEVISIDKKEVVVNIGYKSDGIIPASEFRYNPELKVGDKVEVYVENQEDKSGQLILSHKKARLQKSWVNINEALEADAVIQGYIKSRTKGGMIVDVFGIEAFLPGSQIDVHPIRDYDVFVGKTMEFKVVKINQEFRNVVVSHKALIEAELEAQRKEIISHLEKGQILEGVVKNITSYGVFVDLGGVDGLIHITDLSWGRINDPHEVVELDQKINVVILDFDEEKKRIALGLKQLAPHPWDALDPNLKVGDHVKGKVVVMADYGAFVEIQPGVEGLIHVSEMSWSQHLRSAQEFMKAGDEVEAVVLTLDRDERKMSLGIKQLKEDPWEAIEAKYPVGSKHVAKVRNFTNFGIFVELEEGVDGLIHISDLSWTKKVKHPSEFTQVGADMDVIVLEIDKENRRLSLGHKQLETNPWDTYESIYTPGSTHVGKITESMDKGAVITLNEGGEGFATPKHLVKEDGSQAQLGEELPFVVIEFVKDTKRIILSHSRTFEEVKEEQARRQRTASKKHSEPASQINNVAAGTSLGDLDVLADLKKKMEEGK

SEQ ID NO: 18364 - protein, 586 aa, Geobacter metallireducens
MSEDKDMKNRNAMTIKRFVDVEEDGEHGGSGEFAELFQESIKQHRVGEVVTGKVVHISNEFVLVDIGYKSEGCIAIDEFLDEDGNLTVKVGDEVKALFERKENQKGYAVLSRRKAERLAVWDVIDEAGGEGGIIEGKITGKVKGGLTVDIGVQAFLPASQVDLRPGGNLDKYIGTTDRFKVLKLNKKRGNIVLSRRVLMEEERESSRKETLATLAEGQVREGVVKNITDYGAFVDIGGVDGLLHVTDMSWGRLGHPSEILKPGDKLNVKVLKYDQEKGKISLGLKQVTPDPWVSVEQKYNQGDRVKGKVVSLTDYGAFIALEDGVEGLVHVSEMSWTRRLRHPSEILTVGDEVETVVLGVDMGNRRISLGLKQVQVNPWTQLEEKYPVGTKLEGQIKSITDFGVFIGIEEGIDGLVHVSDISWTKRIKHPGEVFTKGQTVQAVVLNIDPENERLSLGIKQLLLDPWSEIPVKYRPGTRVHGKVTSVTDFGVFLEIEEGIEGLIHVSELSREKVASPKEFTNVGDELDAVVLSVDESEKKIALSIKSLQMAAEKAEIESYMQAQGEATSNLGELLKVGFRKNGDGND

SEQ ID NO: 18365 - protein, 401 aa, Geobacter metallireducens
MDMDEKDVVETEEESFAELFEKSNSETQRLRPGSKVEGKILKIGAEWVFIDIGKKGEGVMERKELQDAEGNLTVAEGDTITAWFTGSVRNEMRFTTKLGAGAAANAQLEEAHRSGIPVEGFVVKEIKGGFEVRLSGTTRAFCPFSQISLRRAENPAEFVGKHLLFKVTEYSERGRNIVLSHRQILEEEQRVKREALKEVLLEGMTVTGTVTRLADFGAFVDLGGVDGLIPVSEVGWTRVKHVRDVLSVGEQVSVVIKKIDWEAGKISLSLKDTLADPWTTVAEQFPEGSYHTGTVARLAAFGAFVTLAPGIDGLIHISKLGKGKRINHPSDVLKEGETVEVKVDGVDREARRLSLALAEVSRAAEEEEKSVASFRQQATSSSKESMGSFGDLLKAKIEEKR

SEQ ID NO: 18366 - protein, 562 aa, Ralstonia solanacearum
MSQTNESFAALFEESIARSNMKAGEVISAEVVRIDHNFVVVNAGLKSEAFVPVEEFLNDQGELEVQVGDYVSVAIDALENGYGDTILSRDKAKRLASWLNLEKALESGEIISGTVTGKVKGGLTVMVNGIRAFLPGSLVDVRPIKDTTPYEGKTLEFKVIKLDRKRNNVVLSRRAVVEATLGEERQKLMETLKEGAIVNGIVKNITDYGAFVDLGGIDGLLHITDLAWRRVRHPSEVLSVGQEITAKILKFDQEKNRVSLGVKQLGEDPWVGISRRYPQGTRLFGKVTNLTDYGAFVEIEAGIEGLVHVSEMDWTNKNVAPSKVVQLGDEVEVMVLDIDEDKRRISLGMKQCKANPWDDFARNHKKGDKLAGQIKSITDFGVFIGLPGGIDGLVHLSDLSWQETGEEAVRKYKKGDEVEAVVLAIDVEKERISLGIKQLSGDPFNNFISANDKGSIVSVTIKTVDPKGAVVQLADDVEGYLRASEISSDRVEDARNVLKEGETMTAMIVNIDRKSRNINVSIKAKDSADQQEAMQKFAQDTGTAGTTNLGALLKAKLNETNQ

SEQ ID NO: 18367 - protein, 575 aa, Azotobacter vinelandii
MWRWAGFLPPQSTGINMSESFAELFEESLKSLDMQPGAIITGIVVDIDGDWVTVHAGLKSEGVIPVEQFYNEQGELTIKVGDEVHVALDAVEDGFGETKLSREKAKRAESWLVLEAAFAADEVVKGIINGKVKGGFTVDINGIRAFLPGSLVDVRPVRDTTHLEGKELEFKVIKLDQKRNNVVVSRRSVLEAENSAEREALLESLQEGQQVKGIVKNLTDYGAFVDLGGVDGLLHITDMAWKRIKHPSEIVNVGDEIDVKVLKFDRERNRVSLGLKQLGEDPWVAIKARYPEGTRVMARVTNLTDYGCFAELEEGVEGLVHVSEMDWTNKNIHPSKVVQVGDEVEVMVLDIDEERRRISLGIKQCKSNPWEDFSSRYNKGDRITGTIKSITDFGIFIGLEGGIDGLVHLSDISWNEQGEEAVRRFKKGDELETVILSVDPERERISLGVKQLADDPFSSYASLNEKGSIVHGTVKEVDAKGAIVDLGNDIEAVLKASEISRDRVEDARNVLKEGDEVEAKIISIDRKSRVISLSIKAKDVDDEKDAIKELRKQETEAPGPTTIGDLIRAQMGNQS

SEQ ID NO: 18368 - protein, 411 aa, Spinacia oleracea
MASLAQQLAGGLRCPPLSNSNLSKPFSPKHTLKPRFSPIVSAVAVSNAQTRERQKLKQLFEDAYERCRNAPMEGVSFTIDDFHTALDKYDFNSEMGSRVKGTVFCTDANGALVDITAKSSAYLPLAEACIYRIKNVEEAGIIPGVREEFVIIGENEADDSLILSLRQIQYELAWERCRQLQAEDVVVKGKIVGANKGGVVALVEGLRGFVPFSQISSKSSAEELLEKEIPLKFVEVDEEQSRLVMSNRKAMADSQAQLGIGSVVTGTVQSLKPYGAFIDIGGINGLLHVSQISHDRVSDIATVLQPGDTLKVMILSHDRERGRVSLSTKKLEPTPGDMIRNPKLVFEKAEEMAQTFRQRIAQAEAMARADMLRFQPESGLTLSSDGILGPLTSDLPAEGLDLSVVPPAVES

SEQ ID NO: 18369 - protein, 568 aa, Rickettsia sibirica
MSIKLKQRFVPQLAAMNHEFAEDFSKMLETVDTSHIKEKTVVKGQVIEIKNDIIIVDVGLKNEGRIPKSEFLALPEVGDVVEVFIEKIEGRNGRTILSREKAVKEELWGQLEIMCSKGEFVDGTIFGRVKGGFTVDLSGVVAFLPGSQVDVRPIKDPTSIMNIKQPFKILSMDKKLGNIVVSRRAILEESRSEARDEMLSKIKEGMVLEGTVKNITDYGAFIDLGSVDGLLHLTDISWGRVNHPSEVLDFNQKVKVMVIKFDEKTKRISLGIKQLDSNPWEAIKEEFPVGKQMTGKVTNFADYGVFIELKDGLEGLVHSSEISWLKSNPNPRKTLTIGQEVDFVVLEVDTEKHRVSLSIKQCQENPLTKFAENNPVGTIIKAPIRNITDFGIFVALGNNMDGMIHEGDISWEDKGTDLLKSYKKGDEIECKVLAINIEKEQVSLGIKQLSPNPYQEISDEYKKGTIVKALITAVKDEGLEVLLNDKVAGFIKRTELSDEKDEQKPEMFQIDKEIEAKVVSIEKSTGRILLSVKAHKIAERQKALKEYGSSDNTTNMGDILANALEDKK

SEQ ID NO: 18370 - protein, 468 aa, Plasmodium falciparum 3D7
MVEKEDSYITNKKVEENKMNKIIHIKDEQINKKKNKKNKKNKKEGKSVTKEMNETSNLGLYSNICEEKKHKKKKKEKEKDKDKDKLDALNKNSKKKNKKNDKSNKKEGKKLENNDEMKDDVIISDHEDDIIYEHDDIIYEHDDIIYEHDDIIRDHDDIIRDHDDDILDDNNNTQLKNNDIIINNNNKVITPFDYERLIASEKNKSAIWISYIAFYLEQNNLEEARKVAERALKTIDIHEIDEKLNIYLCYINMECLYGDKLNDIFKRALLCNNEKSIYLHTIHILKKNKKLTQLKDLCEEAIKKFKYSKKIWSCYLQILHNTFKDEEYAHNILLKSLHSLPKKKHLNMIINAARFEYKYSNKERGKTYFEKLIQEYPKRSDLWFTYLDIHINSLTKNENKEKIKLNLKELQFIRNIFERFLSYKFKPRVMKIIFTKWLLFEKSQGNMHSQKTVQEKAYKYVESLNALV

SEQ ID NO: 18371 - protein, 554 aa, Wigglesworthia glossinidia endosymbiont of Glossina brevipalpis
MTESFARLFEESLKKIQTRPGSLVKGTVIAILKDIVLVDAGLKSESAVPIEQFLNNKGHLEVKVGDVIDVTLDAIEDGFGETILSREKAKRKEAWLNLEKAHLDSITVNGIINGKVKGGFTVELNGIRAFLPGSLVDIRPIRDTIHLEGKDLEFKVIKLDQKRNNVVVSRRAVIESENSAERDHILKILQEGSKAVGVVKNLTDYGAFIDLGGVDGLLHITDMAWKRVKHPNEIVSIGDEITVKILKFDKEKTRVSLGLKQLGQDPWIEISKRYPENVKISGKVTNLTDYGCFVEIEEGVEGLVHISEMDWTNKNIHPSKVVNVGDTVNVLVLDIDEERRRISLGLKQCKPNPWKNFSKLNKKGDKVQGRIKSITDFGIFIGLEGGIDGLVHLSDVSWNIQGEEAVKEYKKGDIISAMVLQVDSDRERISLGIKQLSEDPFNYYVKNNKIGDIVDGTISIIEKSKFVIKLDSFVEGYVNIADKKEENITKNFKISNILKLKIIGIDRKNRTINLSFIIDDYKKKSNKNDKKNNSIEDSFSNVMTEAFKAATKSD

SEQ ID NO: 18372 - protein, 1838 aa, Arabidopsis thaliana
MVVPQKKFANGKRNDSTKSFKPMKKPFKKTKDDVAARSEAMALQLEDVPDFPRGGGTSLSKKEREKLYEEVDAEFDADERVSKKSKGGKSKKRIPSDLDDLGLLFGGGLHGKRPRYANKITTKNISPGMKLLGVVTEVNQKDIVISLPGGLRGLVRASEVSDFTDRGIEVFSANVKSIEDHGSILHFGLPSITGFIEISDDGNQESGMKTGQLIQGVVTKIDRDRKIVHLSSDPDSVAKCLTKDLSGMSFDLLIPGMMVNARVQSVLENGILFDFLTYFNGTVDLFHLKNPLSNKSWKDEYNQNKTVNARILFIDPSSRAVGLTLSPHVVCNKAPPLHVFSGDIFDEAKVVRIDKSGLLLELPSKPTPTPAYVSFKEGNHIRVRVLGLKQMEGLAVGTLKESAFEGPVFTHSDVKPGMVTKAKVISVDTFGAIVQFSGGLKAMCPLRHMSEFEVTKPRKKFKVGAELVFRVLGCKSKRITVTYKKTLVKSKLPILSSYTDATEGLVTHGWITKIEKHGCFVRFYNGVQGFVPRFELGLEPGSDPDSVFHVGEVVKCRVTSAVHGTQRITLNDSIKLGSIVSGIIDTITSQAVIVRVKSKSVVKGTISAEHLADHHEQAKLIMSLLRPGYELDKLLVLDIEGNNMALSSKYSLIKLAEELPSDFNQLQPNSVVHGYVCNLIENGCFVRFLGRLTGFAPRSKAIDDPKADVSESFFVGQSVRANIVDVNQEKSRITLSLKQSSCASVDASFVQEYFLMDEKISDLQSSDITKSDCSWVEKFSIGSLIKGTIQEQNDLGVVVNFDNINNVLGFIPQHHMGGATLVPGSVVNAVVLDISRAERLVDLSLRPELLNNLTKEVSNSSKKKRKRGISKELEVHQRVSAVVEIVKEQHLVLSIPEHGYTIGYASVSDYNTQKLPVKQFSTGQSVVASVKAVQNPLTSGRLLLLLDSVSGTSETSRSKRAKKKSSCEVGSVVHAEITEIKPFELRVNFGNSFRGRIHITEVLVNDASTSDEPFAKFRVGQSISARVVAKPCHTDIKKTQLWELSVKPAMLKDSSEFNDTQESEQLEFAAGQCVIGYVYKVDKEWVWLAVSRNVTARIFILDTSCKAHELEEFERRFPIGKAVSGYVLTYNKEKKTLRLVQRPLLFIHKSIANGGGSKTDKPDSSIPGDDDTLFIHEGDILGGRISKILPGVGGLRVQLGPYVFGRVHFTEINDSWVPDPLDGFREGQFVKCKVLEISSSSKGTWQIELSLRTSLDGMSSADHLSEDLKNNDNVCKRFERIEDLSPDMGVQGYVKNTMSKGCFIILSRTVEAKVRLSNLCDTFVKEPEKEFPVGKLVTGRVLNVEPLSKRIEVTLKTVNAGGRPKSESYDLKKLHVGDMISGRIRRVEPFGLFIDIDQTGMVGLCHISQLSDDRMENVQARYKAGESVRAKILKLDEEKKRISLGMKSSYLMNGDDDKAQPLSEDNTSMECDPINDPKSEVLAAVDDFGFQETSGGTSLVLAQVESRASIPPLEVDLDDIEETDFDSSQNQEKLLGANKDEKSKRREKQKDKEEREKKIQAAEGRLLEHHAPENADEFEKLVRSSPNSSFVWIKYMAFMLSLADIEKARSIAERALRTINIREEEEKLNIWVAYFNLENEHGNPPEESVKKVFERARQYCDPKKVYLALLGVYERTEQYKLADKLLDEMIKKFKQSCKIWLRKIQSSLKQNEEAIQSVVNRALLCLPRHKHIKFISQTAILEFKCGVADRGRSLFEGVLREYPKRTDLWSVYLDQEIRLGEDDVIRSLFERAISLSLPPKKMKFLFKKFLEYEKSVGDEERVEYVKQRAMEYANSTLA

SEQ ID NO: 18373 - protein, 1765 aa, Arabidopsis thaliana
MKLLGVVTEVNQKDIVISLPGGLRGLVRASEVSDFTDRGIEDDENELLGDIFSVGQLVPCIVLELDDDKKEAGKRKIWLSLRLSLLHKGFSFDSFQLGMVFSANVKSIEDHGSILHFGLPSITGFIEISDDGNQESGMKTGQLIQGVVTKIDRDRKIVHLSSDPDSVAKCLTKDLSGMSFDLLIPGMMVNARVQSVLENGILFDFLTYFNGTVDLFHLKNPLSNKSWKDEYNQNKTVNARILFIDPSSRAVGLTLSPHVVCNKAPPLHVFSGDIFDEAKVVRIDKSGLLLELPSKPTPTPAYTYDAAGDEVTKLEKKFKEGNHIRVRVLGLKQMEGLAVGTLKESAFEGPVFTHSDVKPGMVTKAKVISVDTFGAIVQFSGGLKAMCPLRHMSEFEVTKPRKKFKVGAELVFRVLGCKSKRITVTYKKTLVKSKLPILSSYTDATEGLVTHGWITKIEKHGCFVRFYNGVQGFVPRFELGLEPGSDPDSVFHVGEVVKCRVTSAVHGTQRITLSFMIKPSSVSEDDSIKLGSIVSGIIDTITSQAVIVRVKSKSVVKGTISAEHLADHHEQAKLIMSLLRPGYELDKLLVLDIEGNNMALSSKYSLIKLAEELPSDFNQLQPNSVVHGYVCNLIENGCFVRFLGRLTGFAPRSKAIDDPKADVSESFFVGQSVRANIVDVNQEKSRITLSLKQSSCASVDASFVQEYFLMDEKISDLQSSDITKSDCSWVEKFSIGSLIKGTIQEQNDLGVVVNFDNINNVLGFIPQHHMGGATLVPGSVVNAVVLDISRAERLVDLSLRPELLNNLTKEVSNSSKKKRKRGISKELEVHQRVSAVVEIVKEQHLVLSIPEHGYTIGYASVSDYNTQKLPVKQFSTGQSVVASVKAVQNPLTSGRLLLLLDSVSGTSETSRSKRAKKKSSCEVGSVVHAEVNDASTSDEPFAKFRVGQSISARVVAKPCHTDIKKTQLWELSVKPAMLKDSSEFNDTQESEQLEFAAGQCVIGYVYKVDKEWVWLAVSRNVTARIFILDTSCKAHELEEFERRFPIGKAVSGYVLTYNKEKKTLRLVQRPLLFIHKSIANGGGSKTDKPDSSIPGDDDTLFIHEGDILGGRISKILPGVGGLRVQLGPYVFGRVHFTEINDSWVPDPLDGFREGQFVKCKVLEISSSSKGTWQIELSLRTSLDGMSSADHLSEDLKNNDNVCKRFERIEDLSPDMGVQGYVKNTMSKGCFIILSRTVEAKVRLSNLCDTFVKEPEKEFPVGKLVTGRVLNVEPLSKRIEVTLKTVNAGGRPKSESYDLKKLHVGDMISGRIRRVEPFGLFIDIDQTGMVGLCHISQLSDDRMENVQARYKAGESVRAKILKLDEEKKRISLGMKSSYLMNGDDDKAQPLSEDNTSMECDPINDPKSEVLAAVDDFGFQETSGGTSLVLAQVESRASIPPLEVDLDDIEETDFDSSQNQEKLLGANKDEKSKRREKQKDKEEREKKIQAAEGRLLEHHAPENADEFEKLVRSSPNSSFVWIKYMAFMLSLADIEKARSIAERALRTINIREEEEKLNIWVAYFNLENEHGNPPEESVKKVFERARQYCDPKKVYLALLGVYERTEQYKLADKLLDEMIKKFKQSCKIWLRKIQSSLKQNEEAIQSVVNRALLCLPRHKHIKFISQTAILEFKCGVADRGRSLFEGVLREYPKRTDLWSVYLDQEIRLGEDDVIRSLFERAISLSLPPKKMKFLFKKFLEYEKSVGDEERVEYVKQRAMEYANSTLA

SEQ ID NO: 18374 - protein, 1111 aa, Arabidopsis thaliana
AIDDPKADVSESFFVGQSVRANIVDVNQEKSRITLSLKQSSCASVDASFVQEYFLMDEKISDLQSSDITKSDCSWVEKFSIGSLIKGTIQEQNDLGVVVNFDNINNVLGFIPQHHMGGATLVPGSVVNAVVLDISRAERLVDLSLRPELLNNLTKEVSNSSKKKRKRGISKELEVHQRVSAVVEIVKEQHLVLSIPEHGYTIGYASVSDYNTQKLPVKQFSTGQSVVASVKAVQNPLTSGRLLLLLDSVSGTSETSRSKRAKKKSSCEVGSVVHAEVNDASTSDEPFAKFRVGQSISARVVAKPCHTDIKKTQLWELSVKPAMLKDSSEFNDTQESEQLEFAAGQCVIGYVYKVDKEWVWLAVSRNVTARIFILDTSCKAHELEEFERRFPIGKAVSGYVLTYNKEKKTLRLVQRPLLFIHKSIANGGGSKTDKPDSSIPGDDDTLFIHEGDILGGRISKILPGVGGLRVQLGPYVFGRVHFTEINDSWVPDPLDGFREGQFVKCKVLEISSSSKGTWQIELSLRTSLDGMSSADHLSEDLKNNDNVCKRFERIEDLSPDMGVQGYVKNTMSKGCFIILSRTVEAKVRLSNLCDTFVKEPEKEFPVGKLVTGRVLNVEPLSKRIEVTLKTVNAGGRPKSESYDLKKLHVGDMISGRIRRVEPFGLFIDIDQTGMVGLCHISQLSDDRMENVQARYKAGESVRAKILKLDEEKKRISLGMKSSYLMNGDDDKAQPLSEDNTSMECDPINDPKSEVLAAVDDFGFQETSGGTSLVLAQVESRASIPPLEVDLDDIEETDFDSSQNQEKLLGANKDEKSKRREKQKDKEEREKKIQAAEGRLLEHHAPENADEFEKLVRSSPNSSFVWIKYMAFMLSLADIEKARSIAERALRTINIREEEEKLNIWVAYFNLENEHGNPPEESVKKVFERARQYCDPKKVYLALLGVYERTEQYKLADKLLDEMIKKFKQSCKIWLRKIQSSLKQNEEAIQSVVNRALLCLPRHKHIKFISQTAILEFKCGVADRGRSLFEGVLREYPKRTDLWSVYLDQEIRLGEDDVIRSLFERAISLSLPPKKMKFLFKKFLEYEKSVGDEERVEYVKQRAMEYANSTLA

SEQ ID NO: 18375 - protein, 1396 aa, Arabidopsis thaliana
MVVPQKKFANGKRNDSTKSFKPMKKPFKKTKDDVAARSEAMALQLEDVPDFPRGGGTSLSKKEREKLYEEVDAEFDADERVSKKSKGGKSKKRIPSDLDDLGLLFGGGLHGKRPRYANKITTKNISPGMKLLGVVTEVNQKDIVISLPGGLRGLVRASEVSDFTDRGIEDDENELLGDIFSVGQLVPCIVLELDDDKKEAGKRKIWLSLRLSLLHKGFSFDSFQLGMVFSANVKSIEDHGSILHFGLPSITGFIEISDDGNQESGMKTGQLIQGVVTKIDRDRKIVHLSSDPDSVAKCLTKDLSGMSFDLLIPGMMVNARVQSVLENGILFDFLTYFNGTVDLFHLKNPLSNKSWKDEYNQNKTVNARILFIDPSSRAVGLTLSPHVVCNKAPPLHVFSGDIFDEAKVVRIDKSGLLLELPSKPTPTPAYVSTYDAAGDEVTKLEKKFKEGNHIRVRVLGLKQMEGLAVGTLKESAFEGPVFTHSDVKPGMVTKAKVISVDTFGAIVQFSGGLKAMCPLRHMSEFEVTKPRKKFKVGAELVFRVLGCKSKRITVTYKKTLVKSKLPILSSYTDATEGLVTHGWITKIEKHGCFVRFYNGVQGFVPRFELGLEPGSDPDSVFHVGEVVKCRVTSAVHGTQRITLSFMIKPSSVSEDDSIKLGSIVSGIIDTITSQAVIVRVKSKSVVKGTISAEHLADHHEQAKLIMSLLRPGYELDKLLVLDIEGNNMALSSKYSLIKLAEELPSDFNQLQPNSVVHGYVCNLIENGCFVRFLGRLTGFAPRSKAIDDPKADVSESFFVGQSVRANIVDVNQEKSRITLSLKQSSCASVDASFVQEYFLMDEKISDLQSSDITKSDCSWVEKFSIGSLIKGTIQEQNDLGVVVNFDNINNVLGFIPQHHMGGATLVPGSVVNAVVLDISRAERLVDLSLRPELLNNLTKEVSNSSKKKRKRGISKELEVHQRVSAVVEIVKEQHLVLSIPEHGYTIGYASVSDYNTQKLPVKQFSTGQSVVASVKAVQNPLTSGRLLLLLDSVSGTSETSRSKRAKKKSSCEVGSVVHAEVNDASTSDEPFAKFRVGQSISARVVAKPCHTDIKKTQLWELSVKPAMLKDSSEFNDTQESEQLEFAAGQCVIGYVYKVDKEWVWLAVSRNVTARIFILDTSCKAHELEEFERRFPIGKAVSGYVLTYNKEKKTLRLVQRPLLFIHKSIANGGGSKTDKPDSSIPGDDDTLFIHEGDILGGRISKILPGVGGLRVQLGPYVFGRVHFTEINDSWVPDPLDGFREGQFVKCKVLEISSSSKGTWQIELSLRTSLDGMSSADHLSEDLKNNDNVCKRFERIEDLSPDMGVQGYVKNTMSKGCFIILSRTVEAKVRLSNLCDTFVKEPEKEFPVGKLVTG

SEQ ID NO: 18376 - protein, 392 aa, Arabidopsis thaliana
MAVFSGATTLGSVSFASHLFDQQSTFLSCPLRLLPSSSSSSSNRNSLVCIVKSFSSSATADTDRNSDQSASSSVLSASNSLLRDTSDEASAAGPSDWKTAKAYCKSGDTFEGEVQGFNGGGLLIRFHSLVGFLPYPQLSPSRSCKEPQKSIHEIAKTLVGSKLPVKVVQADEENRKLILSEKLALWPKYSQNVNVGDVFNGRVGSVEDYGAFIHLRFDDGLYHLTGLVHVSEVSWDYVQDVRDVLRDGDEVRVIVTNIDKEKSRITLSIKQLEDDPLLETLDKVILKDSSTGSPSLSSNNGDTIEPLPGLETILEELLKEDGIEAVKINRQGFEKRVVSQDLQLWLSNTPPSDGKFVLLARAGRQVQEIHLTTSLEQGGIKKALQHVLERVP

SEQ ID NO: 18377 - protein, 565 aa, Mesorhizobium loti
MSAANPTRDDFASLLEESFTTGHSGEGQVVKGTITAIEKDMAIIDVGLKVEGRVPLKEFGVKGKDTTLKVGDTVEVYVERIENALGEAMLSREKARREESWVRLEEKFTKGERVEGVIFNQVKGGFTVDLDGAVAFLPRSQVDIRPIRDVSPLMHNPQPFEILKMDRRRGNIVVSRRTVLEESRAEQRSEIVQNLEEGQVVEGVVKNITDYGAFVDLGGIDGLLHVTDMAWRRVNHPTEILNIGQTVKVQIIRINQETHRISLGMKQLESDPWSEIGTKFPIGKKIKGTVTNITDYGAFVELEPGIEGLIHVSEMSWTKKNVHPGKILSTTQEVDVVVLEVDPAKRRISLGLKQTLENPWEAFARNHPVGSQVEGEVKNKTEFGLFIGLEGDVDGMVHLSDLDWTRPGEQVIEEYNRGDMVKAQVLDVDIEKERISLGIKQLARDTVGEAATSGELRKNAVVTCEVIGVKDGGLEVRLVDSGIETFIKRSDLSRDRDEQRPERFTVGQKVDARVIAFDKKTRKLQVSIKALEIAEEKEAVAQYGSTDSGASLGDILGAALKKQGN

SEQ ID NO: 18378 - protein, 568 aa, Sinorhizobium meliloti
MSATNPTRDDFAALLEESFAKTDLAEGYVAKGIVTAIEKDVAIVDVGLKVEGRVPLKEFGAKAKDGTLKVGDEVEVYVERIENALGERVLSREKARREESWQRLEVKFEAGERVEGIIFNQVKGGFTVDLDGAVAFLPRSQVDIRPIRDVTPADAQPAALRNLKMDKRRGNIVVSRRTVLEESRAEQRSEIVQNLEEGQVVEGVVKNITDYGAFVDLGGIDGLLHVTDMAWRRVKHPSEIQNIGQQVKVQIIRINQETHRISLGMKQLESDPWDGIGAKYPVGKKISGTVTNITDYGAFVELEPGIEGLIHISEMSWTKKNVHPGKILSTSQEVDVVVLEVDPTKRRISLGLKQTLENPWQAFAHSHPAGTEVEGEVKNKTEFGLFIGLDGDVDGMVHLSDLDWNRPGEQVIEEFNKGDVVRAVVLDVDVDKERISLGIKQLGRDAVGEAAASGELRKNAVVSAEVIGVNDGGIEVRLVNHEDVTAFIRRADLSRDRDEQRPERFSVGQTVDARVTNFSKKDRKIQLSIKALEIAEEKEAVAQFGSSDSGRSLGDILGAALKNRQNNE

SEQ ID NO: 18379 - protein, 568 aa, Sinorhizobium meliloti
MSATNPTRDDFAALLEESFAKTDLAEGYVAKGIVTAIEKDVAIVDVGLKVEGRVPLKEFGAKAKDGTLKVGDEVEVYVERIENALGEAVLSREKARREESWQRLEVKFEAGERVEGIIFNQVKGGFTVDLDGAVAFLPRSQVDIRPIRDVTPLMHNPQPFEILKMDKRRGNIVVSRRTVLEESRAEQRSEIVQNLEEGQVVEGVVKNITDYGAFVDLGGIDGLLHVTDMAWRRVNHPSEILNIGQQVKVQIIRINQETHRISLGMKQLESDPWDGIGAKYPVGKKISGTVTNITDYGAFVELEPGIEGLIHISEMSWTKKNVHPGKILSTSQEVDVVVLEVDPTKRRISLGLKQTLENPWQAFAHSHPAGTEVEGEVKNKTEFGLFIGLDGDVDGMVHLSDLDWNRPGEQVIEEFNKGDVVRAVVLDVDVDKERISLGIKQLGRDAVGEAAASGELRKNAVVSAEVIGVNDGGIEVRLVNHEDVTAFIRRADLSRDRDEQRPERFSVGQTVDARVTNFSKKDRKIQLSIKALEIAEEKEAVAQFGSSDSGASLGDILGAALKNRQNNE

SEQ ID NO: 18380 - protein, 349 aa, Glycine max
  unsure (1)..(349): unsure at all Xaa locations
XPSATXLPXPPQERADIPPLDVALDDFDQFDANNTNSQSEEHANEEDIVNEKHKRREKKKAKEEREKQIRAAEERLLEDDVPRTADEFEKLIRSSPNSSFTWIKYMDFMVSMVDVEKARSIAERALRTINIREENEKLNIWKAYFNLENKYGNPREEAVMKVFQRALQYNDPKKVYLALLGMYERTEQHNLADELLNKMTKKYKHSCKVXLRRIQSLLKQNKDGIQPXVIDRASLSLPKHKHIKFFSQTAILEFKVGFPDRGRSMFEKILREYPKRTDLWSVYLDQEIQHKDEDIIHALFERAVSLSLPPKKMKFLFKKYLDYEMSQGDQERIESVKRKAIEYVESLNN

SEQ ID NO: 18381 - protein, 532 aa, Glycine max
  unsure (1)..(532): unsure at all Xaa locations
KRRREASKDLVLHQTVNAVVEIVKENYLVLSIPENDYTIGYASVSDYNAQRFPHKQYQHGQSVVATVMALPSPETSGRLLLLVDVVNETSSSSKRTKKKSSYKVGTLVEAEITDIKTLELKLKFGFGLYGRIHITAARPGNVLENPFSSYKVGQTVTARIVAKPNESDGKKGSQWELSVRPEMVTGSSDIDDVSENLEFKIGQCVAGYVYKVESEWVWLTISRNVRAQLYILDGATEPSELEDFQNRYHVGQPVSGHVLSVNMEKKLLRLGCAPLXXYSSLRNXSEEPLTNVVDKGLTAHVHEGDILGGRVSKILPGVGGLLVQVGPRTYGKVHFTELADTLVPDPLSGYHEEQFVKCVVLEVSHTVKGTIHVDLSLGSSNVKLSQDSAVNANXXKCVEKIEDLHPDMIVKGYIKNVTPKGCFIMLSRKIDAKILLSNLSEQYVQEPEKEFPVGKLVIGRVTSVEPLSNRVEVTLKTSTAPNIPKSETMDLSKFHVGDVVSGXRIKRVESLGLFIPLDNTYMVGLCPISEIS

SEQ ID NO: 18382 - protein, 362 aa, Triticum aestivum
  unsure (1)..(362): unsure at all Xaa locations
XPMDISRAPQMSGGFNSTLVLPGPEPRASVPPLQVALDEYEGSDQEGDQKAHEIANGSEPNVKKSDRRLKEKARKQREIEISALEERALQKDIPQTPDEFEKLVRTSPNSSFVWIKYMAFLLDLADVEKARSVAERALRTINIREEEEKLNVWVAYFNLENEYGSPREDAVKKIFQRALQYCDPKKVHLALLGMYERTKQNELADELFDRMTKRFKTSCKIWLRRIQFSLTQGKDVEYIKSVVNRALLSLPQSKRIKFLTQTAILEFKCGVAEEGRSRFELILREYPKRTDIWSVYLDQEIRLGEREIIRALFDRVTCLSLPPRKMKFLFKKYLRYEKAQGDEERIKHVKQKAMEFVEICRA

SEQ ID NO: 18383 - protein, 621 aa, Zea mays
  unsure (1)..(621): unsure at all Xaa locations
XGRVQKILPGVGGLVVQIGPHLHGRVHYTEIVDSWVSEPLSGFHEGQFVKCKVLSVSRSSEGSLRVDLSLRSSNLIRDSNNSRLDDLETCTSRIEKIKDLLPGTEIKGYVKNVNSKGCFIMLSRMVDARITLSNLSDEYVENPQKDFPVGMLVHGRILSTDPSSGRVEASLRKTTGSKLEKLDDISYSDLHVGDIVDGQVKRVESFGLFVTIRRSELVGLCHVSELSDEPVVDINSCYKAGDMVKAKILKIDETRHRVSLGMKKSYXXDSDLTADTNDDESALMDISVAPQMVEYXXNRNLVHPKAEPRASVLPLQVSLDESEGSDLEDNISNTCLEIANGTEANAKKSDKQLKKEARKQRELEISAMEERALQEDIPQTPDDFEKLVRSSPNSSFIWIKYMATLLDLADVKKARAVAERMXVKKVFQRALQYCDPKKLHLALLAMYERTEQYELADELLDRMTKRFKTSCKIWLCRIQFALKQGKDVEYIKAIVNRALLSLPHRKRIKFLSQTAILEFKCGVPEEGRSRFELILREYPKRTDLWSVYLDQEIRLGDVEVIRALFERRVACLTLPPKKMQFLFKKYLNFEKSLGKDNERIQLVQQKAIEYVQSSLPSQDNS

SEQ ID NO: 18384 - protein, 323 aa, Zea mays
  unsure (1)..(323): unsure at all Xaa locations
RRLSHQXEGKGAGGKTDLRPDRKHKEGSKKTKELEISAMEERALQEDIPQTPDDFEKLVRSSPNSSFIWIKYMATLLDLADVEKARAVAERALKTIIPREEEEKLNVWVAYFNLENEYGSPREDAVKKVFQRALQYCDPKKLHLALLAMYERTEQYELADELLDRMTKRFKTSCKIWLCRIQFALKQGKDVEYIKAIVNRALLSLPHRKRIKFLSQTAILEFKCGVPEEGRSRFEIILREYPKRTDLWSVYLDQEIRLGDVEVIRALFERVTCLTLPPKKMQFLFKKYLNFEKSLGKDNERIQLVQQKAIEYVQSSLPSQDNS

SEQ ID NO: 18385 - protein, 354 aa, Zea mays
RRLIHRKAEPRASVLPLQVSLDESEGSDLEDNISNTCLEIANGTEANAKKSDKQLKKEARKQRELEISAMEERALQEDIPQTPDDFEKLVRSSPNSSFIWIKYMATLLDLADVEKARAVAERALKTIIPREEEEKLNVWVAYFNLENEYGSPREDAVKKVFQRALQYCDPKKLHLALLAMYERTEQYELADELLDRMTKRFKTSCKIWLCRIQFALKQGKDVEYIKAIVNRALLSLPHRKRIKFLSQTAILEFKCGVPEEGRSRFELILREYPKRTDLWSVYLDQEIRLGDVEVIRALFERVTCLTLPPKKMQFLFKKYLNFEKSLGKDNERIQLVQQKAIEYVQSSLPSQDNS

SEQ ID NO: 18386 - protein, 307 aa, Zea mays
  unsure (1)..(307): unsure at all Xaa locations
XIGYLEAGRGKIRNAAFSLLSSQARMLSTSKPLKSDKQLKKEARKQRELEISAMEERALQEDIPQTPDDFEKLVRSSPNSSFIWIKYMATLLDLADVKKARAVAERMXVKKVFQRALQYCDPKKLHLALLAMYERTEQYELADELLDRMTKRFKTSCKIWLCRIQFALKQGKDVEYIKAIVNRALLSLPHRKRIKFLSQTAILEFKCGVPEEGRSRFELILREYPKRTDLWSVYLDQEIRLGDVEVIRALFERRVACLTLPPKKMQFLFKKYLNFEKSLGKDNERIQLVQQKAIEYVQSSLPSQDNS

SEQ ID NO: 18387 - protein, 165 aa, Zea mays
  unsure (1)..(165): unsure at all Xaa locations
XLGIRLETLSNLYDXYVENPQKDFRVGMLVHGRILSTDPSSGRVEASLRKTTGSKLEKLDDISYSDLHVGDIVDGQVKRVESFGLFVTIRRSELVGLCHVSELSDEPVGDINSCYKAGDMVKAKILKIDETRHRVSLGMKKSYXXDSDLTADTNDDESASMDISX

SEQ ID NO: 18388 - protein, 262 aa, Zea mays
  unsure (1)..(262): unsure at all Xaa locations
AKVATVEPFGAIVQFXSGVKALCPLPHMSELEHVVKPPKKFKVGAELLFRVLGCKSKRVTVTYKKSLVKSKLDVLSSYADAKIGLVTHGWITHIEKHGCFVKFYNGVQGFVSRSDLGLEAGTEAENVYHVGQVVKCRIINVIPASRKLNVSFVISHNRIAPIDTPKLGSIVSGDVERLTPAAVVVSVNGFSKGTILNEHLADHHGQAAQLKNVLKPGHEFNQLLVLDTEGQNLVLSAKHSLINCANDIPSEISQMHPGVVVH

SEQ ID NO: 18389 - protein, 316 aa, Zea mays
  unsure (1)..(316): unsure at all Xaa locations
IASLSLPPEDGGECRRAPPADWESARACKDQGRIFSLPVLRANSGGLIVRFNSLQGFVPNPLLSPAHWCKDPKRPIQDVTKDLVGTSISVKVAEVNEEEKKLVFSEKDASWSTYSSRIKIGDIYDGIVGSVFHYGAFVHLRFPDGLYHLTGLVHISEVSWDLVQDVKDFLNEGDAVKVIVVNIDMTKSRIALSIRQLEEDPLLETLDKVIPLEADQSPNRMMSPSXXVELLPGLDGICNELLQEDGITDVQFGRQALEKRVVSQDLELWISNVQAKDNRFTLLARAGRQVQEVYLTTSLDQEGIKKSLQRVLGRVP

SEQ ID NO: 18390 - protein, 566 aa, Novosphingobium aromaticivorans
MASNPSRDDFAALLDESLGGAANGGFEGRVVKGTITAIENDKAVIDVGLKSEGRVALREFAAPGQPHGLKVGDEVEVYVDRVENADGEAMLSRDRARREAAWDKLESEFGEGKRVEGVIFGRVKGGFTVDLDGAVAFLPGSQVDIRPVRDVTPLMDMPQPFQILKMDRRRGNIVVSRRAVLEETRAEQRSGLIQNLKEGQIIDGVVKNITDYGAFVDLGGIDGLLHVTDMSYKRVNHPSEVIAIGDTVRVQIIRINQDTQRISLGMKQLESDPWDGVAAKYPVGAKLRGTVTNITEYGAFVELEAGIEGLVHVSEMSWTKKNVHPGKIVSTSQEVDVMVLEVDSDKRRISLGLKQAQQNPWEAFAEKHPVGSTVEGEVKNATEFGLFIGLDGDVDGMVHMSDIAWGISGEDALALHRKGEQVSAVVLDVDVEKERISLGMKQLEKGAPAAGGVASSGSLRRGEVVTVTVLEVRDGGLEVQAGEDGATGFIKRSDLGRDRDEQRPDRFQVGQKIDAMVTGFDRSKKPNFSVKARQLAEEKEAVEQYGSSDAGASLGDILGAALKAKQ

SEQ ID NO: 18391 - protein, 1690 aa, Schizosaccharomyces pombe
MAGNKRKRSNASEGSDSQGNERISSLSANEATQDFPRGGASSLTPLEYKEAVLEAKKDFMESASGTAELSKKTRPKKKGSKKSSKSELDNEENLKVHIQSLRYKNITPGSLILGQIAQINTLDLAVSLPNCLTGYVPITNISDKLSDRLDSIDNHAEDNAATEEEDGLNQIPDLMDLYKVGQWVRVSVTALGSENTTKTGKRHIELSLKPQDANGSAPEAADFVAGSMIQAVVSSIEDHGIVFDIGINNYTGFLSKKHINDFPFVEGQSLLCSVISKEDRIFHLSLTATSTKALEVMPSVQAILPGDYINVLVTDIKESGVIAKYMGVVDVTSDIYHSSPVKGEDLEDKFQLAKSVPARVLFVIPGDPPKIAVSFLPHVLTFNFATPNTPHPDQLDIGFIVNAAKVTYVSSSLGVFCDVGVPEISGFAHISRLSDKKVAGISPNSGPYKVDSTHEARIINYSYVDNLYILSFQQSVLNQQFLRIEDIEVGQFVDGTIAKLIPQGIVVTISEGINGLVPSTHMADIALQFPERRFKVGSSVKCRVLSTNVLRKRVLLTLKKSLLNTDLPLIYDYEQATPGTQTVGTLARIFEDGAIVEFYNSVRAFLPVSEMSEAYIRDAREHFKVGQTLSVTIVSCDPENRKMRVGCREQSWDAKRLERFENIKAGSVLSGIVLQKTEDSVIVDLGDKVTGVITLGQLCDGDLNKCSKVMNKLRASTKLAEVLVLRKDTSKKLISLSLKKSLVEAAKENRMPINITDLKEGIKYFGFVRNATTFGVFVEFCDGLVALVPKAYISEEYVPVPSAVYKPQQSVTCVCLSVELSQEKAFMSFKPLAQKQEKAVEFMESKYDIDNPVDETIKKTYDYVAGKITWAVVTSAKASQLNVDLAANVHGRVDVSEVFDNFGEIVDPNKPLKRFHKGDKIRVRVLGIHDSRNHKFLPISHRVSPKQFLELSVRPSILNMEPFSMKEPQFKKGDEVTGFVNNVSKECVWVSLTPSVNGRIPILDLTTDVKELNSLQKHFFLGKAIKCYVVNAEDSITLSAIGPLQGFENLTPGSRLVGKVTNVNEAGAILQLPGHMSGRVSRIDMFDDYDILPETKFTRNNLVGVCVLSVDVPNRKVALSARNSRTQSQPVEIKDKEINSVDDLKIGDICRGFVCNVANQGLFVTIGHNLIARVKIGELFDTFIKDWKPHFHVNQLVKGSIVGIDNDSKRIEMSLKQSKIKDSSEITKTFADIAVGSNLDGTVVKVGDYGVLIRIDGTDNIVGLCHKSEIADAVVLNISKLYSSGDKVRAHVLDVDSEKRRIALGLKSSYFDSDSDISMSDNEEDVEMRSEDQSDTSESEVGSKDDVQSEEVENLESAGDEDEEEEPSALQANGFDWTDGSTVFDKLADDTEDSEDEEDEEPKRKKSKSDRFDDEEKDLDEIPSTAADFERQLLSSPNSSLLWISYMAYHLNLNELQEAREVGKRALSTINYREEDEKLNVWMALLNLEVAYGTEDSLKEVFKEACAYCDALIVYEKLCGILIKGGKVDLADEYMQLMLKNFKQVPSVWIQYATFLLNNDKAEKAHGLLERSLQSLPKSEHVGIIEKFAILEFKNGDPERGRTIFEGLLSSYPKRLDLWNVLIDMEMKQDDPSIVRRLFQRLLALNLSTKKAKFAFKKWLAYEKNIGDDEGAEQVKRRAIEYVSESHSEN

SEQ ID NO: 18392 - protein, 498 aa, Desulfitobacterium hafniense
ANFHGIVDELKTHTHALKVHNTICNATEERQTVARELAGKVDVMIVVGGKNSANTRKLAGICSERTQTYLIETADELEDNWFTGVVTVGLTAGASTPDWIIEEVYRKMSTMENKETHEMMNMEDWAEGMQNLHRGALVTGTVVKINHDEVFVDLGWKSEGVIALKELTVASDLQTSDIVAIGDQISAVVLRVENEEGNPVLSKRRADEMAAVDKLKELAESKEEIQGKVADVVKGGLIVDVGMRGFVPASQIQPGYVEDLNQFKGQTLRLRVIEFDPAKRRVVLSQKEILQEEQAAKKEHLLATLQEGDVVSGVVKRLAQFGAFVDIGGVDGLLHVSDIAYTRIKHPSEYVNVGDEVEVQILKVDKEQGKISLGLKQLKPSPWESAPEKYALGSLVTGKVVRIAPFGAFVQLEDGIDALIHISQLSEKRVNKVEDVVKVGDMVQAKVIECKPEEKRISLSIREAAAEAQATEDAELLASQPEAPQVTIGDVVQSESES

SEQ ID NO: 18393 - protein, 1779 aa, Neurospora crassa
MGAQKRKEGPGGAPVNKSTQSASESRPSKRPKSNDAGSKAGAKTGKQGNKPAPKSDKPAPPAPTAPATSTLLKEEEPMFPRGGASILTPLEYKQIQVQAKNDALFEEQSSKATAKKAGEKEGKQKKSKKRSKSDDTPAKPDADAVKVESLNFKRLVKGSLVLGSVCAINSLDIAVALPNNIIGHVPITAISAPLTKRLEASAGNDNAEESEDENDNDVDLESLFQIGQYVRAYVVSTVDEASTHTPGKAKRHIELSLQPSLANTGMAEQDVVVNSTVMAAIASVEDHGYVMDIEIADSKLQGFLARKQVDKSIPQEALQPGAVLLCIVTKNAKGKVVQLSTLGETMGNVENVPSTATTIDTFLPGTAADVLVSEVSSHGIVGKIMGSLDVTADLVHSGAGPDGIDLEDTYKVGSRLKARVICNFPTAKHPKLGISVLKHVTSLKPKTASKDDQPVVPLQALPHSTIVEKCTVKQVEPEIGLYVDVGVEGVSGFVHISRVKDGKVDALFENSGPYKVGSVHAGRVVGYNAFDGMYLISLEKSVLEQPFLRIEDIPVGAVVSGVVEKMVVNAAGVGGLIVKIADGISGLVPEMHFADVHLQNPEKKFREGLKVKARVLSTDAASRQIRLTLKKTLALGTIINVLQHGAIVQFYGRLRGFLPVSEMSEAYIQDPKEHFRVGQTVSIYVISFDPDAAKLIVSCKDPSAFGLEKQLALKKLQIGDVVSAKVTQKTDDDVFVELADSSLKAILPVAHLTDKSVSKTQSALKKIHVNQTLAELVILEKNEARRSIILSQKPSLVKASKEGKFLTTLDGARVGDEVSGYIRNITATAVFVQFGGKLTALLPKSMIPREDQDKPDFGMFKSQSVTVKITSVNTELNRLVVAIPGAAEQVKKVETKGEKVANPVDESITTLDDISIGKLTKARIVSVKDTQLNVQLADNIQGRIDVSQVYDSWEQIKDTKKPLKRFQPNQVVPVRVLGVHDARNHRFLPISHRSSHSVLELSAKPSDVKEGASSEPLSFDNLKVGSSYVGFVNNVGQGHLWVNLSPTVRGRVNAMEASDDVSLLTNLAKNFPIGSALRVRVVSVDAESKRLDLSARSPGSEDELTWDKIAQDVILVGKITKVDERQVIVKLSESLAGPVHKVDLVDDYEEANPAKFAKNEIVRVAVVEVDKSNKRIRLSTRPSRILNSSLPVKDKEITQNTKLEVGEIVRGFVKNVSDKGLFVTLGGTVTAFVQIKNLSDAYLKYWKEQFQVDQLVKGRIISVANGRIEMSLKPSVVDKDYVPLTTISDLKEGQTITGRVRKVEEFGAFIDIDGSANLSGLCHRSEMSDKTVKDARKLYEEGDKVKAKVLKVDITAKRINLGLKPSYFGEQDDEDEMDVDEEDAEDSEGDDSDEDMSDADDAVQITGTDNVEDESEDEDEASDVEMVDADVKGLEAGGFDWSASLEDGEKANASAADLEALAKKKKARREPQVTVDKTASLDVDGPQTASDYERLLLGQPNSSQLWIAYMAFQMQVSDLAAARQVAERAIKTINIKEEIEKLNVWIAYLNLEVAYGNEETVDEVFKRACTYNDKQEVHERLASIYIQSGKRKQADDLFEKIVKEFGYKSPEVWVNYAHFLHTTAHSPDRARALLKRATQVLGKETHMYLALLPKFAALEFRSPNGDKEQGRTLFENLLATYPKKFDLWNQLIDLETSAADADKGVIRDLFDRGSKVKGLKPRQAKAWFRRWAQWEEKNGDKKSRERVSAKAQEWARTAAEKKKTAAASAAQEEESGDEE

SEQ ID NO: 18394 - protein, 556 aa, Escherichia coli
MTESFAQLFEESLKEIETRPGSIVRGVVVAIDKDVVLVDAGLKSESAIPAEQFKNAQGELEIQVGDEVDVALDAVEDGFGETLLSREKAKRHEAWITLEKAYEDAETVTGVINGKVKGGFTVELNGIRAFLPGSLVDVRPVRDTLHLEGKELEFKVIKLDQKRNNVVVSRRAVIESENSADDQLLENLQEGMEVKGIVKNLTDYGAFVDLGGVDGLLHITDMAWKRVKHPSEIVNVGDEITVKVLKFDRERTRVSLGLKQLGEDPWVAIAKRYPEGTKLTGRVTNLTDYGCFVEIEEGVEGLVHVSEMDWTNKNIHPSKVVNVGDVVEVMVLDIDEERRRISLGLKQCKANPWQQFAETHNKGDRVEGKIKSITDFGIFIGLDGGIDGLVHLSDISWNVAGEEAVREYKKGDEIAAVVLQVDAERERISLGVKQLAEDPFNNWVALNKKGVIVTGKVTAVDAKGATVELADGVEGYLRASEASRDRVEDATLVLSVGDEVEAKFTGVDRKNRAISLSVRAKDEADEKDAIATVNKQEDANFSNNAMAEAFKAAKGE

SEQ ID NO: 18395 - protein, 557 aa, Escherichia coli
MTESFAQLFEESLKEIETRPGSIVRGVVVAIDKDVVLVDAGLKSESAIPAEQFKNAQGELEIQVGDEVDVALDAVEDGFGETLLSREKAKRHEAWITLEKAYEDAETVTGVINGKVKGGFTVELDGIRAFLPGSLVDVRPVRDTLHLEGKELEFKVIKLDQKRNNVVVSRRAVIESENSAERDQLLENLQEGMEVKGIVKNLTDYGAFVDLGGVDGLLHITDMAWKRVKHPSEIVNVGDEITVKVLKFDRERTRVSLGLKQLGEDPWVAIAKRYPEGTKLTGRVTNLTDYGCFVEIEEGVEGLVHVSEMDWTNKNIHPSKVVNVGDVVEVMVLDIDEERRRISLGLKQCKANPWQQFAETHNKGDRVEGKIKSITDFGIFIGLDGGIDGLVHLSDISWNVAGEEAVREYKKGDEIAAVVLQVDAERERISLGVKQLAEDPFNNWVALNKKGAIVTGKVTAVDAKGATVELADGVEGYLRASEASRDRVEDATLVLSVGDEVEAKFTGVDRKNRAISLSVRAKDEADEKDAIATVNKQEDANFSNNAMAEAFKAAKGE

SEQ ID NO: 18396 - protein, 556 aa, Escherichia coli
MTESFAQLFEESLKEIETRPGSIVRGVVVAIDKDVVLVDAGLKSESAIPAEQFKNAQGELEIQVGDEVDVALDAVEDGFGETLLSREKAKRHEAWITLEKAYEDAETVTGVINGKVKGGFTVELNGIRAFLPGSLVDVRPVRDTLHLEGKELEFKVIKLDQKRNNVVVSRRAVIESENSADDQLLENLQEGMEVKGIVKNLTDYGAFVDLGGVDGLLHITDMAWKRVKHPSEIVNVGDEITVKVLKFDRERTRVSLGLKQLGEDPWVAIAKRYPEGTKLTGRVTNLTDYGCFVEIEEGVEGLVHVSEMDWTNKNIHPSKVVNVGDVVEVMVLDIDEERRRISLGLKQCKANPWQQFAETHNKGDRVEGKIKSITDFGIFIGLDGGIDGLVHLSDISWNVAGEEAVREYKKGDEIAAVVLQVDAERERISLGVKQLAEDPFNNWVALNKKGAIVTGKVTAVDAKGATVELADGVEGYLRASEASRDRVEDATLVLSVGDEVEAKFTGVDRKNRAISLSVRAKDEADEKDAIATVNKQEDANFSNNAMAEAFKAAKGE

SEQ ID NO: 18397 - protein, 679 aa, Trypanosoma brucei
MQYREYRVHHAAPDGILVQLPGNGGFGKLTVETLGGDALAAALLKRFATNDHIRAVARPTRDVHHYRLLSVQLLELWSGAATYPAPVLSLLLQLFRKHALIGLGTTAMARVVKSSPEKGVVLSLPGGIPAVAVLENVSEEAGAVEVRLLNYDVQVDVVNVTVQYDVVERTPSDVDALQKLLTSVTAGSVVSATVLVSCTDDNCAIVEVPCGDECSVIGYYIYNWPGLSAAGDEKPVVGSCLQLTVEFVPEEPALQDVLPFFVLSRRQHFAGLPAVRCAILPNTSTPHATVGLVGRFPWRDKKRDRRPEVEDINDPDDDDSDDDENTNVNRSKIRKRKLEETIDAYERSMETAVPSSSEEFQRLLLASPNNSYLWVQWMTHHVSLQQFEEARLVAEKALTTIGVRETQERLNVWVAYMNLENLHGTAESLASVFKRALRHALDELVVYERLADIFSATRKFNQLLSLCRAMVSKNRKVPRVWERLGTVLIDHNKRDQLKRVLKDMSDALKRDEYALVVVHLGVHEYRNGSVENGRALFEGLLLRMPKKSDVWSVYLDQELGLLARRSEVASAVFVRGLFERAVSTSFSAKVMQQVLTRFMSFERAHGTPADVEKVKARARSYVEAKISASVGSVDPTVKTGGVSVKKGATKDFNATSASAKGSSVSDEATDKHYDGEAEE

SEQ ID NO: 18398 - protein, 378 aa, Providencia sp.
ETVTGVINGKVKGGFTVELNGIRAFLPGSLVDVRPVRDTTHLEGKELEFKVIKLDQKRNNVVVSRRAVIESESSAERDQLLENLQEGMEVKGIVKNLTDYGAFVDLGGVDGLLHITDMAWKRVKHPSEIVNVGDEITVKVLKFDRERTRVSLGLKQLGEDPWVAIAKRYPEGTKLTGRVTNLTDYGCFVEIEEGVEGLVHVSEMDWTNKNIHPSKVVNVGDVVEVMVLDIDEERRRISLGLKQCKSNPWQQFAETHNKGDRVEGKIKSITDFGIFIGLEGGIDGLVHLSDISWNVAGEEAVREYKKGDEIAAVVLQVDAERERISLGVKQLAEDPFNNYLAATKKGAIVTGKVTAVDAKGATVELTLGVEGYLRASEA

SEQ ID NO: 18399 - protein, 363 aa, Prochlorococcus marinus subsp. pastoris str. CCMP1378
MIENPSQIVKEISDEKEIENSTIEENTSDTPKEEDLSFDHKDIPSADSSSSRRNNDLDTAGFTQEEFASLLGKYDYNFKPGDLVKGTVFALEPKGAMIDIGAKTAAFMPMQEVSINRVEGLSDVLQPSESREFFIMSEENEDGQLALSIRRIEYQRAWERVRQLQKEDATIYSEVFATNRGGALVRVEGLRGFIPGSHISARKIKEDLEGEYLPLKFLEVDEERNRLVLSHRRALVEKKMNRLEVGEVVIGSVKGIKPYGAFIDIGGVSGLLHISEISHEHIETPHNVLNVNDQMKVMIIDLDSERGRISLSTKALEPEPGDMLTDPQKVFNKAEEMAAKYKQMLLEQTDENEEQTVEIAESV

SEQ ID NO: 18400 - protein, 1743 aa, Caenorhabditis elegans
MVKLDEVTNEKCFPRGGGSDKPKPLNKSNSDFVGTKGGLKRKSAAPEQHEAKKAKEESSWIPKVEENCFIEGLTGFGVVSEVFDDGVLLHTAGTHTVKIHASEVSKKFTELFNEEKIEIKNAFQLGQMVPFRVISKKQGNDKGKVKGTCNPARLNKHLSPNMLAAGLVLHTAVVSIEEKGAILDVGLDQITGFIEKSQFPAAGLKEGMPLIVRVLSSTSRVVKVTSFVEQDNLNMTSCEKLQLNHLMPGTILECEPTGDAVTAGVIVNIGNGLKGILPRRNLPPRLRENPEKLGKAIRAIVMFCQQNSKILVLNAHPDIVAASRIEKRTSFEGISIGDKVKCTVIDVLPTKSMVYFALPAIDGKKSLVTAVSSRGLLEKPDQVSTEYEVGTEKLCRVTGFRYADRSITISTRKDILNQKITKYQDAKCGDVLDARVHHVAKSGVYFMVCNFVKAFAPLSMLSDKPLPAQKMKNIYKVGTEVKCRVWQICDERKNLIVTCRESILGLKSPSVNSVQELEIGVTVPCVIRKVFPTGVLLLGTFNNICGVLRKESAVHLPGTPKNNDFVVANVEKIEDNRVVFVLRDVNPSAAVANGQNSEKKLVQRPNPADGGISIGKIYKGSLCAKAGEKANVTFTGEGKKEVYASVDDHLLSDLLDAPIGLTKRLLIENKEDISTIVPMGKMAAINRACVKRSVASFVKGMKLPKKIDELKVGKVIVGIVGQVITNVGVFVELVGGSGLVGKVLERKNAKNTSELLEVGQVIVGTIESIDTTKKSFLIDPCTDLETGELMLKKYALPLLESIVEEVKWLAEQSNYPIPGSKVNGKVTKELDDLTLVEFEHNGKKIAGILPKMVDDKKTTEKTKKKKATKSFIVVDINHSTNEVVLATPSTEQSRIVAIRRDYLCAVSPDGLIYLPTRLHPNHLPTSDSKVKLHTVIDLNDQKSVGEGVFVATRGGGDVDDVARTTLINKEFVGDEKKKKQTAEGSDGAVSTSTKSVKNFGVYSGVVIGTANLEENRKRNSLFADIRLPGDNIGRLHVSELPPSLLKAENPLDEFVKRNVRKAVIVRIIGFIKSSKGPRIAELTMIPSKIQAGKVRASNLSYKSNYKIGDVVKCFGANTMTEKQELKVEVNPVWTGTISRENLSDDLKVTAADGGIVDLALKKGEMREAKITAVDRKNMSLKLTLDTAEEAFEIGASVTGRVFFVSKTYIRLKLSSGQQAVLTPTAITDKYETIEKITENQLTDGKLVDVVCAKLQEKPRRYFVVLKNRFNSKSTDAKRQLLLDSKLMKEGDQYDGIVENASKGSLFIELGPGVSGRIPVNEENQDLLEIGTNSVIRVTVVKVAKNEITLKLDDILIRKWTVKPDRKRTSSKSEGVPSKVALLEEERSKETVEAEDPGFDWSNKGFRNEDLAAVGKLTLKDAEEESEEEEEEDEEEVEDEEVDEDASDEEEEVDGEEDESDDEENIELIEKSEEDHSRLVRSDPNSAINWIEYMSHFIEKSDLAAARKTAEEALGAINPTESDELLKIWTAYLNMEVAYGDAATVQKVFERACKNANAYTVHKTLSKIYQKFEKNAEATQILEQMVKKFRANQLEVWTLLAEHLMTQNDQKAARELLPRALKSAPKAQQHVQLISKFAQLEFKHGDAERGRTLLEGLVTAHPKKTDLWLVYAEAVLKHLGIEHARKVLERACNLGFSIHKMRPLYKKWLEMESKHGDAAAVELVKAKAEKFLQAVADNVLEEDN

SEQ ID NO: 18401 - protein, 1810 aa, Caenorhabditis elegans
MPCFCFQKIVDILFTRNISSGVMNILFQMVKLDEVTNEKCFPRGGGSDKPKPLNKSNSDFVGTKGGLKRKSAAPEQHEAKKAKEESSWIPKVEENCFIEGLTGFGVVSEVFDDGVLLHTAGTHTVKIHASEVSKKFTELFNEEKIEIKNAFQLGQMVPFRVISKKQGNDKGKVKGTCNPARLNKHLSPNMLAAGLVLHTAVVSIEEKGAILDVGLDQITGFIEKSQFPAAGLKEGMPLIVRVLSSTSRVVKVTSFVEQDNLNMTSCEKLQLNHLMPGTILECEPTGDAVTAGVIVNIGNGLKGILPRRNLPPRLRENPEKLGKAIRAIVMFCQQNSKILVLNAHPDIVAASRIEKRTSFEGISIGDKVKCTVIDVLPTKSMVYFALPAIDGKKSLVTAVSSRGLLEKPDQVSTEYEVGTEKLCRVTGFRYADRSITISTRKDILNQKITKYQDAKCGDVLDARVHHVAKSGVYFMVCNFVKAFAPLSMLSDKPLPAQKMKNIYKVGTEVKCRVWQICDERKNLIVTCRESILGLKSPSVNSVQELEIGVTVPCVIRKVFPTGVLLLGTFNNICGVLRKESAVHLPGTPKNNDFVVANVEKIEDNRVVFVLRDVNPSAAVANGQNSEKKLVQRPNPADGGISIGKIYKGSLCAKAGEKANVTFTGEGKKEVYASVDDHLLSDLLDAPIGLTKRLLIENKEDISTIVPMGKMAAINRACVKRSVASFVKGMKLPKKIDELKVGKVIVGIVGQVITNVGVFVELVGGSGLVGKVLERKNAKNTSELLEVGQVIVGTIESIDTTKKSFLIDPCTDLETGELMLKKYALPLLESIVEEVKWLAEQSNYPIPGSKVNGKVTKELDDLTLVEFEHNGKKIAGILPKMVDDKKTTEKTKKKKATKSFIVVDINHSTNEVVLATPSTEQSRIVAIRRDYLCAVSPDGLIYLPTRLHPNHLPTSDSKVKLHTVIDLNDQKSVGEGVFVATRGGGDVDDVARTTLINKEFVGDEKKKKQTAEGSDGAVSTSTKSVKNFGVYSGVVIGTANLEENRKRNSLFADIRLPGDNIGRLHVSELPPSLLKAENPLDEFVKRNVRKAVIVRIIGFIKSSKGPRIAELTMIPSKIQAGKVRASNLSYKSNYKIGDVVKCFGANTMTEKQELKVEVNPVWTGTISRENLSDDLKVTAADGGIVDLALKKGEMREAKITAVDRKNMSLKLTLDTAEEAFEIGASVTGRVFFVSKTYIRLKLSSGQQAVLTPTAITDKYETIEKITENQLTDGKLVDVVCAKLQEKPRRYFVVLKNRFNSKSTDAKRQLLLDSKLMKEGDQYDGIVENASKGSLFIELGPGVSGRIPVNEENQDLLEIGTNSVIRVTVVKVAKNEITLKLDDILIRKWTVKPDRKRTSSKSEGVPSKVALLEEERSKETVEAEDPGFDWSNKGFRNEDLAAVGKLTLKDAEEESEEEEEEDEEEVEDEEVDEDASDEEEEVDGEEDESDDEENIELIEKSEEDHSRLVRSDPNSAINWIEYMSHFIEKSDLAAARKTAEEALGAINPTESDELLKIWTAYLNMEVAYGDAATVQKVFERACKNANAYTVHKTLSKIYQKFEKNAEATQILEQMVKKFRANQLEVWTLLAEHLMTQNDQKAARELLPRALKSAPKAQQRESCFRSYFRNISIFIVFFVAFLSVQKYFKTKKAKFNVSDVQLISKFAQLEFKHGDAERGRTLLEGLVTAHPKKTDLWLVYAEAVLKHLGIEHARKVLERACNLGFSIHKMRPLYKKWLEMESKHGDAAAVELVKAKAEKFLQAVADNVLEEDN

SEQ ID NO: 18402 - protein, 375 aa, Nostoc punctiforme
MVNQNLTATEIGFTHEDFAALLDKYDYHFSPGDVVPGTVFSIEPRGALIDIGAKTAAYIPIQEMSINRVDSPEEVLQSNETREFFILTDENEDGQLTLSIRRIEYMRAWERVRQLQAEDATVRSGVFATNRGGALVRIEGLRGFIPGSHISTRKPKEELVGEELPLKFLEVDEERNRLVLSHRRALVERKMNRLEVGEVVIGTVRGIKPYGAFIDIGGVSGLLHISEISHEHIDTPHSVFNVNDEVKVMIIDLDAERGRISLSTKQLEPEPGDMIKNRDLVYDKAEEMAAKYREQLLAKQQGATAAPAAPADVLAEEDIPPATELEDEIPPAAELEEEIPPAAEIEEVTPVVAEIQEKIPATTETEEEIPAAIEE

SEQ ID NO: 18403 - protein, 556 aa, Vibrio cholerae
MTESFAQLFEEFLNETQFQQGTIVKGTVVAIENGYVLVDAGLKSESAIPAEQFKNAAGELEVQVGSQVDVALDAVEDGFGETQLSREKAKRHEAWIVLEKAYEEAATVIGIINGKVKGGFTVELNGIRAFLPGSLVDVRPIRDTAHLENKELEFKVIKLDQKRNNVVVSRRAVIESESSVERDELLETLQEGTEVKGIVKNLTDYGAFVDLGGVDGLLHITDMAWKRVKHPSEIVNVGDEILVKVLKFDRDRTRVSLGLKQLGEDPWVAIAKRYPEGHKLSGRVTNLTDYGCFVEIEEGVEGLVHVSEMDWTNKNIHPSKVVNVGDEVEVMVLDIDEERRRISLGLKQCKANPWQSFAEAQAKGDKVTGKIKSITDFGIFIGLEGGIDGLVHLSDISWNVPGEEAVREFKKGDEISAVVLAVDAERERISLGIKQMENDPFNAYVSDNKKGALVNGTVTAVDAKGATIELEDGVEGYIRASEVSRDRIEDASLILNVGDKVEAKFTGVDRKNRVINLSIKAKDEAEEQEVMATLNKQDEAAFGNAMADAFKAAKGE

SEQ ID NO: 18404 - protein, 549 aa, Haemophilus influenzae Rd
  unsure (1)..(549): unsure at all Xaa locations
MSESFAQLFEESLKVLETRQGSIVSGTVVAIQKGFVLVDAGLKSESAIPVAEFLNAQGELEIQVGDTVNVALDAVEDGFGETKLSREKAVRHESWIELEKAYEEKATVIGLIXGKVKGGFTVELNGVRAFLPGSLVDTRPAREADHLLGKELEFKVIKLDQKRNNVVVSRRAVIESENSQEREQVLENLVEGSEVKGVVKNLTEYGAFVDLGGVDGLLHITDMAWKRVKHPSEIVNVGDEVTVKVLKFDKDRTRVSLGLKQLGQDPWAAIAENHPVNSKLTGKVTNLTDYGCFVEILDGVEGLVHVSEMDWTNKNIHPSKVVSLGDTVEVMVLEIDEERRRISLGLKQCKANPWTQFADTHNKGDKVTGKIKSITDFGIFIGLEGGIDGLVHLSDISWSISGEEAVRQYKKGDEVSAVVLAVDAVKERISLGIKQLEEDPFNNFVAINKKGAVVSATVVEADAKGAKVELAGGVEGYIRSADLTSEVAVGDVVEAKYTGVDRKSRIVHLSVKAKDQAEEAAAVASVNNKQEDIVIPNAMAEAFKAAKGE

SEQ ID NO: 18405 - protein, 1430 aa, Drosophila melanogaster
MVPNEKSFPRGGTIHSEVKTDDVSLNIVFGASQKKVKKAPKVKENLLSYETEEQNGQLEAFSAETLNMDTLQEDMLVMGVVKELTATALQIALPGRMFARTLVADISDAYTRVAKAAMSGDTSEYHDLTELFQLGRIVYGKAIKTEKLDTGRVSLLLSLKPADVHGNLHHKSIKKGFIFSGAVAEALEHGYVIESGVQGLQAFVPCEKPAQKLHVGQLAFLKVKTVHHDTHQSTCTCVQVEQDQLRIKSQNETNLDYILPGSIVKFKVAKHLKDGLKGSIMNESFSAYVNEHHLANALDTLDAYELNEDYNARVLYVMPLTKLVYLTLNLDIKTGAAVAKDQDEEEQEVEPIKVGSVVEKAKVLRLGSGGVVLLLNKKLKGIISYGSIRGNFKGNYDKDEVLSKYGRKTKHKVRILGYDVIESLYYCSDDPNVVNEKLFCLEDINAGDLVTAKIFKKDDKIKGWSVRIGKVNGILEQFYLAPNVRYDVGQSLKCRVLEVNAERKICYVSNRAEYLGKGIKILTDYASAHVGNVYMGTVVRCEDTYVLVKFGNGIKGVLHRQNLKENSSFFEGQTTKFRILTRNKDQITLTLPEDKFQLGEICPVEITNALDAGLEVKITFAAEDDEEDEDGNPKLEEFVGLIPLRLLSDHLELLHAQMRVHPAGSYTDAACIMQNIFSLRDVPYFSGQLTKDWQSVQVGDIIRSYVKHATDQVVDLMVCVRNYNKPVKVHVKMLRLNAVKNAPVELVPEQLLWVKVLSKEVETKTLTVSAKLTDVWSGDLSDTAKLVEGYLNEVAQIKAGLEEASAPISKYSVGEKINVVFKGIDATTNDWVYTVEGNGKVSALLLSSLVGTAKAPEMGSKHEAVILWIEYSSDVLLISNKKLDIAHISPSGELSTNLIGKAGMKAKVLLKLESVAVCSLKKGTNPLVICPIRLHPNDIENSGSAELRQGDFCNIAFIHDKLHIAVPETVWRLWRGVKRTAGTEVAPVKAKKAKVEESPKQKKTTIEETSAQKKVKAKAKVETKTEAKAIPTKRKAEVVEKITNGQKKTQPLTNGIVKEKPKQNGKLFFEDKTPAKNAKSETPKSNGAEGKSRLPGVSSFWEDDVNQSKEGSSDEDEELNVAETQKNAAKKKRLSAKEKAKAEIKEEQRLREIEERNADPKARLETIDQYERLVIAQPNNSISWLKYIAFLLSNTEIEKARALARRAISTISFRETQELRNMWSALLNMELVYSNNFDDVLKEALNCNDPLEIYISVVDILKKNKRKDRLSSVLTTVLNKFKTELRVWPVAAEAYFWLGKSDQVHNLLQRALRALPNQEHIPCIVSFAKLYAKHDNNDMAQTLLDDVVTSYPKRIDIWSVYVDMLIKAGLIDSARNVLERAVVQKLKPNKMQVIYKKYLQLEENHGTDATVAKVKQQAEQWVKNYAKTVK

SEQ ID NO: 18406 - protein, 437 aa, Plasmodium yoelii yoelii
  unsure (1)..(437): unsure at all Xaa locations
MTTAEDDQLGTTNEESKPQNEGNDQICEKTNDINNVKIKNNKKIEGKAIIKDHNKRGNLSLYAEIXNKKKTXKKKKKKKTKEKYDKEDEIENEKTNKKKHKETQEHNSSSSEENEKFDSYDESDNDNILLKNKIINNKNGQNGQNEEKVKPYDYEKLLVSEKNKSTIWISYIVYYLEKGNIQEARNVAERALKTIDIHLIEEKLNIYLCYINMECAYGDNLNEIFKRALLVNNEKSIYLHTMNILKMNKKYNELKELCEEAIKKFKYSKKIWTRYLELLHNTLNDEEYAHNILLKSLHALPKRKHLNIIINAARFEYKYSNIERGKNYFEKLIQEYPKRSDIWFTYLDIHINSLTKGKKNENDDENKKKKIKKLTLNELQFIRNIFERFLSIKFKTRVMKMIFTKWLLFEKNHGSVNTQKMVQKKAYDYVESLNSLV

SEQ ID NO: 18407 - protein, 549 aa, Pasteurella multocida
MTESFAQLFEESLKELETRQGSIVSGTVVAIQKGFVLVDAGLKSESAIPVEEFLNAQGELDVQVGDVVNVALDAVEDGFGETKLSREKAVRHESWIELEKAYEEQATVIGLINGKVKGGFTVELNGVRAFLPGSLVDTRPVRETLHLEGKELEFKVIKLDQKRNNVVVSRRAVIESENSQEREQILENLQEGSEVKGIVKNLTDYGAFVDLGGVDGLLHITDMAWKRVKHPSEIVNVGDEITVKVLKFDKDRTRVSLGLKQLGQDPWVAIAENHPVNSKLSGKVTNLTDYGCFVEILDGVEGLVHVSEMDWTNKNIHPSKVVSLGDVVEVMVLEIDEERRRISLGLKQCKPNPWLQFAETHNKGDKVEGKIKSITDFGIFIGLDGGIDGLVHLSDISWNVSGEEAVRQYKKGDEVAAVVLQVDAVKERISLGIKQLEEDPFNNFVAVNKKGAVLSAKVVEADAKGAKVELDGGVEGYIRAADLTNEVNAGDVVEAKYTGVDRKARIVHLSVRAKDQAEEAAAVANVNNKQEDVAIPNAMAEAFKAAKGE

SEQ ID NO: 18408 - protein, 568 aa, Rickettsia conorii
MSIKLKQRFVPQLAAMNHEFAEDFSKMLETVDTSHIKEKTVVKGQVIEIKNDIIIVDVGLKNEGRIPKSEFLALPEVGDVVEVFIEKIEGRNGRTILSREKAVKEELWGQLEIMCSKGEFVDGTIFGRVKGGFTVDLSGVVAFLPGSQVDVRPIKDPTSIMNIKQPFKILSMDKKLGNIVVSRRAILEESRSEARDEMLSKIKEGMVLEGTVKNITDYGAFIDLGSVDGLLHLTDISWGRVNHPSEVLDFNQKVKVMVIKFDEKNKRISLGIKQLDSNPWEAIKEEFPVGKQMTGKVTNFADYGVFIELKDGLEGLVHSSEISWLKSNQNPRKTLTIGQEVEFVVLEVDTEKHRVSLSIKQCQENPLTKFAENNPVGTIIKAPIRNITDFGIFVALGNNMDGMIHEGDISWEDKGTDLLKSYKKGDEIECKVLAINIEKEQVSLGIKQLSPNPYQEISDEYKKGTIVKALITEVKDEGLEVLLNDKVAGFIKRTELSDEKDEQKPEMFQIDKEIEAKVVSIEKSTGRILLSVKAHKIAERQKALKEYGSSDNTTNMGDILANALEDKK

SEQ ID NO: 18409 - protein, 568 aa, Rickettsia prowazekii
MSIKLKQRFVPQLAAINCQFEEDFAQMLKTVDTSHIKEKTVVKGQVIEIKNDMIIVDVGLKNEGRIPKSEFLSLPEVGDVVEVFIEKIEGRNGRTILSREKAVKEELWGQLEIMCSKGEFVDGTIFGRVKGGFTVDLSGVVAFLPGSQVDVRPIKDPTSIMNIKQPFKILSMDKKLGNIVVSRRVILEESRSEARDEMLSKIKEGIVLEGVVKNITDYGAFIDLGSVDGLLHLTDISWGRVNHPSEVLEFNQKVKVMVIKFDEKTKRISLGIKQLDSNPWDAIKEEFPVGKKMTGKVTNFADYGVFLELKDGLEGLVHSSEISWLKSNQNPRKMLTIGQEVEFIVLEVDTEKHRVSLSIKQCQENPLIKFAENNPIGTIIKAPIRNITDFGIFVVLGNNMDGMIHEGDISWEDNGTDLLKSYKKGDEIECKVLAINFEKEQVSLGIKQLLPNPYQKISDEYKKSTIVKAVVTEIKDDGLVVLLNNKVTGFIKRVELSDEKDEQKPEMFKVHEEIDAKVVSIEKSTGRVLLSIKAHKIAERQKTLKEYGSSDNTTNMGDILANVLEEKK

SEQ ID NO: 18410 - protein, 569 aa, Chlamydia trachomatis
MPKQADYTWGAKKNLDTIACLPEDVKQFKDLLYAMYGFTATEEEPTSEVHPGAILKGTVVDISKDFVVVDVGLKSEGVIPMSEFIDSSEGLTVGAEVEVYLDQTEDDEGKVVLSREKATRQRQWEYILAHCEEGSIVKGQITRKVKGGLIVDIGMEAFLPGSQIDNKKIKNLDDYVGKVCEFKILKINVDRRNVVVSRRELLEAERISKKAELIEQITIGERRKGIVKNITDFGVFLDLDGIDGLLHITDMTWKRIRHPSEMVELNQELEVIILSVDKEKGRVALGLKQKEHNPWEDIEKKYPPGKRVRGKIVKLLPYGAFIEIEEGIEGLIHVSEMSWVKNIVDPNEVVNKGDEVEVVVLSIQKDEGKISLGLKQTKHNPWDNIEEKYPIGLRVTAEIKNLTNYGAFVELEPGIEGLIHISDMSWIKKVSHPSELFKKGNTVEAVILSVDKESKKITLGVKQLTPNPWDEIEVMFPVGSDISGVVTKITAFGAFVELQNGIEGLIHVSELSEKPFAKIEDVLSIGDKVSAKVIKLDPDHKKVSLSIKEFLVHGGDAGHDAEEESSDRD

SEQ ID NO: 18411 - protein, 481 aa, Mycobacterium tuberculosis H37Rv
MPSPTVTSPQVAVNDIGSSEDFLAAIDKTIKYFNDGDIVEGTIVKVDRDEVLLDIGYKTEGVIPARELSIKHDVDPNEVVSVGDEVEALVLTKEDKEGRLILSKKRAQYERAWGTIEALKEKDEAVKGTVIEVVKGGLILDIGLRGFLPASLVEMRRVRDLQPYIGKEIEAKIIELDKNRNNVVLSRRAWLEQTQSEVRSEFLNNLQKGTIRKGVVSSIVNFGAFVDLGGVDGLVHVSELSWKHIDHPSEVVQVGDEVTVEVLDVDMDRERVSLSLKATQEDPWRHFARTHAIGQIVPGKVTKLVPFGAFVRVEEGIEGLVHISELAERHVEVPDQVVAVGDDAMVKVIDIDLERRRISLSLKQANEDYTEEFDPAKYGMADSYDEQGNYIFPEGFDAETNEWLEGFEKQRAEWEARYAEAERRHKMHTAQMEKFAAAEAAGRGADDQSSASSAPSEKTAGGSLASDAQLAALREKLAGSA

SEQ ID NO: 18412 - protein, 536 aa, Chlamydia muridarum
MHGFTATEEEPTSEVQPGAILKGTVVDISKDFVVVDVGLKSEGVIPMSEFIDSSEGLSVGAEVEVYLDQTEDEEGKVVLSREKATRQRQWEYILAHCEEGSIVKGQITRKVKGGLIVDIGMEAFLPGSQIDNKKIKNLDDYVGKVCEFKILKINVDRRNVVVSRRELLEAERISKKAELIEQITIGERRKGIVKNITDFGVFLDLDGIDGLLHITDMTWKRIRHPSEMVELNQELEVIILSVDKEKGRVALGLKQKEHNPWEDIEKKYPPGKRVRGKIVKLLPYGAFIEIEEGIEGLIHVSEMSWVKNIVDPNEVVNKGDEVEVVVLSIQKDEGKISLGLKQTEHNPWDNIEEKYPIGLRVTAEIKNLTNYGAFVELEPGIEGLIHISDMSWIKKVSHPSELFKKGNTVEAVILSVDKESKKITLGVKQLTPNPWDEIEAMFPVGSDISGIVTKITAFGAFVELQNGIEGLIHVSKLSDKPFAKIEDILSIGDKVSAKVIKLDPDHKKVSLSIKEFLAHGGHAGQDAEEETSSNRD

SEQ ID NO: 18413 - protein, 570 aa, Chlamydia muridarum
MPKQADYTWGAKKNLDTIACLPEDVKQFKDLLYAMHGFTATEEEPTSEVQPGAILKGTVVDISKDFVVVDVGLKSEGVIPMSEFIDSSEGLSVGAEVEVYLDQTEDEEGKVVLSREKATRQRQWEYILAHCEEGSIVKGQITRKVKGGLIVDIGMEAFLPGSQIDNKKIKNLDDYVGKVCEFKILKINVDRRNVVVSRRELLEAERISKKAELIEQITIGERRKGIVKNITDFGVFLDLDGIDGLLHITDMTWKRIRHPSEMVELNQELEVIILSVDKEKGRVALGLKQKEHNPWEDIEKKYPPGKRVRGKIVKLLPYGAFIEIEEGIEGLIHVSEMSWVKNIVDPNEVVNKGDEVEVVVLSIQKDEGKISLGLKQTEHNPWDNIEEKYPIGLRVTAEIKNLTNYGAFVELEPGIEGLIHISDMSWIKKVSHPSELFKKGNTVEAVILSVDKESKKITLGVKQLTPNPWDEIEAMFPVGSDISGIVTKITAFGAFVELQNGIEGLIHVSKLSDKPFAKIEDILSIGDKVSAKVIKLDPDHKKVSLSIKEFLAHGGHAGQDAEEETSSNRD

SEQ ID NO: 18414 - protein, 599 aa, Porphyromonas gingivalis
MENLKNIQPREDFNWEEFEAGGVHAAVSRQEQEAAYDKTLNTIKEKEVVMGRVTAINKREVVINVGYKSEGVVPATEFRYNPELKVGDEVEVYIENQEDKKGQLVLSHRKARAARSWERVNEALEKDEIVKGYVKCRTKGGMIVDVFGIEAFLPGSQIDVRPIRDYDAFVEKTMEFKIVKINQEYKNVVVSHKVLIEAELEQQKKEIIGKLEKGQVLEGIVKNITSYGVFIDLGGVDGLIHITDLSWGRVAHPEEIVQLDQKINVVILDFDEDRKRIALGLKQLMPHPWDALDSELKVGDKVKGKVVVMADYGAFVEIAQGVEGLIHVSEMSWTQHLRSAQDFLHVGDEVEAVILTLDREERKMSLGLKQLKPDPWADIETRFPVGSRHHARVRNFTNFGVFVEIEEGVDGLIHISDLSWTKKIKHPSEFTEVGADIEVQVIEIDKENRRLSLGHKQLEENPWDVFETVFTVGSIHEGTVIEVMDKGAVVSLPYGVEGFATPKHMVKEDGSQAVLEEKLPFKVIEFNKDAKRIIVSHSRVFEDEQKMAQREANAERKAEAKAAQKEAAAEAANPAQAVEKATLGDLGELAALKEKLSEN

SEQ ID NO: 18415 - protein, 556 aa, Helicobacter pylori 26695
MSKIADDQNFNDEEENFAKLFKKELEKEETLEKGTIKEGLVVSINENDGYAMVSVGGKTEGRLALNEITDEKGQLLYQKNDPIIVHVSEKGEHPSVSYKKAISQQKIQAKIEELGENYENAIIEGKIVGKNKGGYIVESQGVEYFLSRSHSSLKNDANHIGKRVKACIIRVDKENHSINISRKRFFEVNDKRQLEVSKELLEATEPVLGVVRQITPFGIFVEAKGIEGLVHYSEISHKGPVNPEKYYKEGDEVYVKAIAYDAEKRRLSLSIKATIEDPWEEIQDKLKPGYAIKVVVSNIEHYGVFVDIGNDIEGFLHVSEISWDKNVSHPNNYLSVGQEIDVKIIDIDPKNRRLRVSLKQLTNRPFDVFESKHQVGDVLEGKVATLTDFGAFLNLGGVDGLLHNHDAFWDKDKKCKDHYKIGDVIKVKILKINKKDKKISLSAKHLVTSPTEEFAQKHKTDSVIQGKVVSIKDFGVFINADGIDVLIKNEDLNPLKKDEIKIGQEITCVVVAIEKSNNKVRASVHRLERKKEKEELQAFNTSDDKMTLGDILKEKL

SEQ ID NO: 18416 - protein, 552 aa, Helicobacter pylori J99
MSKIADDQYFNDEEEDFAKLLEKEETLEKGTIKEGLIVSINENDGYAMVSVGGKTEGRLALNEITDEKGQLMYQKNDPIVVHVSEKGEHPSVSYKKAISQQKIQAKIEELGENYENAIIEGKIVGKNKGGYIVESQGVEYFLSRSHSSLKNDANHIGKRIKACIIRVDKENHSINISRKRFFEVNDKRQLEISKELLEATEPVLGVVRQITPFGIFVKFKGIDGLVHYSEISHKGPVNPEKYYKEGDEVYVKAIAYDEEKRRLSLSIKATIEDPWEEIQDKLKPGYAIKVVVSNIEHYGVFVDIGNDIEGFLHVSEISWDKNVSHPSHYLSVGQEIDVKIIDIDPKNRRLRVSLKQLTNRPFDVFESKHQVGDIVEGKVATLTDFGAFLNLGGVDGLLHNHDAFWDKDKKCKDHYKIGDVIKVKILKINKKDKKISLSAKHLVTSPTEEFAQKHKTDSVIQGKVVSIKDFGVFIHADGIDVLIKNEDLNPLKKDEIKIGQEITCVVVAIEKSNNKVRASVHRLERKKEKEELQAFNTSDDKMTLGDILKEKL

SEQ ID NO: 18417 - protein, 383 aa, Bacillus halodurans
MVEEMNNEVTEMKSFSVGDVVSGKVTKVEDKQAFVDVGFKVDGIIPISELSSLHVEKVSDVLSEGDELELKVLKVEDDELILSKRAVQAEKAWETLQAALDSGEVIEAEVADVVKGGLVVDLGVRGFIPASLVERHYVEDFSDYKGRTLRLKVVELDKEANKLILSQRAVLDEEVEAKKKEVLASLQPGDVVEGTVQRLTDFGAFVDVGGVDGLVHISQLAHHRVETPAEVVKEGDAVKVKVLSVDPDSERVSLSIKETLPGPWEQVEGTIQPGDVIEGTVKRLVSFGAFVEVAPGVEGLVHISQIANRHIGTPGEVLSEGERVQAKVLDVNISEKRISLSIRELLDDAGSNQSDREVYESTNEESSGFSLGDMIGDELKKYK

SEQ ID NO: 18418 - protein, 557 aa, Salmonella enterica subsp. enterica serovar Typhi
MTESFAQLFEESLKEIETRPGSIVRGVVVAIDKDVVLVDAGLKSESAIPAEQFKNAQGELEIQVGDEVDVALDAVEDGFGETLLSREKAKRHEAWITLEKAYEDAETVTGVINGKVKGGFTVELNGIRAFLPGSLVDVRPVRDTLHLEGKELEFKVIKLDQKRNNVVVSRRAVIESENSAERDQLLENLQEGMEVKGIVKNLTDYGAFVDLGGVDGLLHITDMAWKRVKHPSEIVNVGDEINVKVLKFDRERTRVSLGLKQLGEDPWVAIAKRYPEGTKLTGRVTNLTDYGCFVEIEEGVEGLVHVSEMDWTNKNIHPSKVVNVGDVVEVMVLDIDEERRRISLGLKQCKSNPWQQFAETHNKGDRVEGKIKSITDFGIFIGLDGGIDGLVHLSDISWNVAGEEAVREYKKGDEIAAVVLQVDAERERISLGVKQLAEDPFNNWVALNKKGAIVTGKVTAVDAKGATVELADGVEGYLRASEASRDRVEDATLVLSVGDDVEAKFTGVDRKNRAISLSVRAKDEADEKDAIATVNKQEDANFSNNAMAEAFKAAKGE

SEQ ID NO: 18419 - protein, 572 aa, Nitrosomonas europaea
MTIATSVAGSSENFAELFNESLSHKEMRVGEVITAEIIRVDYNFVVVNAGLKSESYIPIEEFKNDRGEIEAREGDFVSVAIEALENGFGETRLSRDKAKRLNAWYELEEAMEKGKIVTGMVNGKVKGGLTATINGIRAFLPGSLVDIRPVKDMTPYENKEMEFKVIKLDRKRNNVVVSRRAVLEETQGADRDELLASLQDGAVVQGIVKNITDYGAFVDLGGIDGLLHITDLAWRRVKHPTEVINVGDEVTAKVLKFDQEKNRVSLGLKQLTEDPWIGLSRRYPQGTRIFGKVTNMTDYGAFVEIEQGIEGLVHVSEMDWTNKNVYPSKIVQLGDEVEVMILEIDEDRRRISLGMKQCRPNPWEEFSLSHEKGDKVTGQIKSITDFGLFIGLPGNIDGLVHLSDLSWNQPGEKAISEFKKGDEVEAVVLSIDVEKERISLGIKQLEGDPFNIYVASHDKNSIVKGTVKSVDAKGAVIALTDEVEGYLRASEFSRDKIEDIRSRVNEGDEIEAMIINIDRKNRSISLSVKARIQDEEDKAVKSLASVSNPASAGTTNLGALLKAKIDSKSSEE

SEQ ID NO: 18420 - protein, 1884 aa, Homo sapiens
VAGCRRRGAGDPNMANLEESFPRGGTRKIHKPEKAFQQSVEQDNLFDISTEEGSTKRKKSQKGPAKTKKLKIEKRESSKSAREKFEILSVESLCEGMRILGCVKEVNELELVISLPNGLQGFVQVTEICDAYTKKLNEQVTQEQPLKDLLHLPELFSPGMLVRCVVSSLGITDRGKKSVKLSLNPKNVNRVLSAEALKPGMLLTGTVSSLEDHGYLVDIGVDGTRAFLPLLKAQEYIRQKNKGAKLKVGQYLNCIVEKVKGNGGVVSLSVGHSEVSTAIATEQQSWNLNNLLPGLVVKAQVQKVTPFGLTLNFLTFFTGVVDFMHLDPKKAGTYFSNQAVRACILCVHPRTRVVHLSLRPIFLQPGRPLTRLSCQNLGAVLDDVPVQGFFKKAGATFRLKDGVLAYARLSHLSDSKNVFNPEAFKPGNTHKCRIIDYSQMDELALLSLRTSIIEAQYLRYHDIEPGAVVKGTVLTIKSYGMLVKVGEQMRGLVPPMHLADILMKNPEKKYHIGDEVKCRVLLCDPEAKKLMMTLKKTLIESKLPVITCYADAKPGLQTHGFIIRVKDYGCIVKFYNNVQGLVPKHELSTEYIPDPERVFYTGQVVKVVVLNCEPSKERMLLSFKLSSDPEPKKEPAGHSQKKGKAINIGQLVDVKVLEKTKDGLEVAVLPHNIRAFLPTSHLSDHVANGPLLHHWLQAGDILHRVLCLSQSEGRVLLCRKPALVSTVEGGQDPKNFSEIHPGMLLIGFVKSIKDYGVFIQFPSGLSGLAPKAIMSDKFVTSTSDHFVEGQTVAAKVTNVDEEKQRMLLSLRLSDCGLGDLAITSLLLLNQCLEELQGVRSLMSNRDSVLIQTLAEMTPGMFLDLVVQEVLEDGSVVFSGGPVPDLVLKASRYHRAGQEVESGQKKKVVILNVDLLKLEVHVSLHQDLVNRKARKLRKGSEHQAIVQHLEKSFAIASLVETGHLAAFSLTSHLNDTFRFDSEKLQVGQGVSLTLKTTEPGVTGLLLAVEGPAAKRTMRPTQKDSETVDEDEEVDPALTVGTIKKHTLSIGDMVTGTVKSIKPTHVVVTLEDGIIGCIHASHILDDVPEGTSPTTKLKVGKTVTARVIGGRDMKTFKYLPISHPRFVRTIPELSVRPSELEDGHTALNTHSVSPMEKIKQYQAGQTVTCFLKKYNVVKKWLEVEIAPDIRGRIPLLLTSLSFKVLKHPDKKFRVGQALRATVVGPDSSKTFLCLSLTGPHKLEEGEVAMGRVVKVTPNEGLTVSFPFGKIGTVSIFHMSDSYSETPLEDFVPQKVVRCYILSTADNVLTLSLRSSRTNPETKSKVEDPEINSIQDIKEGQLLRGYVGSIQPHGVFFRLGPSVVGLARYSHVSQHSPSKKALYNKHLPEGKLLTARVLRLNHQKNLVELSFLPGDTGKPDVLSASLEGQLTKQEERKTEAEERDQKGEKKNQKRNEKKNQKGQEEVEMPSKEKQQPQKPQAQKRGGRECRESGSEQERVSKKPKKAGLSEEDDSLVDVYYREGKEEAEETNVLPKEKQTKPAEAPRLQLSSGFAWNVGLDSLTPALPPLAESSDSEEDEKPHQATIKKSKKERELEKQKAEKELSRIEEALMDPGRQPESADDFDRLVLSSPNSSILWLQYMAFHLQATEIEKARAVAERALKTISFREEQEKLNVWVALLNLENMYGSQESLTKVFERAVQYNEPLKVFLHLADIYAKSEKFQEAGELYNRMLKRFRQEKAVWIKYGAFLLRRSQAAASHRVLQRALECLPSKEHVDVIAKFAQLEFQLGDAERAKAIFENTLSTYPKRTDVWSVYIDMTIKHGSQKDVRDIFERVIHLSLAPKRMKFFFKRYLDYEKQHGTEKDVQAVKAKALEYVEAKSSVLED

SEQ ID NO: 18421 - protein, 1871 aa, Homo sapiens
MANLEESFPRGGTRKIHKPEKAFQQSVEQDNLFDISTEEGSTKRKKSQKGPAKTKKLKIEKRESSKSAREKFEILSVESLCEGMRILGCVKEVNELELVISLPNGLQGFVQVTEICDAYTKKLNEQVTQEQPLKDLLHLPELFSPGMLVRCVVSSLGITDRGKKSVKLSLNPKNVNRVLSAEALKPGMLLTGTVSSLEDHGYLVDIGVDGTRAFLPLLKAQEYIRQKNKGAKLKVGQYLNCIVEKVKGNGGVVSLSVGHSEVSTAIATEQQSWNLNNLLPGLVVKAQVQKVTPFGLTLNFLTFFTGVVDFMHLDPKKAGTYFSNQAVRACILCVHPRTRVVHLSLRPIFLQPGRPLTRLSCQNLGAVLDDVPVQGFFKKAGATFRLKDGVLAYARLSHLSDSKNVFNPEAFKPGNTHKCRIIDYSQMDELALLSLRTSIIEAQYLRYHDIEPGAVVKGTVLTIKSYGMLVKVGEQMRGLVPPMHLADILMKNPEKKYHIGDEVKCRVLLCDPEAKKLMMTLKKTLIESKLPVITCYADAKPGLQTHGFIIRVKDYGCIVKFYNNVQGLVPKHELSTEYIPDPERVFYTGQVVKVVVLNCEPSKERMLLSFKLSSDPEPKKEPAGHSQKKGKAINIGQLVDVKVLEKTKDGLEVAVLPHNIRAFLPTSHLSDHVANGPLLHHWLQAGDILHRVLCLSQSEGRVLLCRKPALVSTVEGGQDPKNFSEIHPGMLLIGFVKSIKDYGVFIQFPSGLSGLAPKAIMSDKFVTSTSDHFVEGQTVAAKVTNVDEEKQRMLLSLRLSDCGLGDLAITSLLLLNQCLEELQGVRSLMSNRDSVLIQTLAEMTPGMFLDLVVQEVLEDGSVVFSGGPVPDLVLKASRYHRAGQEVESGQKKKVVILNVDLLKLEVHVSLHQDLVNRKARKLRKGSEHQAIVQHLEKSFAIASLVETGHLAAFSLTSHLNDTFRFDSEKLQVGQGVSLTLKTTEPGVTGLLLAVEGPAAKRTMRPTQKDSETVDEDEEVDPALTVGTIKKHTLSIGDMVTGTVKSIKPTHVVVTLEDGIIGCIHASHILDDVPEGTSPTTKLKVGKTVTARVIGGRDMKTFKYLPISHPRFVRTIPELSVRPSELEDGHTALNTHSVSPMEKIKQYQAGQTVTCFLKKYNVVKKWLEVEIAPDIRGRIPLLLTSLSFKVLKHPDKKFRVGQALRATVVGPDSSKTLLCLSLTGPHKLEEGEVAMGRVVKVTPNEGLTVSFPFGKIGTVSIFHMSDSYSETPLEDFVPQKVVRCYILSTADNVLTLSLRSSRTNPETKSKVEDPEINSIQDIKEGQLLRGYVGSIQPHGVFFRLGPSVVGLARYSHVSQHSPSKKALYNKHLPEGKLLTARVLRLNHQKNLVELSFLPGDTGKPDVLSASLEGQLTKQEERKTEAEERDQKGEKKNQKRNEKKNQKGQEEVEMPSKEKQQPQKPQAQKRGGRECRESGSEQERVSKKPKKAGLSEEDDSLVDVYYREGKEEAEETNVLPKEKQTKPAEAPRLQLSSGFAWNVGLDSLTPALPPLAESSDSEEDEKPHQATIKKSKKERELEKQKAEKELSRIEEALMDPGRQPESADDFDRLVLSSPNSSILWLQYMAFHLQATEIEKARAVAERALKTISFREEQEKLNVWVALLNLENMYGSQESLTKVFERAVQYNEPLKVFLHLADIYAKSEKFQEAGELYNRMLKRFRQEKAVWIKYGAFLLRRSQAAASHRVLQRALECLPSKEHVDVIAKFAQLEFQLGDAERAKAIFENTLSTYPKRTDVWSVYIDMTIKHGSQKDVRDIFERVIHLSLAPKRMKFFFKRYLDYEKQHGTEKDVQAVKAKALEYVEAKSSVLED

SEQ ID NO: 18422 - protein, 1436 aa, Homo sapiens
MANLEESFPRGGTRKIHKPEKAFQQSVEQDNLFDISTEEGSTKRKKSQKGPAKTKKLKIEKRESSKSAREKFEILSVESLCEGMRILGCVKEVNELELVISLPNGLQGFVQVTEICDAYTKKLNEQVTQEQPLKDLLHLPELFSPGMLVRCVVSSLGITDRGKKSVKLSLNPKNVNRVLSAEALKPGMLLTGTVSSLEDHGYLVDIGVDGTRAFLPLLKAQEYIRQKNKGAKLKVGQYLNCIVEKVKGNGGVVSLSVGHSEVSTAIATEQQSWNLNNLLPGLVVKAQVQKVTPFGLTLNFLTFFTGVVDFMHLDPKKAGTYFSNQAVRACILCVHPRTRVVHLSLRPIFLQPGRPLTRLSCQNLGAVLDDVPVQGFFKKAGATFRLKDGVLAYARLSHLSDSKNVFNPEAFKPGNTHKCRIIDYSQMDELALLSLRTSIIEAQYLRYHDIEPGAVVKGTVLTIKSYGMLVKVGEQMRGLVPPMHLADILMKNPEKKYHIGDEVKCRVLLCDPEAKKLMMTLKKTLIESKLPVITCYADAKPGLQTHGFIIRVKDYGCIVKFYNNVQGLVPKHELSTEYIPDPERVFYTGQVVKVVVLNCEPSKERMLLSFKLSSDPEPKKEPAGHSQKKGKAINIGQLVDVKVLEKTKDGLEVAVLPHNIRAFLPTSHLSDHVANGPLLHHWLQAGDILHRVLCLSQSEGRVLLCRKPALVSTVEGGQDPKNFSEIHPGMLLIGFVKSIKDYGVFIQFPSGLSGLAPKAIMSDKFVTSTSDHFVEGQTVAAKVTNVDEEKQRMLLSLRLSDCGLGDLAITSLLLLNQCLEELQGVRSLMSNRDSVLIQTLAEMTPGMFLDLVVQEVLEDGSVVFSGGPVPDLVLKASRYHRAGQEVESGQKKKVVILNVDLLKLEVHVSLHQDLVNRKARKLRKGSEHQAIVQHLEKSFAIASLVETGHLAAFSLTSHLNDTFRFDSEKLQVGQGVSLTLKTTEPGVTGLLLAVEGPAAKRTMRPTQKDSETVDEDEEVDPALTVGTIKKHTLSIGDMVTGTVKSIKPTHVVVTLEDGIIGCIHASHILDDVPEGTSPTTKLKVGKTVTARVIGGRDMKTFKYLPISHPRFVRTIPELSVRPSELEDGHTALNTHSVSPMEKIKQYQAGQTVTCFLKKYNVVKKWLEVEIAPDIRGRIPLLLTSLSFKVLKHPDKKFRVGQALRATVVGPDSSKTLLCLSLTGPHKLEEGEVAMGRVVKVTPNEGLTVSFPFGKIGTVSIFHMSDSYSETPLEDFVPQKVVRCYILSTADNVLTLSLRSSRTNPETKSKVEDPEINSIQDIKEGQLLRGYVGSIQPHGVFFRLGPSVVGLARYSHVSQHSPSKKALYNKHLPEGKLLTARVLRLNHQKNLVELSFLPGDTGKPDVLSASLEGQLTKQEERKTEAEERDQKEKKKKK

SEQ ID NO: 18423 - protein, 406 aa, Homo sapiens
GVNCRRTLDVMSETNNEFLAALESAADQIKVGDVVTGELLAIDNDNQAVVGLSTGEEGVVPAREYSDDRNINLADELKIGDTIEAVVISNVTSDKEGVAYLLSKKRLDARKAWENLSFAEGDTVDAKVINAVRGGLIVDVNGVRGFVPASMVAERFVSDLNQFKNKDIKAQVIEIDPANARLILSRKAVAAQERAAQLAEVFSKLSVGEVVEGTVARLTDFGAFVDLGGVDGLVHVSEISHDRVKNPADVLTKGDKVDVKILALDTEKGRISLSIKATQRGPWDEAADQIAAGSVLEGTVKRVKDFGAFVEILPGIEGLVHVSQISNKRIENPSEVLKSGDKVQVKVLDIKPAEERISLSMKALEEKPEREDRRGNDGSASRADIAAYKQQDDSAATLGDIFGDKL

SEQ ID NO: 18424 - protein, 396 aa, Homo sapiens [sequence omitted]

SEQ ID NO: 18425 - protein, 352 aa, Homo sapiens
GEEGVVPAREYSDDRNINLADELKIGDTIEAVVISNVTSDKEGVSYLLSKKRLDARKAWENLSFAEGDTVDAKVINAVRGGLIVDVNGVRGFVPASMVAERFVSDLNQFKNKDIKAQVIEIDPANARLILSRKAVAAQERAAQLAEVFSKLSVGEVVEGTVARLTDFGAFVDLGGVDGLVHVSEISHDRVKNPADVLTKGDKVDVKILALDTEKGRISLSIKATQRGPWDEAADQIAAGSVLEGTVKRVKDFGAFVEILPGIEGLVHVSQISNKRIENPSEVLKSGDKVQVKVLDIKPAEERISLSMKALEEKPEREDRRGNDGSASRADIAAYKQQDDSAATLGDIFGDKL

SEQ ID NO: 18426 - protein, 372 aa, Cytophaga hutchinsonii
MYNRVNIMLTPKPEDFNWDLVGDKGFGGGYTAAEKEKIASLYEGTLSEVTEKQVLSGTVVGVTERDVIINIGFKSDGLIPLSEFRDVDGGVKVGEVYDVFVEDQENASGQLVLSRRKARIVKAWENIQGALDNDIIIEALVKRRTKGGLIVDLFGVEAFLPGSQIDVKPIRDFDIFVGKKMEVKVVKINYTNDNVVVSHKVLIEKDIEKQKAVILNNLEKGQVLEGVIKNMTNFGVFIDLGGVDGLLHITDISWGRISHPQEVLSLDQKVQVVVLDFDEEKKRISLGMKQLTSHPWDALAADVVVGSKIKGKIVNVADYGAFLELHPGVEGLIHVSEMSWSQHLRNPQDFIKVGDELETVVLTLDRDDVKCL

SEQ ID NO: 18427 - protein, 2429 aa, Mus musculus
DGPPNPKRAKLSSPGFSANDNTDFGSLFDLENDLPDELIPNGELSLLNSGNLVPDAASKHKQLSELLRGGSGSSINPGIGNVSASSPVQQGLGGQAQGQPNSTNMASLGAMGKSPLNQGDSSTPNLPKQAASTSGPTPPASQALNPQAQKQVGLVTSSPATSQTGPGICMNANFNQTHPGLLNSNSGHSLMNQAQQGQAQVMNGSLGAAGRGRGAGMPYPAPAMQGATSSVLAETLTQVSPQMAGHAGLNTAQAGGMTKMGMTGTTSPFGQPFSQTGGQQMGATGVNPQLASKQSMVNSLPAFPTDIKNTSVTTVPNMSQLQTSVGIVPTQAIATGPTADPEKRKLIQQQLVLLLHAHKCQRREQANGEVRACSLPHCRTMKNVLNHMTHCQAGKACQVAHCASSRQIISHWKNCTRHDCPVCLPLKNASDKRNQQTILGSPASGIQNTIGSVGAGQQNATSLSNPNPIDPSSMQRAYAALGLPYMNQPQTQLQPQVPGQQPAQPPAHQQMRTLNALGNNPMSIPAGGITTDQQPPNLISESALPTSLGATNPLMNDGSNSGNIGSLSTIPTAAPPSSTGVRKGWHEHVTQDLRSHLVHKLVQAIFPTPDPAALKDRRMENLVAYAKKVEGDMYESANSRDEYYHLLAEKIYKIQKELEEKRRSRLHKQGILGNQPALPASGAQPPVIPPAQSVRPPNGPLPLPVNRMQVSQGMNSFNPMSLGNVQLPQAPMGPRAASPMNHSVQMNSMASVPGMAISPSRMPQPPNMMGTHANNIMAQAPTQNQFLPQNQFPSSSGAMSVNSVGMGQPAAQAGVSQGQVPGAALPNPLNMLAPQASQLPCPPVTQSPLHPTPPPASTAAGMPSLQHPTAPGMTPPQPAAPTQPSTPVSSGQTPTPTPGSVPSAAQTQSTPTVQAAAQAQVTPQPQTPVQPPSVATPQSSQQQPTPVHTQPPGTPLSQAAASIDNRVPTPSSVTSAETSSQQPGPDVPMLEMKTEVQTDDAEPEPTESKGEPRSEMMEEDLQGSSQVKEETDTTEQKSEPMEVEEKKPEVKVEAKEEEENSSNDTASQSTSPSQPRKKIFKPEELRQALMPTLEALYRQDPESLPFRQPVDPQLLGIPDYFDIVKNPMDLSTIKRKLDTGQYQEPWQYVDDVWLMFNNAWLYNRKTSRVYKFCSKLAEVFEQEIDPVMQSLGYCCGRKYEFSPQTLCCYGKQLCTIPRDAAYYSYQNRYHFCEKCFTEIQGENVTLGDDPSQPQTTISKDQFEKKKNDTLDPEPFVDCKECGRKMHQICVLHYDIIWPSGFVCDNCLKKTGRPRKENKFSAKRLQTTRLGNHLEDRVNKFLRRQNHPEAGEVFVRVVASSDKTVEVKPGMKSRFVDSGEMSESFPYRTKALFAFEEIDGVDVCFFGMHVQEYGSDCPPPNTRRVYISYLDSIHFFRPRCLRTAVYHEILIGYLEYVKKLGYVTGHIWACPPSEGDDYIFHCHPPDQKIPKPKRLQEWYKKMLDKAFAERIINDYKDIFKQANEDRLTSAKELPYFEGDFWPNVLEESIKELEQEEEERKKEESTAASETPEGSQGDSKNAKKKNNKKTNKNKSSISRANKKKPSMPNVSNDLSQKLYATMEKHKEVFFVIHLHAGPVISTQPPIVDPDPLLSCDLMDGRDAFLTLARDKHWEFSSLRRSKWSTLCMLVELHTQGQDRFVYTCNECKHHVETRWHCTVCEDYDLCINCYNTKSHTHKMVKWGLGLDDEGSSQGEPQSKSPQESRRLSIQRCIQSLVHACQCRNANCSLPSCQKMKRVVQHTKGCKRKTNGGCPVCKQLIALCCYHAKHCQENKCPVPFCLNIKHKLRQQQIQHRLQQAQLMRRRMATMNTRNVPQQSLPSPTSAPPGTPTQQPSTPQTPQPPAQPQPSPVNMSPAGFPNVARTQPPTIVSAGKPTNQVPAPPPPAQPPPAAVEAARQIEREAQQQQHLYRANINNGMPPGRAGMGTPGSQMTPVGLNVPRPNQVSGPVMSSMPPGQWQQAPIPQQQPMPGMPRPVMSMQAQAAVAGPRMPNVQPPRSISPSALQDLLRTLKSPSSPQQQQQVLNILKSNPQLMAAFIKQRTAKYVANQPGMQPQPGLQSQPGMQPQPGMHQQPSLQNLNAMQAGVPRPGVPPPQPAMGGLNPQGQALNIMNPGHNPNMTNMNPQYREMVRRQLLQHQQQQQQQQQQQQQQQNSASLAGGMAGHSQFQQPQGPGGYAPAMQQQRMQQHLPIQGSSMGQMAAPMGQLGQMGQPGLGADSTPNIQQALQQRILQQQQMKQQIGSPGQPNPMSPQQHMLSGQPQASHLPGQQIATSLSNQVRSPAPVQSPRPQSQPPHSSPSPRIQPQPSPHHVSPQTGSPHPGLAVTMASSMDQGHLGNPEQSAMLPQLNTPNRSALSSELSLVGDTTGDTLE

SEQ ID NO: 18428 - protein, 2441 aa, Mus musculus
MAENLLDGPPNPKRAKLSSPGFSANDNTDFGSLFDLENDLPDELIPNGELSLLNSGNLVPDAASKHKQLSELLRGGSGSSINPGIGNVSASSPVQQGLGGQAQGQPNSTNMASLGAMGKSPLNQGDSSTPNLPKQAASTSGPTPPASQALNPQAQKQVGLVTSSPATSQTGPGICMNANFNQTHPGLLNSNSGHSLMNQAQQGQAQVMNGSLGAAGRGRGAGMPYPAPAMQGATSSVLAETLTQVSPQMAGHAGLNTAQAGGMTKMGMTGTTSPFGQPFSQTGGQQMGATGVNPQLASKQSMVNSLPAFPTDIKNTSVTTVPNMSQLQTSVGIVPTQAIATGPTADPEKRKLIQQQLVLLLHAHKCQRREQANGEVRACSLPHCRTMKNVLNHMTHCQAPKACQVAHCASSRQIISHWKNCTRHDCPVCLPLKNASDKRNQQTILGSPASGIQNTIGSVGAGQQNATSLSNPNPIDPSSMQRAYAALGLPYMNQPQTQLQPQVPGQQPAQPPAHQQMRTLNALGNNPMSVPAGGITTDQQPPNLISESALPTSLGATNPLMNDGSNSGNIGSLSTIPTAAPPSSTGVRKGWHEHVTQDLRSHLVHKLVQAIFPTPDPAALKDRRMENLVAYAKKVEGDMYESANSRDEYYHLLAEKIYKIQKELEEKRRTRLHKQGILGNQPALPASGAQPPVIPPAQSVRPPNGPLPLPVNRMQVSQGMNSFNPMSLGNVQLPQAPMGPRAASPMNHSVQMNSMASVPGMAISPSRMPQPPNMMGTHANNIMAQAPTQNQFLPQNQFPSSSGAMSVNSVGMGQPAAQAGVSQGQEPGAALPNPLNMLAPQASQLPCPPVTQSPLHPTPPPASTAAGMPSLQHPTAPGMTPPQPAAPTQPSTPVSSGQTPTPTPGSVPSAAQTQSTPTVQAAAQAQVTPQPQTPVQPPSVATPQSSQQQPTPVHTQPPGTPLSQAAASIDNRVPTPSTVTSAETSSQQPGPDVPMLEMKTEVQTDDAEPEPTESKGEPRSEMMEEDLQGSSQVKEETDTTEQKSEPMEVEEKKPEVKVEAKEEEENSSNDTASQSTSPSQPRKKIFKPEELRQALMPTLEALYRQDPESLPFRQPVDPQLLGIPDYFDIVKNPMDLSTIKRKLDTGQYQEPWQYVDDVRLMFNNAWLYNRKTSRVYKFCSKLAEVFEQEIDPVMQSLGYCCGRKYEFSPQTLCCYGKQLCTIPRDAAYYSYQNRYHFCGKCFTEIQGENVTLGDDPSQPQTTISKDQFEKKKNDTLDPEPFVDCKECGRKMHQICVLHYDIIWPSGFVCDNCLKKTGRPRKENKFSAKRLQTTRLGNHLEDRVNKFLRRQNHPEAGEVFVRVVASSDKTVEVKPGMKSRFVDSGEMSESFPYRTKALFAFEEIDGVDVCFFGMHVQDTALIAPHQIQGCVYISYLDSIHFFRPRCLRTAVYHEILIGYLEYVKKLVYVTAHIWACPPSEGDDYIFHCHPPDQKIPKPKRLQEWYKKMLDKAFAERIINDYKDIFKQANEDRLTSAKELPYFEGDFWPNVLEESIKELEQEEEERKKEESTAASETPEGSQGDSKNAKKKNNKKTNKNKSSISRANKKKPSMPNVSNDLSQKLYATMEKHKEVFFVIHLHAGPVISTQPPIVDPDPLLSCDLMDGRDAFLTLARDKHWEFSSLRRSKWSTLCMLVELHTQGQDRFVYTCNECKHHVETRWHCTVCEDYDLCINCYNTKSHTHKMVKWGLGLDDEGSSQGEPQSKSPQESRRLSIQRCIQSLVHACQCRNANCSLPSCQKMKRVVQHTKGCKRKTNGGCPVCKQLIALCCYHAKHCQENKCPVPFCLNIKHNVRQQQIQHCLQQAQLMRRRMATMNTRNVPQQSLPSPTSAPPGTPTQQPSTPQTPQPPAQPQPSPVNMSPAGFPNVARTQPPTIVSAGKPTNQVPAPPPPAQPPPAAVEAARQIEREAQQQQHLYRANINNGMPPGRDGMGTPGSQMTPVGLNVPRPNQVSGPVMSSMPPGQWQQAPIPQQQPMPGMPRPVMSMQAQAAVAGPRMPNVQPNRSISPSALQDLLRTLKSPSSPQQQQQVLNILKSNPQLMAAFIKQRTAKYVANQPGMQPQPGLQSQPGMQPQPGMHQQPSLQNLNAMQAGVPRPGVPPPQPAMGGLNPQGQALNIMNPGHNPNMTNMNPQYREMVRRQLLQHQQQQQQQQQQQQQQQNSASLAGGMAGHSQFQQPQGPGGYAPAMQQQRMQQHLPIQGSSMGQMAAPMGQLGQMGQPGLGADSTPNIQQALQQRILQQQQMKQQIGSPGQPNPMSPQQHMLSGQPQASHLPGQQIATSLSNQVRSPAPVQSPRPQSQPPHSSPSPRIQPQPSPHHVSPQTGTPHPGLAVTMASSMDQGHLGNPEQSAMLPQLNTPNRSALSSELSLVGDTTGDTLEKFVEGL

SEQ ID NO: 18429 - protein, 2441 aa, Mus musculus
MAENLLDGPPNPKRAKLSSPGFSANDNTDFGSLFDLENDLPDELIPNGELSLLNSGNLVPDAASKHKQLSELLRGGSGSSINPGIGNVSASSPVQQGLGGQAQGQPNSTNMASLGAMGKSPLNQGDSSTPNLPKQAASTSGPTPPASQALNPQAQKQVGLVTSSPATSQTGPGICMNANFNQTHPGLLNSNSGHSLMNQAQQGQAQVMNGSLGAAGRGRGAGMPYPAPAMQGATSSVLAETLTQVSPQMAGHAGLNTAQAGGMTKMGMTGTTSPFGQPFSQTGGQQMGATGVNPQLASKQSMVNSLPAFPTDIKNTSVTTVPNMSQLQTSVGIVPTQAIATGPTADPEKRKLIQQQLVLLLHAHKCQRREQANGEVRACSLPHCRTMKNVLNHMTHCQAPKACQVAHCASSRQIISHWKNCTRHDCPVCLPLKNASDKRNQQTILGSPASGIQNTIGSVGAGQQNATSLSNPNPIDPSSMQRAYAALGLPYMNQPQTQLQPQVPGQQPAQPPAHQQMRTLNALGNNPMSVPAGGITTDQQPPNLISESALPTSLGATNPLMNDGSNSGNIGSLSTIPTAAPPSSTGVRKGWHERVTQDLRSHLVHKLVQAIFPTPDPAALKDRRMENLVAYAKKVEGDMYESANSRDEYYHLLAEKIYKIQKELEEKRRTRLHKQGILGNQPALPASGAQPPVIPPAQSVRPPNGPLPLPVNRMQVSQGMNSFNPMSLGNVQLPQAPMGPRAASPMNHSVQMNSMASVPGMAISPSRMPQPPNMMGTHANNIMAQAPTQNQFLPQNQFPSSSGAMSVNSVGMGQPAAQAGVSQGQEPGAALPNPLNMLAPQASQLPCPPVTQSPLHPTPPPASTAAGMPSLQHPTAPGMTPPQPAAPTQPSTPVSSGQTPTPTPGSVPSAAQTQSTPTVQAAAQAQVTPQPQTPVQPPSVATPQSSQQQPTPVHTQPPGTPLSQAAASIDNRVPTPSTVTSAETSSQQPGPDVPMLEMKTEVQTDDAEPEPTESKGEPRSEMMEEDLQGSSQVKEETDTTEQKSEPMEVEEKKPEVKVEAKEEEENSSNDTASQSTSPSQPRKKIFKPEELRQALMPTLEALYRQDPESLPFRQPVDPQLLGIPDYFDIVKNPMDLSTIKRKLDTGQYQEPWQYVDDVRLMFNNAWLYNRKTSRVYKFCSKLAEVFEQEIDPVMQSLGYCCGRKYEFSPQTLCCYGKQLCTIPRDAAYYSYQNRYHFCGKCFTEIQGENVTLGDDPSQPQTTISKDQFEKKKNDTLDPEPFVDCKECGRKMHQICVLHYDIIWPSGFVCDNCLKKTGRPRKENKFSAKRLQTTRLGNHLEDRVNKFLRRQNHPEAGEVFVRVVASSDKTVEVKPGMKSRFVDSGEMSESFPYRTKALFAFEEIDGVDVCFFGMHVQDTALIAPHQIQGCVYISYLDSIHFFRPRCLRTAVYHEILIGYLEYVKKLVYVTAHIWACPPSEGDDYIFHCHPPDQKIPKPKRLQEWYKKMLDKAFAERIINDYKDIFKQANEDRLTSAKELPYFEGDFWPNVLEESIKELEQEEEERKKEESTAASETPEGSQGDSKNAKKKNNKKTNKNKSSISRANKKKPSMPNVSNDLSQKLYATMEKHKEVFFVIHLHAGPVISTQPPIVDPDPLLSCDLMDGRDAFLTLARDKHWEFSSLRRSKWSTLCMLVELHTQGQDRFVYTCNECKHHVETRWHCTVCEDYDLCINCYNTKSHTHKMVKWGLGLDDEGSSQGEPQSKSPQESRRLSIQRCIQSLVHACQCRNANCSLPSCQKMKRVVQHTKGCKRKTNGGCPVCKQLIALCCYHAKHCQENKCPVPFCLNIKHNVRQQQIQHCLQQAQLMRRRMATMNTRNVPQQSLPSPTSAPPGTPTQQPSTPQTPQPPAQPQPSPVNMSPAGFPNVARTQPPTIVSAGKPTNQVPAPPPPAPQQQAAVEAARQIEREAQQQQHLYRANINNGMPPGRDGMGTPGSQMTPVGLNVPRPNQVSGPVMSSMPPGQWQQAPIPQQQPMPGMPRPVMSMQAQAAVAGPRMPNVQPNRSISPSALQDLLRTLKSPSSPQQQQQVLNILKSNPQLMAAFIKQRTAKYVANQPGMQPQPGLQSQPGMQPQPGMHQQPSLQNLNAMQAGVPRPGVPPPQPAMGGLNPQGQALNIMNPGHNPNMTNMNPQYREMVRRQLLQHQQQQQQQQQQQQQQQNSASLAGGMAGHSQFQQPQGPGGYAPAMQQQRMQQHLPIQGSSMGQMAAPMGQLGQMGQPGLGADSTPNIQQALQQRILQQQQMKQQIGSPGQPNPMSPQQHMLSGQPQASHLPGQQIATSLSNQVRSPAPVQSPRPQSQPPHSSPSPRIQPQPSPHHVSPQTGTPHPGLAVTMASSMDQGHLGNPEQSAMLPQLNTPNRSALSSELSLVGDTTGDTLEKFVEGL

SEQ ID NO: 18430 - protein, 234 aa, Mus musculus
MICDFLFICRFVDSGEMAESFPYRTKALFAFEEIDGVDLCFFGMHVQEYGSDCPPPNQRRVYISYLDSVHFFRPKCLRTAVYHEILIGYLEYVKKLGYTTGHIWACPPSEGDDYIFHCHPPDQKIPKPKRLQEWYKKMLDKAVSERIVHDYKDILKQATEDRLTSAKELPYFEGDFWPNVLEESIKELEQEEEERKREENTSNESTDVRAFCVCSVYLDTSLTIQKGVYTLNLV

SEQ ID NO: 18431 - protein, 2156 aa, Rattus norvegicus
MKNVLNHMTHCQSGKSCQVAHCASSRQIISHWKNCTRHDCPVCLPLKNAGDKRNQQSILTGAPVGLGNPSSLGVGQQSTPSLSTVSQIDPSSIERAYAALGLPYQVNQIPPQPPVQAKNQQSQPSGQSPQGMRSMNNMSASPMGVNGGVGVQTPNLLSDSMLHSTINSQNPMMNENASVASLGPLPTAAQPSSTGIRKQWHEDITQDLRNHLVHKLVQAIFPTPDPAALKDRRMENLVAYARKVEGDMYESANNRAEYYHLLAEKIYKIQKELEEKRRTRLQKQNMLPSAPGMVPVPMNTAPNMGQQPTGMTTKTKGYLTISVSTPDGPLPDPSMIRGSVPNQMMPRMTPQPGLNQFGQMNIPQPPIGPRQPSPLQHHGQLAQSGSLNPPMGYGPRMQQTSGQNQFLSQTQFPSQGMNVTNMPLAPSSSQAPVSQAQMSSSSCPVNSPIMPPGSQGSHIHCPTLPQQAHQNSPSPVPSRTPTPHHTPPSIGTQQPAATAIPAPVPTPPAMPPGAQPQSLRPPSRQTPTPPTHLPPQVQPSLPVPPADQSQPQPRSQQSTAASVPTPTAPLLPPQPPTPLSQPAVSVEGQVSNPPSTSSTEVNSQTIPEKQPSQEVKMEVKMDVDQPEPADAQPDDTKEAKAEDGKVEPTETEERGPELKTEVKEEEDQPSTSAAQSSPAPGQSKKKIFKPEELRQALMPTLEALYRQDPESLPFRQPVDPQLLGIPDYFDIVKSPMDLSTIKRKLDTGQYQEPWQYIDDIWLMFNNAWLYNRKTSRVYKYCSKLSEVFEQEIDPVMQSLGYCCGRKVFALLNKYFLLQLEFSPQTLCCYGKQLCTIPRDATYYSYQNRYHFCEKCFNEIQGESVSLGDDPSQPQTTINKEQFSKRKNDTLDPELFVECTECGRKMHQICVLHHEVIWPSGFVCDGCLKKTARTRKENKFSAKRLPSTRLGTFLENRVNDFLRRQNHPESGEVTVRVVHASDKTVEVKPGMKARCLVISHSLLTDLQLFVDSGEMAESFPYRTKALFAFEEIDGVDLCFFGMHVQEYGSDCPPPNQRRVYISYLDSVHFFRPKCLRTAVYHEILIGYLEYVKKLGYTTGHIWACPPSEGDDYIFHCHPPDQKIPKPKRLQEWYKKMLDKAVSERIVHDYKDILKQATEDRLTSAKELPYFEGDFWPNVLEESIKELEQEEEERKREENTSNESTDVTKGDSKNAKKKNNKKTSKNKSSLSRGNKKKPGVPNVSNDLSQKLYATMEKHKEWHYSSRVTVSLVCWQVFFVIRLIACPAPNSLPPIVDPDPLIPCDLMDGRDAFLTLARDKHLEFSSLRRAQWSTMCMLVELHTQSQDRFVYTCNECKHHVETRWHCTVCEDYDLCITCYNTKNHDHKMEKLGLGLDDESNNQQAAATQSPGDSRRLSIQRCIQSLVHACQCRNANCSLPSCQKMKRVVQHTKGCKRKTNGGCPICKQLIALCCYHAKHCQENKCPVPFCLNIKQKLRQQQLQHRLQQAQMLRRRMASMQRTGVAGQQQGLPSPTPATPTTPTGQQPATPQTPQPQPTSQPQPTPPNNMTPYLPRTQTAGPVSQGKAAGQVTPPTPPQTAQPPLPGPPPAAVEMAMQIQRAAETQRQMAHVQIFQRPIQHQMAPMAPMGMNPPPMARGPGGHLDPGMGPAGMQQQPPWAQGGMPQPQQMQSGMPRPAMMSVAQHGQPLNMAPQPGLGQVGVSPLKPGTVSQQALQNLLRTLRSPSSPLQQQQVLSILHANPQLLAAFIKQRAAKYANSNPQPLPGQPGMPQGQPGLQPPTMPGQQGVHSNPALQNMNPMQAGVQRAGLPQQQPQQQLQPPMGGMSPQAQQMNMNHNTMPSQFRDILRRQMMQQQGAGPGIGPGMANHNQFQQPQGIGYPPQQQQQQQQQRMQHHMQQMQQGNMGQMGQLPQALGAEAGASLQAYQQRLLQQQMGSPAQPNPMSPQQHMLPNQAQSPHLQGQQIPNSLSNQVRSPQPVPSPRPQSQPPHSSPSPRMQPQPSPHHVSPQTSSPHPGLVAAQAANPMEQGHFASPDQNSMLSQLASNPGMANLHGASATDLGLSADSADLSSNLSQSLEMKLVQCLPDMYQLFPQLAMAMPQWAATCRPSIDKGEEAEREAGSHCQLSSTPEDMNPRNIEDSV

SEQ ID NO: 18432 - protein, 1605 aa, Rattus norvegicus
MKNVLNHMTHCQSGKSCQVAHCASSRQIISHWKNCTRHDCPVCLPLKNAGDKRNQQSILTGAPVGLGNPSSLGVGQQSTPSLSTVSQIDPSSIERAYAALGLPYQVNQIPPQPPVQAKNQQSQPSGQSPQGMRSMNNMSASPMGVNGGVGVQTPNLLSDSMLHSTINSQNPMMNENASVASLGPLPTAAQPSSTGIRKQWHEDITQDLRNHLVHKLVQAIFPTPDPAALKDRRMENLVAYARKVEGDMYESANNRAEYYHLLAEKIYKIQKELEEKRRTRLQKQNMLPSAPGMVPVPMNTAPNMGQQPTGMTTKTKGYLTISVSTPDGPLPDPSMIRGSVPNQMMPRMTPQPGSQGSHIHCPTLPQQAHQNSPSPVPSRTPTPHHTPPSIGTQQPAATAIPAPVPTPPAMPPGAQPQSLRPPSRQTPTPPTHLPPQLSQPAVSVEGQVSNPPSTSSTEVNSQTIPEKQPSQEVKMEVKMDVDQPEPADAQPDDTKEAKAEDGKVEPTETEERGPELKTEVKEEEDQPSTSAAQSSPAPGQSKKKIFKPEELRQALMPTLEALYRQDPESLPFRQPVDPQLLGIPDYFDIVKSPMDLSTIKRKLDTGQYQEPWQYIDDIWLMFNNAWLYNRKTSRVYKYCSKLSEVFEQEIDPVMQSLGYCCGRKVFALLNKYFLLQLEFSPQTLCCYGKQLCTIPRDATYYSYQNRYHFCEKCFNEIQGESVSLGDDPSQPQTTINKEQFSKRKNDTLDPELFVECTECGRKMHQICVLHHEVIWPSGFVCDGCLKKTARTRKENKFSAKRLPSTRLGTFLENRALFAFEEIDGVDLCFFGMHVQEYGSDCPPPNQRRVYISYLDSVHFFRPKCLRTAVYHEILIGYLEYVKKLGYTTGHIWACPPSEGDDYIFHCHPPDQKIPKPKRLQEWYKKMLDKAVSERIVHDYKDILKQATEDRLTSAKELPYFEGDFWPNVLEESIKELEQEEEERKREENTSNESTDVTKGDSKNAKKKNNKKTSKNKSSLSRGNKKKPGVPNVSNDLSQKLYATMEKHKEWHYSSRVTVSLVCWQVFFVIRLIACPAPNSLPPIVDPDPLIPCDLMDGRDAFLTLARDKHLEFSSLRRAQWSTMCMLVELHTQSQDRFVYTCNECKHHVETRWHCTVCEDYDLCITCYNTKNHDHKMEKLGLGLDDESNNQQAAATQSPGDSRRLSIQRCIQSLVHACQCRNANCSLPSCQKMKRVVQHTKGCKRKTNGGCPICKQLIALCCYHAKHCQENKCPVPFCLNIKQKLRQQQLQHRLQQAQMLRRRMASMQRTGVAGQQQGLPSPTPATPTTPTGQQPATPQTPQPQPTSQPQPTPPNNMTPYLPRTQTAGPVSQGKAAGQVTPPTPPQTAQPPLPGPPPAAVEMAMQIQRAAETQRQMAHVQIFQRPIQHQMAPMAPMGMNPPPMARGPGGHLDPGMGPAGMQQQPPWAQGGMPQPQQMQSGMPRPAMMSVAQHGQPLNMAPQPGLGQVGVSPLKPGTVSQQALQNLLRTLRSPSSPLQQQQVLSILHANPQLLAAFIKQRAAKYANSNPQPLPGQPGMPQGQPGLQPPTMPASHGNATVGSYLQAQY

SEQ ID NO: 18433 - protein, 2531 aa, Anopheles gambiae str. PEST
AMPGQAMLGMGPLGAKTPGMLSSMNQAMGNNVVVNAMGAGGGAGMLGMGSGIGPNGGVGGGAGGAGGPVMTNSMGLSGGVMSGGGLVQLNSGGVRQSNAQQVGGGAGGNGGPMMHQLVPPQNGPMGGGQPRLGNPGLMPRTTGHMNPGLRQLVQQGHAVGAPMVGQMGGGGAGNAAGGQFVVGYQQQGVMAQGVRTVSPVLVNRQPPNAPGPGGARLPNPMVTGGGGAGGATIGMLGGDGSVGPQTQAGPGGPGGVVSLQQQQQHVGPGPNAPQIRPLVASAAAAAAAQQNQAMNSMNVASGAAGGSGPGSSGTVGGATGGGTSGTMNSSPGGNPLLADPEKRKLIQQQLVLLLHAHKCQRREAENPSGNICSLAHCRTMKEVLTHMQSCLLGKNCPKTHCSSSRQIINHWKNCQRQDCPVCLPLQQHHDKQQDTLEPAKGDDASQAEQKEGKADGLADQQQQQDKKEQSETESKSQDAGAGEAKDQQDKPSGESLDHKMADGTAEGKAALDKKQQPGETGAASDAATDQSEKKPESQSPDQTSATDHSAGIATDEPAAAERTAAPNGRLGGPGAGGRTGRPGRVSGAGNAVRLMMPPNQLVSSGGMLQQNATDGMLGQNAANQQGGGGVQQTQANPSIIPMGAGSGGGGNQMLFSPGDGSTLTNSGAVVCSTSTTGGGGMQTMTSQSMPLMNATNTSTMSGGGGGGPNTSSFAAGSGAGGGGAGGTGGTNPSMVAVPVQGTKDWHHSVTPDLRNHLVHKLVQAIFPSPDPSAMFDKRMYNLVAYAKKVEGDMYEMANSRSEYYHLLAEKIYKIQKELEEKRQKRKVGGAGAGGAGANAAGQLLRPLNHNHQQQVNLLGGMNATAGANNPAAMQQMRHGGGAGGLMNQAQNSLGGQLGPNSRLGVVNAQQQGGGPGGQTQQLFVAQPGPSPNGNLVHGAGGTVLPGGLSPFAQQQQPNNHAQGMVGVPQQQPSPQVVNQQSFLNGPAMMDSSSQLQQFNDIVRAKCANLSGGGVDGTQQQLGQLSSALTGQTMAQGMRTAFGGVNASAAQQQQQQGANPGNNPGGTGLTGTADLLASSPYGVVGGAGGTIGPNATTVATSNGPMLPSPAGNSSTSSNSIVPLLLTPGGPPSTESSSAGVGDGLGGPTATTGASSALPVGGGLLPPGSSLGGTMVTGAAATATLSLNGSSTTTTPATTPATPGSGAALPSTSTVLPASTGNLSGGSGTTNTTANGASTLTTSVGMSVSRMTSSSSYSSQMAALEAAMARDKEDSPEQPSSSKNNKGKFEMKREEDIKSEPDSNHMDTSGGGESGGKNVNNECMSMMAHEIKSELMDEQAGRDLVQGGGGAGPPRQPEGEGDEDGAEGGHLPEPTIQTNASDNKKKCSFKPEELREALLPTLEKLVTQEPESIPFRMPVDPNSLGIPDYFDIVRQPMDLSTIRKKLESGQYQDPREYVDDVWLMFDNAWLYNRKTSRVYRYCTKLSEVFEMEIDPVMQSLGYCCGRKYTFNPQVLCCYGKQLCTIPRDAKYYSYQNRSFGALSTRYTYCQKCFNEIPGDTVTLGDDPMQSQTQIKKDQFKEMKNDHLELEPFVDCLDCGRKQHQICVLYLESIWPGGFVCDACLKKKGQKRKDNKFNAKRLPTSKLGTYIETRVNNFLKKKEAGAGEVHIRVVSSSDKMVEVKPGMRSRFVENGEMLPEFPYRAKALFAFEEVDGVDVCFFGMHVQEYGSECAAPNTRRVYIAYLDSVHFFRPRQYRTSVYHEILLGYMDYAKQLGYTMAHIWACPPSEGDDYIFHCHPPEQRIPKPKRLQEWYKKMLDKGMVERTIQDYKDILKQAMEDKLQSASELPYFEGDFWPNVLEESIKELDQEEEEKRKQAEREEAANAMIMSNDDSDTVADGKKKGQKKAKKSNKSKAAQRKSNKKTNEQIGNDLSAKIFATMEKHKEVFFVIRLHSAQSAASLAPIQDPDPLINCDLMDGRDAFLTLARDKHFEFSSLRRAQFSTLCMLYELHNQGQDKFVYTCNNCKNHVETRYHCTVCDDFDLCITCKEKVGHQHKMDKLGFDLDDGSSPSDVKQTNPQEARKQSIQRCIQSLVHACQCRDANCRLPSCQKMKRVVQHTKHCKRKTHGGCPICKQLIALCCYHAKHCQEAKCLVPFCPNIKHKLKQQQLQQRLQQQQLLRRRMAVMNTTRLGAPTPQIPQNSNGGGSSLSSAVCSTNVIAGCSVAPSGPVSNTMAIGVPASGGGVVTSMACGGLNNAGAGAMSPSAVPNTVQMGGMGSPHHGGIGMKPGAQTPPANVLQAVQEEAARQQAPHVGYGKVNPVMIPPVMARAMPAGHMNAGGVGVNVSGVGVMPNAQQQPNAVGVAMGGPGGGPGGLGQNVMQMDQWNTRYPNGGGPGMRPTLPGMMQQPQQQQPQNTLQTVSEASVHSQEHDRPMDKGIMGGGVGGAQMMAGIRQGPVAMQGGMMGNAQQQQAGGQQNQPGQTQMATQPKQAIAQLMATLKNPAAGPEQQQQLLSILKANPQLMAAFIKQRQQ

SEQ ID NO: 18434 - protein, 994 aa, Oryza sativa (japonica cultivar-group)
MGAANFAHSLADKPKQMPERLANTIFTSCASTLPKCSPSIDVLHIGHIKEHFSAEVIWHHKHYGQILPGDAYQNDSSQPSTSGSSSSLSAVWDQTTCSSAMRTLPMDSFSTVNGQNLSTNNKSLYPTTGQGPLLQQYIECEMKQETWSRSLEQSDQSNITTGNRDLYHAQIHPYINGEHKRDRCIQMKEKLGHTSDHEGFSREKSSNLSNHFMHHQQGFMTNYGACSPVSKTVDRAEQTSNSTVSKPTSPASDGSSGKHYPAKRLKVDVPHLVHVNEMEASKEQQPAANETYASAETVQSEVTNSPTKSPCCTSLGDNIACTDNVHGMDMVRLSGSAVQTEEEFRRENSDIEMKDAKVDLLDQTLSGDSLRARKRRGASVLYALTSEELKDHLCTLNHDTSQSKVPTEELLSVEGLPDQNTCNLCGMERLLFEPPPRFCALCFKIINSTGSYYVEVENGNDKSSICGRCHHLSSAKAKYQKRFSYAETDAEAEWWVQCDKCKAWQHQICALFNPKIVDPEAEYTCAKCFLKEKDNEDVDSLEPSTILGARELPRTRLSDHIEQRLSERLVQERQQRAIASGKSVDEVPGVEGLTVRVVSSADRTLQVQPRFKDFFKKEQYPGEFPYKSKAILLFQKNEGVDVCLFAMYVQEYGSACPSPNQRHVYLAYIDSVKYFRPEIKSASGEALRTFVYHEILIGYLDFCKKRGFVSCSIWTCPSTKRDDYVLYCHPTIQKMPKSDKLRSWYQNLVKKAVKEGVVVERNTLYDFFLQPTNECKTNISAAWLPYCDNDFWPGEAERLLEKKDDDTSQKKETQLGRLLRVAKRDDRKGNLEDILLVHKLGERLRTMKEDFLMLCLQQFCKHCHHPIVSGSSWVCTSCKNFFLCERCYAEELNTPLKDRHPATTKQKHAFERIEEEPLPETDDVDPTMESKNCSSMVYDVIPVPVVEEVAICVYSCGNCCSRTHCFVTMQTVQLPDAGKVCITRNIDLPSGVVK

SEQ ID NO: 18435 - protein, 199 aa, Triticum aestivum
  unsure (1)..(199): unsure at all Xaa locations
RQLEINPHXREQKRRSRTSGSPGLQVVAPRLFQKNEGVDVCLFAMYVQEYGSASPSPNQRHVYLAYIDSVKYFRPEIKSASGEALRTFVYHEILIGYLDYCKKQGFVSCSIWACPSTKRDDYVLYCHPTAQKMPRSDKLRSWYQNLIKKAVKEGVVVERNTLYDFFLQPTSECKAIISAACLPYCENDFWPGEAEKLLV

SEQ ID NO: 18436 - protein, 182 aa, Triticum aestivum
  unsure (1)..(182): unsure at all Xaa locations
XGVKPRFLETFQEDNYPTEFPYKSKAVLLFQKIDGVEVCLFGMYVQEFGAECAFPNQRRVYLSYLDSVKYFRPGIKAATGEALRTFVYHEILIGYLEYCKQRGFTSCYIWARPPLEGDNIFYCNPTIQTTRTSDILREWCLAMIRKATKEEIVVELTNLYDHFFITTGECKAKVTASRLTYX

SEQ ID NO: 18437 - protein, 123 aa, Triticum aestivum
  unsure (1)..(123): unsure at all Xaa locations
XGAECADPNQRRVYLSYLDSVKFFRPDVKTVSGEALRTYVYHEILIGYLEYCKQRGFTSCYIWACPPLKGEDYILYCHPEIXKTPKSDKLREWYLSMLRKAVKERIVVELTNLYDHFFITTKX

SEQ ID NO: 18438 - protein, 268 aa, Triticum aestivum
  unsure (1)..(268): unsure at all Xaa locations
XKRALKAAGHTDLSGNASKDAMLMQKLGETIYPMKEDFIMVHLQYSCSHCCILMSSGKRWVCHQCRSFYICDKCYSAEQQLEDRERHPSNSRDTHKLHPVDIVGVPEETKDRDDILESEFFDTRQAFLSLCQGNHYQYDTLRRAKHSSMMVLYHLHNPTAPAFVTTCNVCSHDIETGQGWRCEICPDFDVCNGCYQKGAVNHPHKXGLFRHGMQCKTRASGGCALCKKMWYMLQLHARASXKAATAVPRRRAAVNEMMRQRAAEVATT

SEQ ID NO: 18439 - protein, 201 aa, Triticum aestivum
  unsure (1)..(201): unsure at all Xaa locations
XAGQTDLSGNASKDAILMQKLGETIYPMKEDFIMVHLQHSCSHCSTLMVAGKRWVCHQCKSFYICDSCYDSEQRLEEKERHPSNSRDLHVLHPVDIVGVPEDTKDXDDVLECEFFDTRQAFLSLCQGNHYQYDTLRRAKHSSMMVLYHLHNPTAPAFVTTCNICNNDIEAGQGWRCEECPDFDVCAGCYNKDGGANHRHKX

SEQ ID NO: 18440 - protein, 83 aa, Triticum aestivum
SNQISQILQRHPGGHDLYSGNCVTVREAVGRAEQTSNSTVSKPNSPASDESSGKHHPAKRLKVNYPIPVHADETEFPKEQQPA

SEQ ID NO: 18441 - protein, 121 aa, Triticum aestivum
  unsure (1)..(121): unsure at all Xaa locations
XGVRPRGVLPVLVVAFPTGAPFXSAAVRVSQSGDGVEVCCFGSYVRHSPAVGPCPDPRRVYGADRGSAYYSGPPFLPASGGALRSCVCLAFLLRYLEYCKQRGFTSCYIWACPPLKGEDYX

SEQ ID NO: 18442 - protein, 311 aa, Zea mays
  unsure (1)..(311): unsure at all Xaa locations
XPRVRLSDHIEQRLSERLEQDRQQRASASGKVAEEVPGVKGLTVRVVSSAERLLQVQPRFRGFFKQGKYPGEFPYKSKAILLFQKIEGVDVCLFAMYVQEYGSDCPPPNQRHVYLAYIDSVKYFRPEIKSATGEALRTFVYHEILIGYLDYCKKRGFVSCSIWACPSTKRDDYVLYCHPTVQKMPKSDKLRSWYQNLIKKAIKEGVVVERNTLSDFFLQPTNECKANISAACLPYCENDFWPGEAERLLEKKDDNASQKEETQVGRLLRVAKRDDRKGNLDDILLVHNLGERMRTMKEDFIMLCLQQFCKX

SEQ ID NO: 18443 - protein, 2045 aa, Caenorhabditis elegans
MDEPPSKKSRADSDYDSGLDALSALESLEAFPTSSKDTDVDNNPSTSAGGSGGPSGSTPHPQGTPQPAPSNNGGFNLQPGQSQPQQPPQNMGGGVNGSVLQELLMNPSQTSNNSPRPQAYPPGQQNAFNRSPMMPNGTPNMMSPPSMGRVPGPSPGGPQPPGPGQPQMRPGQPGMFQGDQQQQMMMGAQGQQFPGMMHRYPYAQGGPPPGAQGMPQGYPGVSRGGPTPGQPMGRGAMMNGAMPRSGPMPTQGRPGIPPNQQAMMQPMMTDRQFMQHGQYGQQRPEFMQQYGRPGGYPMMHQGMMMDSNGQPIRGPNQMMMMSNGHPGMSHGPPNGQPGPQAAAAQHAAQQQAAAQAQAQAAAQQQQQQQREQEAAAAAQRNGAGRATTPGSSMLATHQDPEKRKLIQQQLVLLLHAHKCSQREKENRDFAAKNQPPPHAACTLPHCSTMKEVLTHMTSCNVGRLCHFAHCASSRQIIAHWKNCSREDCPVCKPLKRIQDTPLQFSLPDLANLIGVNGNSNGSAEGDGLHQFGSPAMRTGNITNSLFEGFNGNPFQNGPNRGGPRPPGGNGEIPNLPPPDMPDCTKEWHHQVTKDLRNHLVGKLVKAIFPEPNQEAMNDNRLKDLIAYARKVEKEMFESANDREEYYHLLAEKIYKIQKELQEKKNSRLNQGAAAHDQYAIPPSNELAQMLGVEGGRSDVHSEGSSMAVAPSQQNQPWGGAPNSNMHQQIPPNGQVPQVNNSSTFPSSGNSTPNIGASSTVSAMLQPKTEPMDDQNTDSLSSRPPTAIGFGGSSSSTPAPIMNGIVKKEEDPEESSNQAPPSVKDTKDGVAESKPKEQQAKREPTPPPTEDTVFSQEDLIKFLLPVWEKLDKSEDAAPFRVPVDAKLLNIPDYHEIIKRPMDLETVHKKLYAGQYQNAGQFCDDIWLMLDNAWLYNRKNSKVYKYGLKLSEMFVSEMDPVMKSMGYCCAKKLAFTPLSLFCYGAAMCTIAREQQYWVFEQSSTQYNVTVTERYTYCQKCFDALPPEGISLSENPNDRNNMAPKTSFTEQKNSVIDYEPFERCKYCMRKWHRICALHDKKVYPEGFICECCRTAKKYQKPDNKYLASKLPHNKLSTFLEDRVNGFIKKQLQAEAHKYPVIIRTLCVQDKEAEVKAQMKQKYVESNQFPEKFPYRTKAVFAFEIIDGVEVCFFGLHVQEYGSACPAPNARRVYIAYLDSVHFFQPRELRTDVYHELLLGYLDYAKMLGYTMAHIWACPPSEGDDYIFHCHPPEQKIPKPKRLQDWYKKMLEKGVQEGSVVEFKDIYKQARDDNLTTPTQLPYFEGDFWPNVIEDCIREASNEEAQRKVKEDDDDGEDADGGLGGGDSGKKKSSKNKKNNLKKNAKMNKKKAGSITGNEVADKLYSQFEKHKEVFFTIRLVSLQNEPAVLAKPISDPDGLMQSDMMDGRDTFLTKAREEHWEFSSLRRAKYSTLCLAYSLHETDSKGMEYTCNKCSSPAVWHCQSCDDFDLCDGCKPTTQHPHEMEKIKSLIGGGEAGDSAAGGTRYESIQRCIASLVHACQCRDANCRRMSCHKMKRVVQHTKMCKKRINGTCPVCKQLIALCCYHAKHCTRDACTVPFCMNIRQKLAEQKRSQQRRADMMMRRRMEGLQSHVGGAAPTPSTVSNGTPSNAPTPPVSAGPGPAVKGGGVGQVQMQQHQGSHVGGSGPAGMGQPMNSFGGMPGMGLGPNAQNGPGLPGMNPQMNANQSRYMPNGPGLGQSGAPGQQQQPMYSSGMPMQRPGGLGGMNPQQQPQQQQGHPGLQNPGGRPGGVHGMGQNQPVRNNQDMVMNMQMQNQHQQPPPFDSTLQPQIMKINSRLKAAKTEEERETVFSDLKKTPHLFHAWLRMRENQNLVPNRMQGYSQMSMGSSNLQNLQQQQLQQQQAGAMRGGGGFAPGQNNSQPRAPSGQFASMNPSMQQQYPQQQQGWPQQRQQNPGGMQQNANPYNQFQNRQNMMMMPQQQQPHPSNAGDRCSYLLFFVLNLRIDCPRFLYFPFFLNRSLLRCCSECAVI

SEQ ID NO: 18444 - protein, 2027 aa, Caenorhabditis elegans
MDEPPSKKSRADSDYDSGLDALSALESLEAFPTSSKDTDVDNNPSTSAGGSGGPSGSTPHPQGTPQPAPSNNGGFNLQPGQSQPQQPPQNMGGGVNGSVLQELLMNPSQTSNNSPRPQAYPPGQQNAFNRSPMMPNGTPNMMSPPSMGRVPGPSPGGPQPPGPGQPQMRPGQPGMFQGDQQQQMMMGAQGQQFPGMMHRYPYAQGGPPPGAQGMPQGYPGVSRGGPTPGQPMGRGAMMNGAMPRSGPMPTQGRPGIPPNQQAMMQPMMTDRQFMQHGQYGQQRPEFMQQYGRPGGYPMMHQGMMMDSNGQPIRGPNQMMMMSNGHPGMSHGPPNGQPGPQAAAAQHAAQQQAAAQAQAQAAAQQQQQQQREQEAAAAAQRNGAGRATTPGSSMLATHQDPEKRKLIQQQLVLLLHAHKCSQREKENRDFAAKNQPPPHAACTLPHCSTMKEVLTHMTSCNVGRLCHSDTTQTTKKCSVAHCASSRQIIAHWKNCSREDCPVCKPLKRIQDTPLQFSLPDLANLIGVNGNSNGSAEGDGLHQFGSPAMRTGNITNSLFEGFNGNPFQNGPNRGGPRPPGGNGEIPNLPPPDMPDCTKEWHHQVTKDLRNHLVGKLVKAIFPEPNQEAMNDNRLKDLIAYARKVEKEMFESANDREEYYHLLAEKIYKIQKELQEKKNSRLNQGAAAHDQYAIPPSNELAQMLGVEGGRSDVHSEGSSMAVAPSQQNQPWGGAPNSNMHQQIPPNGQVPQVNNSSTFPSSGNSTPNIGASSTVSAMLQPKTEPMDDQNTDSLSSRPPTAIGFGGSSSSTPAPIMNGIVKKEEDPEESSNQAPPSVKDTKDGVAESKPKEQQAKREPTPPPTEDTVFSQEDLIKFLLPVWEKLDKSEDAAPFRVPVDAKLLNIPDYHEIIKRPMDLETVHKKLYAGQYQNAGQFCDDIWLMLDNAWLYNRKNSKVYKYGLKLSEMFVSEMDPVMKSMGYCCAKKLAFTPLSLFCYGAAMCTIAREQQYWVFEQSSTQYNVTVTERYTYCQKCFDALPPEGISLSENPNDRNNMAPKTSFTEQKNSVIDYEPFERCKYCMRKWHRICALHDKKVYPEGFICECCRTAKKYQKPDNKYLASKLPHNKLSTFLEDRVNGFIKKQLQAEAHKYPVIIRTLCVQDKEAEVKAQMKQKYVESNQFPEKFPYRTKAVFAFEIIDGVEVCFFGLHVQEYGSACPAPNARRVYIAYLDSVHFFQPRELRTDVYHELLLGYLDYAKMLGYTMAHIWACPPSEGDDYIFHCHPPEQKIPKPKRLQDWYKKMLEKGVQEGSVVEFKDIYKQARDDNLTTPTQLPYFEGDFWPNVIEDCIREASNEEAQRKVKEDDDDGEDADGGLGGGDSGKKKSSKNKKNNLKKNAKMNKKKAGSITGNEVADKLYSQFEKHKEVFFTIRLVSLQNEPAVLAKPISDPDGLMQSDMMDGRDTFLTKAREEHWEFSSLRRAKYSTLCLAYSLHETDSKGMEYTCNKCSSPAVWHCQSCDDFDLCDGCKPTTQHPHEMEKIKSLIGGGEAGDSAAGGTRYESIQRCIASLVHACQCRDANCRRMSCHKMKRVVQHTKMCKKRINGTCPVCKQLIALCCYHAKHCTRDACTVPFCMNIRQKLAEQKRSQQRRADMMMRRRMEGLQSHVGGAAPTPSTVSNGTPSNAPTPPVSAGPGPAVKGGGVGQVQMQQHQGSHVGGSGPAGMGQPMNSFGGMPGMGLGPNAQNGPGLPGMNPQMNANQSRYMPNGPGLGQSGAPGQQQQPMYSSGMPMQRPGGLGGMNPQQQPQQQQGHPGLQNPGGRPGGVHGMGQNQPVRNNQDMVMNMQMQNQHQQPPPFDSTLQPQIMKINSRLKAAKTEEERETVFSDLKKTPHLFHAWLRQQQLQQQQAGAMRGGGGFAPGQNNSQPRAPSGQFASMNPSMQQQYPQQQQGWPQQRQQNPGGMQQNANPYNQFQNRQNMMMMPQQQQPHPSNAGDRCSYLLFFVLNLRIDCPRFLYFPFFLNRSLLRCCSECAVI

SEQ ID NO: 18445 - protein, 2056 aa, Caenorhabditis elegans
MDEPPSKKSRADSDYDSGLDALSALESLEAFPTSSKDTDVDNNPSTSAGGSGGPSGSTPHPQGTPQPAPSNNGGFNLQPGQSQPQQPPQNMGGGVNGSVLQELLMNPSQTSNNSPRPQAYPPGQQNAFNRSPMMPNGTPNMMSPPSMGRVPGPSPGGPQPPGPGQPQMRPGQPGMFQGDQQQQMMMGAQGQQFPGMMHRYPYAQGGPPPGAQGMPQGYPGVSRGGPTPGQPMGRGAMMNGAMPRSGPMPTQGRPGIPPNQQAMMQPMMTDRQFMQHGQYGQQRPEFMQQYGRPGGYPMMHQGMMMDSNGQPIRGPNQMMMMSNGHPGMSHGPPNGQPGPQAAAAQHAAQQQAAAQAQAQAAAQQQQQQQREQEAAAAAQRNGAGRATTPGSSMLATHQDPEKRKLIQQQLVLLLHAHKCSQREKENRDFAAKNQPPPHAACTLPHCSTMKEVLTHMTSCNVGRLCHSDTTQTTKKCSVAHCASSRQIIAHWKNCSREDCPVCKPLKRIQDTPLQFSLPDLANLIGVNGNSNGSAEGDGLHQFGSPAMRTGNITNSLFEGFNGNPFQNGPNRGGPRPPGGNGEIPNLPPPDMPDCTKEWHHQVTKDLRNHLVGKLVKAIFPEPNQEAMNDNRLKDLIAYARKVEKEMFESANDREEYYHLLAEKIYKIQKELQEKKNSRLNQGAAAHDQYAIPPSNELAQMLGVEGGRSDVHSEGSSMAVAPSQQNQPWGGAPNSNMHQQIPPNGQVPQVNNSSTFPSSGNSTPNIGASSTVSAMLQPKTEPMDDQNTDSLSSRPPTAIGFGGSSSSTPAPIMNGIVKKEEDPEESSNQAPPSVKDTKDGVAESKPKEQQAKREPTPPPTEDTVFSQEDLIKFLLPVWEKLDKSEDAAPFRVPVDAKLLNIPDYHEIIKRPMDLETVHKKLYAGQYQNAGQFCDDIWLMLDNAWLYNRKNSKVYKYGLKLSEMFVSEMDPVMKSMGYCCAKKLAFTPLSLFCYGAAMCTIAREQQYWVFEQSSTQYNVTVTERYTYCQKCFDALPPEGISLSENPNDRNNMAPKTSFTEQKNSVIDYEPFERCKYCMRKWHRICALHDKKVYPEGFICECCRTAKKYQKPDNKYLASKLPHNKLSTFLEDRVNGFIKKQLQAEAHKYPVIIRTLCVQDKEAEVKAQMKQKYVESNQFPEKFPYRTKAVFAFEIIDGVEVCFFGLHVQEYGSACPAPNARRVYIAYLDSVHFFQPRELRTDVYHELLLGYLDYAKMLGYTMAHIWACPPSEGDDYIFHCHPPEQKIPKPKRLQDWYKKMLEKGVQEGSVVEFKDIYKQARDDNLTTPTQLPYFEGDFWPNVIEDCIREASNEEAQRKVKEDDDDGEDADGGLGGGDSGKKKSSKNKKNNLKKNAKMNKKKAGSITGNEVADKLYSQFEKHKEVFFTIRLVSLQNEPAVLAKPISDPDGLMQSDMMDGRDTFLTKAREEHWEFSSLRRAKYSTLCLAYSLHETDSKGMEYTCNKCSSPAVWHCQSCDDFDLCDGCKPTTQHPHEMEKIKSLIGGGEAGDSAAGGTRYESIQRCIASLVHACQCRDANCRRMSCHKMKRVVQHTKMCKKRINGTCPVCKQLIALCCYHAKHCTRDACTVPFCMNIRQKLAEQKRSQQRRADMMMRRRMEGLQSHVGGAAPTPSTVSNGTPSNAPTPPVSAGPGPAVKGGGVGQVQMQQHQGSHVGGSGPAGMGQPMNSFGGMPGMGLGPNAQNGPGLPGMNPQMNANQSRYMPNGPGLGQSGAPGQQQQPMYSSGMPMQRPGGLGGMNPQQQPQQQQGHPGLQNPGGRPGGVHGMGQNQPVRNNQDMVMNMQMQNQHQQPPPFDSTLQPQIMKINSRLKAAKTEEERETVFSDLKKTPHLFHAWLRMRENQNLVPNRMQGYSQMSMGSSNLQNLQQQQLQQQQAGAMRGGGGFAPGQNNSQPRAPSGQFASMNPSMQQQYPQQQQGWPQQRQQNPGGMQQNANPYNQFQNRQNMMMMPQQQQPHPSNAGDRCSYLLFFVLNLRIDCPRFLYFPFFLNRSLLRCCSECAVI

SEQ ID NO: 18446 - protein, 2245 aa, Aplysia californica
MADHQLGPPANKKPRIGSPSLNTPSDNNEFNFGNLNFDGIVNELPDDLDGLQGTSGDGQTPQGSQDTSMGGSLSQLLSRSTPNSQTSLPLPVNSAGGIQTSRSPGMGAMMNMGMGKNPMSNNLAATLANKAATSSHMNMNDALVSSASFTISGTNAGPMGGVTNTMGMNPTMGNPQMIGSVGSLNMNQQMPNQMMNGPTSFPGNMGQMRAMQGNNVNPSTSMQVPQTGMMQSPGMPQMQGHQGMPGHPNMNMPQNPPQNIRPGQPTGSGTSGPRQAAGEPDKSKLIQQQLVLLLHAHKCQRREQNNIEQECKLPYCRTMKNVLNHMTTCNKGKSCEVAHCASSRQIITHWKNCLRQDCPVCFALKIADKRNTQGQSVNQTSTMTAPNAADPATMKRAFESLGLQYNQNTPAHNAAQHGHPQMNAMQNDAGQINKTNMPNQQGPKVVPDQSSSPMSMLPVPPTGQLPQTIQPQSGTQLASATAQAAAMGNAPDIVKSIPVSSRKDWHAQVTQDLRNHLVHKLVQAIFPTPDQATLRDSRMKNLVAYARKVEGDMYESANNRGQYYHLLAEKIYKIQKELEEKRIQRMKVQNAPNAQVPGMQGQIHPNAQNGPNNVQGNAFFNEMNNLPMPNQQQIQPPQGQLKMKWSNMRATPPPVQMPGVATSSTMTMNAALADSQQQFDAIKRSMPQQPGGMNRLMMPSATATSTHQSPQQPLLHQQLNSQAQVVQSQASNQSAMSTPQQSNLQNHMNSTLPDVLGGVNNQRMTGTPTVGGSLDSVVATSGVHVATSQQSLIQLAGPAAATPVSQPHLPISRASQLNGQTPTQDLSNELSQVTDDLMKSESNNKDTALSESSQNLSSLLSAASPSTLSLTTMTPSVVTSSTTVSSMLNLPQKGDVKTESSTDVKVKQEVEVKEEKMDTGKSESEVKPEPDSIKAENETSSPKLDNLDESSQASIEEKPASVGDASNNSAASTPKPRCKKVFDKDELRQALMPTLEKLFKQDPESLPFRQPVDPVVLHIPDYFDIVKKPMDLSTIRRKLDSGLYSDPWEYVDDVCLMFDNAWLYNRKTSRVYKYASKLSEVFESEIDSVMQSLGYCCGHKYVFCPQVLCCYGKQLCTIPRDSMYYSYQNRYVYCEKCFNEIQTDEVELSEDPTQPMTKIRKDQFDRVKNDQLDYEPFIDCQECGRRWHQICALWFESIWREGWSCDSCLKAKGVKRKENKFTSKKLPTTKLGTYLENRVNNFLRKKDSGAGEVTIRVLSSYDKMTEVKPLMKKRFGNDMEDSYPYRAKAMFAFEEIDGVDVCFFGMHVQEYGSSCPGPNTRRVYISYLDSVHFFKPRHLRTAVYHEILIGYLEYAKTLGYTTAHIWACPPSEGDDYIFHCHPPEQKIPKPKRLQEWYKKMLDKAIIDRVVVDYKDIFKDAIDSGISSAKDLAYFEGDFWPNVIEESIKELDQEEEEKRRREEAEAAAAEAEAQDTVEETTDAVCSDVAGTKKGEKKGQRNKKANKSKGSARKNNRKTNLPQGTNDLTAKLYNHMEKHKEVFFVIRLHNQQIAASLPPITEPDPAMSCELMDGRDAFLTTAREKHYEFSSLRRAKLSSMALLYELHNQGKDAFVYTCNSCKAAVETRYHCSTCDDFDLCVPCYNKEGHHHKMTKLGLGLDDIASSDKEENPQESRRKSIQRCISSLVHACQCRNANCRMNACHKMKRVVGHTMSCRRKTNNGCPICKQLIALCCYHAKHCVENKCQVPFCAQLKQKLKQKQLLTTLHQAQMLRRRVAIMTGTTNTSTNNGPSSATPSSQDSPPQSTASQPSFTSGSVGKAPGAPPPRGALIAAQEAQVQAEAQRQGAGVPAINSIGKGAMQPPIRPAAPAIVPSTGKPMRPQQAWPPSYPQAPSQQPRPNMARDVRMQGMQPHPQQQPQQQQPVPTMGPSTGNATAGPAAAGGAGATPIGPAVHTMLRAFKNQHLSQSEWLDLLRKNPQLMAQVLKLKNEKARMQQAQQQQQQQQQQQHPQAQQQQMHGMPNMGQPMPQQAGGQMQHQQQMRNQMNQMMQHQYRQQHIQQQPQQQTSQLNQFAQPQQPFVQRPRMNFPQQTFQNDTGHNMHQFPQQHMMQHRQPMSPQFMLAQQANPSSQQMLNQVRSPPASAAGLPQTVRSPQPTPSPRQQPIPSPRQLQQSPHHNIVNNQSPLHGMGVGQDTSQLSNDHVMLSSFQTHTTMTQLQNSDVSMGQQDNEVAPLTPQDKLANFVNQI

SEQ ID NO: 18447 - protein, 3276 aa, Drosophila melanogaster
MMADHLDEPPQKRVKMDPTDISYFLEENLPDELVSSNSGWSDQLTGGAGGGNGGGGASGVTTNPTSGPNPGGGPNKPAAQGPGSGTGGVGVGVNVGVGGVVGVGVVPSQMNGAGGGNGSGTGGDDGSGNGSGAGNRISQMQHQQLQHLLQQQQQGQKGAMVVPGMQQLGSKSPNLQSPNQGGMQQVVGTQMGMVNSMPMSISNNGNNGMNAIPGMNTIAQGNLGNMVLTNSVGGGMGGMVNHLKQQPGGGGGGMINSVSVPGGPGAGAGGVGAGGGGAVAANQGMHMQNGPMMGRMVGQQHMLRGPHLMGASGGAGGPGNGPGGGGPRMQNPNMQMTQLNSLPYGVGQYGGPGGGNNPQQQQQQQQQQLLAQQMAQRGGVVPGMPQGNRPVGTVVPMSTLGGDGSGPAGQLVSGNPQQQQMLAQQQTGAMGPRPPQPNQLLGHPGQQQQQQQQPGTSQQQQQQQGVGIGGAGVVANAGTVAGVPAVAGGGAGGAVQSSGPGGANRDVPDDRKRQIQQQLMLLLHAHKCNRRENLNPNREVCNVNYCKAMKSVLAHMGTCKQSKDCTMQHCASSRQILLHYKTCQNSGCVICYPFRQNHSVFQNANVPPGGGPAGIGGAPPGGGGAGGGAAGAGGNLQQQQQQQQQQQQNQQPNLTGLVVDGKQGQQVAPGGGQNTAIVLPQQQGAGGAPGAPKTPADMVQQLTQQQQQQQQQVHQQQVQQQELRRFDGMSQQVVAGGMQQQQQQGLPPVIRIQGAQPAVRVLGPGGPGGPSGPNVLPNDVNSLHQQQQQMLQQQQQQGQNRRRGGLATMVEQQQQHQQQQQQPNPAQLGGNIPAPLSVNVGGFGNTNFGGAAAGGAVGANDKQQLKVAQVHPQSHGVGAGGASAGAGASGGQVAAGSSVLMPADTTGSGNAGNPNQNAGGVAGGAGGGNGGNTGPPGDNEKDWRESVTADLRNHLVHKLVQAIFPTSDPTTMQDKRMHNLVSYAEKVEKDMYEMAKSRSEYYHLLAEKIYKIQKELEEKRLKRKEQHQQMLMQQQGVANPVAGGAAGGAGSAAGVAGGVVLPQQQQQQQQQQQQQGQQPLQSCIHPSISPMGGVMPPQQLRPQGPPGILGQQTAAGLGVGVGVTNNMVTMRSHSPGGNMLALQQQQRMQFPQQQQQQPPGSGAGKMLVGPPGPSPGGMVVNPALSPYQTTNVLTSPVPGQQQQQQFINANGGTGANPQLSEIMKQRHIHQQQQQQQQQQQQGMLLPQSPFSNSTPLQQQQQQQQQQQQQQQATSNSFSSPMQQQQQGQQQQQQKPGSVLNNMPPTPTSLEALNAGAGAPGTGGSASNVTVSAPSPSPGFLSNGPSIGTPSNNNNNSSANNNPPSVSSLMQQPLSNRPGTPPYIPASPVPATSASGLAASSTPASAAATCASSGSGSNSSSGATAAGASSTSSSSSAGSGTPLSSVSTPTSATMATSSGGGGGGGGNAGGGSSTTPASNPLLLMSGGTAGGGTGATTTTSTSSSSRMMSSSSSLSSQMAALEAAARDNDDETPSPSGENTNGSGGSGNAGGMASKGKLDSIKQDDDIKKEFMDDSCGGNNDSSQMDCSTGGGKGKNVNNDGTSMIKMEIKTEDGLDGEVKIKTEAMDVDEAGGSTAGEHHGEGGGGSGVGGGKDNINGAHDGGATGGAVDIKPKTETKPLVPEPLAPNAGDKKKKCQFNPEELRTALLPTLEKLYRQEPESVPFRYPVDPQALGIPDYFEIVKKPMDLGTIRTNIQNGKYSDPWEYVDDVWLMFDNAWLYNRKTSRVYRYCTKLSEVFEAEIDPVMQALGYCCGRKYTFNPQVLCCYGKQLCTIPRDAKYYSYQNSLKEYGVASNRYTYCQKCFNDIQGDTVTLGDDPLQSQTQIKKDQFKEMKNDHLELEPFVNCQECGRKQHQICVLWLDSIWPGGFVCDNCLKKKNSKRKENKFNAKRLPTTKLGVYIETRVNNFLKKKEAGAGEVHIRVVSSSDKCVEVKPGMRRRFVEQGEMMNEFPYRAKALFAFEEVDGIDVCFFGMHVQEYGSECPAPNTRRVYIAYLDSVHFFRPRQYRTAVYHEILLGYMDYVKQLGYTMAHIWACPPSEGDDYIFHCHPTDQKIPKPKRLQEWYKKMLDKGMIERIIQDYKDILKQAMEDKLGSAAELPYFEGDFWPNVLEESIKELDQEEEEKRKQAEAAEAAAAANLFSIEENEVSGDGKKKGQKKAKKSNKSKAAQRKNSKKSNEHQSGNDLSTKIYATMEKHKEVFFVIRLHSAQSAASLAPIQDPDPLLTCDLMDGRDAFLTLARDKHFEFSSLRRAQFSTLSMLYELHNQGQDKFVYTCNHCKTAVETRYHCTVCDDFDLCIVCKEKVGHQHKMEKLGFDIDDGSALADHKQANPQEARKQSIQRCIQSLAHACQCRDANCRLPSCQKMKLVVQHTKNCKRKPNGGCPICKQLIALCCYHAKNCEEQKCPVPFCPNIKHKLKQQQSQQKFQQQQLLRRRVALMSRTAAPAALQGPAAVSGPTVVSGGVPVVGMSGVAVSQQVIPGQAGILPPGAGGMSPSTVAVPSPVSGGAGAGGMGGMTSPHPHQPGIGMKPGGGHSPSPNVLQVVKQVQEEAARQQVSHGGGFGKGVPMAPPVMNRPMGGAGPNQNVVNQLGGMGVGVGGVGGVGVGGVGGVGVNQLNSGGGNTPGAPISGPGMNVNHLMSMDQWGGGGAGGGGANPGGGNPQARYANNTGGMRQPTHVMQTNLIPPQQQQQMMGGLGGPNQLGGGQMPVGGQHGGMGMGMGAPPMAGTVGGVRPSPGAGGGGGSATGGGLNTQQLALIMQKIKNNPTNESNQHILAILKQNPQIMAAIIKQRQQSQNNAAAGGGAPGPGGALQQQQAGNGPQNPQQQQQQQQQQQVMQQQQMQHMMNQQQGGGGPQQMNPNQQQQQQQVNLMQQQQQGGPGGPGSGLPTRMPNMPNALGMLQSLPPNMSPGVSTQGGMVPNQNWNKMRYMQMSQYPPPYPQRQRGPHMGGAGPGPGQQQFPGGGGGAGNFNAGGAGGAGGVVGVGGVPGGAGTVPGGDQYSMANAAAASNMLQQQQGQVGVGVGVGVKPGPGQQQQQMGVGMPPGMQQQQQQQQPLQQQQMMQVAMPNANAQNPSAVVGGPNAQVMGPPTPHSLQQQLMQSARSSPPIRSPQPTPSPRSAPSPRAAPSASPRAQPSPHHVMSSHSPAPQGPPHDGMHNHGMHHQSPLPGVPQDVGVGVGVGVGVGVNVNVGNVGVGNAGGALPDASDQLTKFVERL

SEQ ID NO: 18448 - protein, 3190 aa, Drosophila melanogaster
MMADHLDEPPQKRVKMDPTDISYFLEENLPDELVSSNSGWSDQLTGGAGGGNGGGGASGVTTNPTSGPNPGGGPNKPAAQGPGSGTGGVGVGVNVGVGGVVGVGVVPSQMNGAGGGNGSGTGGDDGSGNGSGAGNRISQMQHQQLQHLLQQQQQGQKGAMVVPGMQQLGSKSPNLQSPNQGGMQQVVGTQMGMVNSMPMSISNNGNNGMNAIPGMNTIAQGNLGNMVLTNSVGGGMGGMVNHLKQQPGGGGGGMINSVSVPGGPGAGAGGVGAGGGGAVAANQGMHMQNGPMMGRMVGQQHMLRGPHLMGASGGAGGPGNGPGGGGPRMQNPNMQMTQLNSLPYGVGQYGGPGGGNNPQQQQQQQQQQLLAQQMAQRGGVVPGMPRGNRPVGTVVPMSTLGGDGSGPAGQLVSGNPQQQQMLAQQQTGAMGPRPPQPNQLLGHPGQQQQQQQQPGTSQQQQQQQGVGIGGAGVVANAGTVAGVPAVAGGGAGGAVQSSGPGGANRDVPDDRKRQIQQQLMLLLHAHKCNRRENLNPNREVCNVNYCKAMKSVLAHMGTCKQSKDCTMQHCASSRQILLHYKTCQNSGCVICYPFRQNHSVFQNANVPPGGGPAGIGGAPPGGGGAGGGAAGAGGNLQQQQQQQQQQQQNQQPNLTGLVVGGKQGQQVAPGGGQNTAIVLPQQQGAGGAPGAPKTPADMVQQLTQQQQQQQQQVHQQQVQQQELRRFDGMSQQVVAGGMQQQQQQGLPPVIRIQGAQPAVRVLGPGGPGGPSGPNVLPNDVNSLHQQQQQMLQQQQQQGQNRRRGGLATMVEQQQQHQQQQQQPNPAQLGGNIPAPLSVNVGGFGNTNFGGAAAGGAVGANDKQQLKVAQVHPQSHGVGAGGASAGAGASGGQVAAGSSVLMPADTTGSGNAGNPNQNAGGVAGGAGGGNGGNTGPPGDNEKDWRESVTADLRNHLVHKLVQAIFPTSDPTTMQDKRMHNLVSYAEKVEKDMYEMAKSRSEYYHLLAEKIYKIQKELEEKRLKRKEQHQQMLMQQQGVANPVAGGAAGGAGSAAGVAGGVVLPQQQQQQQQQQQQQGQQPLQSCIHPSISPMGGVMPPQQLRPQGPPGILGQQTAAGLGVGVGVTNNMVTMRSHSPGGNMLALQQQQRMQFPQQQQQQPPGSGAGKMLVGPPGPSPGGMVVNPALSPYQTTNVLTSPVPGQQQQQQFINANGGTGANPQLSEIMKQRHIHQQQQQQQQQQQQQGMLLPQSPFSNSTPLQQQQQQQQQQQQQQATSNSFSSPMQQQQQGQQQQQQKPGSVLNNMPPTPTSLEALNAGAGAPGTGGSASNVTVSAPSPSPGFLSNGPSIGTPSNNNNSSSANNNPPSVSSLMQQPLSNRPGTPPYIPASPVPATSASGLAASSTPASAAATCASSGSGSNSSSGATAAGASSTSSSSSAGSGTPLSSVSTPTSATMATSSGGGGGGGGNAGGGSSTTPASNPLLLMSGGTAGGGTGATTTTSTSSSSRMMSSSSSLSSQMAALEAAARDNDDETPSPSGENTNGSGGSGNAGGMASKGKLDSIKQDDDIKKEFMDDSCGGNNDSSQMDCSTGGGKGKNVNNDGTSMIKMEIKTEDGLDGEVKIKTEAMDVDEAGGSTAGEHHGEGGGGSGVGGGKDNINGAHDGGATGGAVDIKPKTETKPLVPEPLAPNAGDKKKKCQFNPEELRTALLPTLEKLYRQEPESVPFRYPVDPQALGIPDYFEIVKKPMDLGTIRTNIQNGKYSDPWEYVDDVWLMFDNAWLYNPKTSRVYRYCTKLSEVFEAEIDPVMQALGYCCGRKYTFNPQVLCCYGKQLCTIPRDAKYYSYQNSLKEYGVASNRYTYCQKCFNDIQGDTVTLGDDPLQSQTQIKKDQFKEMKNDHLELEPFVNCQECGRKQHQICVLWLDSIWPGGFVCDNCLKKKNSKRKENKFNAKRLPTTKLGVYIETRVNNFLKKKEAGAGEVHIRVVSSSDKCVEVKPGMRRRFVEQGEMMNEFPYRAKALFAFEEVDGIDVCFFGMHVQEYGSECPAPNTRRVYIAYLDSVHFFRPRQYRTAVYHEILLGYMDYVKQLGYTMAHIWACPPSEGDDYIFHCHPTDQKIPKPKRLQEWYKKMLDKGMIERIIQDYKDILKQAMEDKLGSAAELPYFEGDFWPNVLEESIKELDQEEEEKRKQAEAAEAAAAANLFSIEENEVSGDGKKKGQKKAKKSNKSKAAQRKNSKKSNEHQSGNDLSTKIYATMEKHKEVFFVIRLHSAQSAASLAPIQDPDPLLTCDLMDGRDAFLTLARDKHFEFSSLRRAQFSTLSMLYELHNQGQDKFVYTCNHCKTAVETRYHCTVCDDFDLCIVCKEKVGHQHKMEKLGFDIDDGSALADHKQANPQEARKQSIQRCIQSLAHACQCRDANCRLPSCQKMKLVVQHTKNCKRKPNGGCPICKQLIALCCYHAKNCEEQKCPVPFCPNIKHKLKQQQSQQKFQQQQLLRRRVALMSRTAAPAALQGPAAVSGPTVVSGGVPVVGMSGVAVSQQVIPGQAGILPPGAGGMSPSTVAVPSPVSGGAGAGGMGGMTSPHPHQPGIGMKPGGGHSPSPNVLQVVKQVQEEAARQQVSHGGGFGKGVPMAPPVMNRPMGGAGPNQNVVNQLGGMGVGVGGVGGVGVGGVGGVGVNQLNSGGGNTPGAPISGPGMNVNHLMSMDQWGGGGAGGGGANPGGGNPQARYANNTGGMRQPTHVMQTNLIPPQQQQQMMGGLGGPNQLGGGQMPVGGQHGGMGMGMGAPPMAGTVGGVRPSPGAGGGGGSATGGGLNTQQLALIMQKIKNNPTNESNQHILAILKQNPQIMAAIIKQRQQSQNNAAAGGGAPGPGGALQQQQAGNGPQNPQQQQQQQQQQQVMQQQQMQHMMNQQQGGGGPQQMNPNQQQQQQQVNLMQQQQQGGPGGPGSGLPTRMPNMPNALGMLQSLPPNMSPGVSTQGGMVPNQNWNKMRYMQMSQYPPPYPQRQRGPHMGGAGPGPGQQQFPGGGGGAGNFNAGGAGGAGGVVGVGGVPGGAGTVPGGDQYSMANAAAASNMLQQQQGQVGVGVGVGVKPGPGQQQQQMGVGMPPGMQQQQQQQQPLQQQQMMQVAMPNANAQNPSAVVGGPNAQVMVRRRRISAAAADAIGPLVAAYSLPAANAIATFGSIATCCSIRLA

SEQ ID NO: 18449 - protein, 2414 aa, Homo sapiens
MAENVVEPGPPSAKRPKLSSPALSASASDGTDFGSLFDLEHDLPDELINSTELGLTNGGDINQLQTSLGMVQDAASKHKQLSELLRSGSSPNLNMGVGGPGQVMASQAQQSSPGLGLINSMVKSPMTQAGLTSPNMGMGTSGPNQGPTQSTGMMNSPVNQPAMGMNTGTNAGMNPGMLAAGNGQGIMPNQVMNGSIGAGRGRQDMQYPNPGMGSAGNLLTEPLQQGSPQMGGQTGLRGPQPLKMGMMNNPNPYGSPYTQNPGQQIGASGLGLQIQTKTVLSNNLSPFAMDKKAVPGGGMPNMGQQPAPQVQQPGLVTPVAQGMGSGAHTADPEKRKLIQQQLVLLLHAHKCQRREQANGEVRQCNLPHCRTMKNVLNHMTHCQSGKSCQVAHCASSRQIISHWKNCTRHDCPVCLPLKNAGDKRNQQPILTGAPVGLGNPSSLGVGQQSAPNLSTVSQIDPSSIERAYAALGLPYQVNQMPTQPQVQAKNQQNQQPGQSPQGMRPMSNMSASPMGVNGGVGVQTPSLLSDSMLHSAINSQNPMMSENASVPSLGPMPTAAQPSTTGIRKQWHEDITQDLRNHLVHKLVQAIFPTPDPAALKDRRMENLVAYARKVEGDMYESANNRAEYYHLLAEKIYKIQKELEEKRRTRLQKQNMLPNAAGMVPVSMNPGPNMGQPQPGMTSNGPLPDPSMIRGSVPNQMMPRITPQSGLNQFGQMSMAQPPIVPRQTPPLQHHGQLAQPGALNPPMGYGPRMQQPSNQGQFLPQTQFPSQGMNVTNIPLAPSSGQAPVSQAQMSSSSCPVNSPIMPPGSQGSHIHCPQLPQPALHQNSPSPVPSRTPTPHHTPPSIGAQQPPATTIPAPVPTPPAMPPGPQSQALHPPPRQTPTPPTTQLPQQVQPSLPAAPSADQPQQQPRSQQSTAASVPTPNAPLLPPQPATPLSQPAVSIEGQVSNPPSTSSTEVNSQAIAEKQPSQEVKMEAKMEVDQPEPADTQPEDISESKVEDCKMESTETEERSTELKTEIKEEEDQPSTSATQSSPAPGQSKKKIFKPEELRQALMPTLEALYRQDPESLPFRQPVDPQLLGIPDYFDIVKSPMDLSTIKRKLDTGQYQEPWQYVDDIWLMFNNAWLYNRKTSRVYKYCSKLSEVFEQEIDPVMQSLGYCCGRKLEFSPQTLCCYGKQLCTIPRDATYYSYQNRYHFCEKCFNEIQGESVSLGDDPSQPQTTINKEQFSKRKNDTLDPELFVECTECGRKMHQICVLHHEIIWPAGFVCDGCLKKSARTRKENKFSAKRLPSTRLGTFLENRVNDFLRRQNHPESGEVTVRVVHASDKTVEVKPGMKARFVDSGEMAESFPYRTKALFAFEEIDGVDLCFFGMHVQEYGSDCPPPNQRRVYISYLDSVHFFRPKCLRTAVYHEILIGYLEYVKKLGYTTGHIWACPPSEGDDYIFHCHPPDQKIPKPKRLQEWYKKMLDKAVSERIVHDYKDIFKQATEDRLTSAKELPYFEGDFWPNVLEESIKELEQEEEERKREENTSNESTDVTKGDSKNAKKKNNKKTSKNKSSLSRGNKKKPGMPNVSNDLSQKLYATMEKHKEVFFVIRLIAGPAANSLPPIVDPDPLIPCDLMDGRDAFLTLARDKHLEFSSLRRAQWSTMCMLVELHTQSQDRFVYTCNECKHHVETRWHCTVCEDYDLCITCYNTKNHDHKMEKLGLGLDDESNNQQAAATQSPGDSRRLSIQRCIQSLVHACQCRNANCSLPSCQKMKRVVQHTKGCKRKTNGGCPICKQLIALCCYHAKHCQENKCPVPFCLNIKQKLRQQQLQHRLQQAQMLRRRMASMQRTGVVGQQQGLPSPTPATPTTPTGQQPTTPQTPQPTSQPQPTPPNSMPPYLPRTQAAGPVSQGKAAGQVTPPTPPQTAQPPLPGPPPTAVEMAMQIQRAAETQRQMAHVQIFQRPIQHQMPPMTPMAPMGMNPPPMTRGPSGHLEPGMGPTGMQQQPPWSQGGLPQPQQLQSGMPRPAMMSVAQHGQPLNMAPQPGLGQVGISPLKPGTVSQQALQNLLRTLRSPSSPLQQQQVLSILHANPQLLAAFIKQRAAKYANSNPQPIPGQPGMPQGQPGLQPPTMPGQQGVHSNPAMQNMNPMQAGVQRAGLPQQQPQQQLQPPMGGMSPQAQQMNMNHNTMPSQFRDILRRQQMMQQQQQQGAGPGIGPGMANHNQFQQPQGVGYPPQPQQRMQHHMQQMQQGNMGQIGQLPQALGAEAGASLQAYQQRLLQQQMGSPVQPNPMSPQQHMLPNQAQSPHLQGQQIPNSLSNQVRSPQPVPSPRPQSQPPHSSPSPRMQPQPSPHHVSPQTSSPHPGLVAAQANPMEQGHFASPDQNSMLSQLASNPGMANLHGASATDLGLSTDNSDLNSNLSQSTLDIH

SEQ ID NO: 18450 - protein, 2442 aa, Homo sapiens
MAENLLDGPPNPKRAKLSSPGFSANDSTDFGSLFDLENDLPDELIPNGGELGLLNSGNLVPDAASKHKQLSELLRGGSGSSINPGIGNVSASSPVQQGLGGQAQGQPNSANMASLSAMGKSPLSQGDSSAPSLPKQAASTSGPTPAASQALNPQAQKQVGLATSSPATSQTGPGICMNANFNQTHPGLLNSNSGHSLINQASQGQAQVMNGSLGAAGRGRGAGMPYPTPAMQGASSSVLAETLTQVSPQMTGHAGLNTAQAGGMAKMGITGNTSPFGQPFSQAGGQPMGATGVNPQLASKQSMVNSLPTFPTDIKNTSVTNVPNMSQMQTSVGIVPTQAIATGPTADPEKRKLIQQQLVLLLHAHKCQRREQANGEVRACSLPHCRTMKNVLNHMTHCQAGKACQVAHCASSRQIISHWKNCTRHDCPVCLPLKNASDKRNQQTILGSPASGIQNTIGSVGTGQQNATSLSNPNPIDPSSMQRAYAALGLPYMNQPQTQLQPQVPGQQPAQPQTHQQMRTLNPLGNNPMNIPAGGITTDQQPPNLISESALPTSLGATNPLMNDGSNSGNIGTLSTIPTAAPPSSTGVRKGWHEHVTQDLRSHLVHKLVQAIFPTPDPAALKDRRMENLVAYAKKVEGDMYESANSRDEYYHLLAEKIYKIQKELEEKRRSRLHKQGILGNQPALPAPGAQPPVIPQAQPVRPPNGPLSLPVNRMQVSQGMNSFNPMSLGNVQLPQAPMGPRAASPMNHSVQMNSMGSVPGMAISPSRMPQPPNMMGAHTNNMMAQAPAQSQFLPQNQFPSSSGAMSVGMGQPPAQTGVSQGQVPGAALPNPLNMLGPQASQLPCPPVTQSPLHPTPPPASTAAGMPSLQHTTPPGMTPPQPAAPTQPSTPVSSSGQTPTPTPGSVPSATQTQSTPTVQAAAQAQVTPQPQTPVQPPSVATPQSSQQQPTPVHAQPPGTPLSQAAASIDNRVPTPSSVASAETNSQQPGPDVPVLEMKTETQAEDTEPDPGESKGEPRSEMMEEDLQGASQVKEETDIAEQKSEPMEVDEKKPEVKVEVKEEEESSSNGTASQSTSPSQPRKKIFKPEELRQALMPTLEALYRQDPESLPFRQPVDPQLLGIPDYFDIVKNPMDLSTIKRKLDTGQYQEPWQYVDDVWLMFNNAWLYNRKTSRVYKFCSKLAEVFEQEIDPVMQSLGYCCGRKYEFSPQTLCCYGKQLCTIPRDAAYYSYQNRYHFCEKCFTEIQGENVTLGDDPSQPQTTISKDQFEKKKNDTLDPEPFVDCKECGRKMHQICVLHYDIIWPSGFVCDNCLKKTGRPRKENKFSAKRLQTTRLGNHLEDRVNKFLRRQNHPEAGEVFVRVVASSDKTVEVKPGMKSRFVDSGEMSESFPYRTKALFAFEEIDGVDVCFFGMHVQEYGSDCPPPNTRRVYISYLDSIHFFRPRCLRTAVYHEILIGYLEYVKKLGYVTGHIWACPPSEGDDYIFHCHPPDQKIPKPKRLQEWYKKMLDKAFAERIIHDYKDIFKQATEDRLTSAKELPYFEGDFWPNVLEESIKELEQEEEERKKEESTAASETTEGSQGDSKNAKKKNNKKTNKNKSSISRANKKKPSMPNVSNDLSQKLYATMEKHKEVFFVIHLHAGPVINTLPPIVDPDPLLSCDLMDGRDAFLTLARDKHWEFSSLRRSKWSTLCMLVELHTQGQDRFVYTCNECKHHVETRWHCTVCEDYDLCINCYNTKSHAHKMVKWGLGLDDEGSSQGEPQSKSPQESRRLSIQRCIQSLVHACQCRNANCSLPSCQKMKRVVQHTKGCKRKTNGGCPVCKQLIALCCYHAKHCQENKCPVPFCLNIKHKLRQQQIQHRLQQAQLMRRRMATMNTRNVPQQSLPSPTSAPPGTPTQQPSTPQTPQPPAQPQPSPVSMSPAGFPSVARTQPPTTVSTGKPTSQVPAPPPPAQPPPAAVEAARQIEREAQQQQHLYRVNINNSMPPGRTGMGTPGSQMAPVSLNVPRPNQVSGPVMPSMPPGQWQQAPLPQQQPMPGLPRPVISMQAQAAVAGPRMPSVQPPRSISPSALQDLLRTLKSPSSPQQQQQVLNILKSNPQLMAAFIKQRTAKYVANQPGMQPQPGLQSQPGMQPQPGMHQQPSLQNLNAMQAGVPRPGVPPQQQAMGGLNPQGQALNIMNPGHNPNMASMNPQYREMLRRQLLQQQQQQQQQQQQQQQQQQGSAGMAGGMAGHGQFQQPQGPGGYPPAMQQQQRMQQHLPLQGSSMGQMAAQMGQLGQMGQPGLGADSTPNIQQALQQRILQQQQMKQQIGSPGQPNPMSPQQHMLSGQPQASHLPGQQIATSLSNQVRSPAPVQSPRPQSQPPHSSPSPRIQPQPSPHHVSPQTGSPHPGLAVTMASSIDQGHLGNPEQSAMLPQLNTPSRSALSSELSLVGDTTGDTLEKFVEGL

SEQ ID NO: 18451 - protein, 2442 aa, Homo sapiens
MAENLLDGPPNPKRAKLSSPGFSANDSTDFGSLFDLENDLPDELIPNGGELGLLNSGNLVPDAASKHKQLSELLRGGSGSSINPGIGNVSASSPVQQGLGGQAQGQPNSANMASLSAMGKSPLSQGDSSAPSLPKQAASTSGPTPAASQALNPQAQKQVGLATSSPATSQTGPGICMNANFNQTHPGLLNSNSGHSLINQASQGQAQVMNGSLGAAGRGRGAGMPYPTPAMQGASSSVLAETLTQVSPQMTGHAGLNTAQAGGMAKMGITGNTSPFGQPFSQAGGQPMGATGVNPQLASKQSMVNSLPTFPTDIKNTSVTNVPNMSQMQTSVGIVPTQAIATGPTADPEKRKLIQQQLVLLLHAHKCQRREQANGEVRACSLPHCRTMKNVLNHMTHCQAGKACQVAHCASSRQIISHWKNCTRHDCPVCLPLKNASDKRNQQTILGSPASGIQNTIGSVGTGQQNATSLSNPNPIDPSSMQRAYAALGLPYMNQPQTQLQPQVPGQQPAQPQTHQQMRTLNPLGNNPMNIPAGGITTDQQPPNLISESALPTSLGATNPLMNDGSNSGNIGTLSTIPTAAPPSSTGVRKGWHEHVTQDLRSHLVHKLVQAIFPTPDPAALKDRRMENLVAYAKKVEGDMYESANSRDEYYHLLAEKIYKIQKELEEKRRSRLHKQGILGNQPALPAPGAQPPVIPQAQPVRPPNGPLSLPVNRMQVSQGMNSFNPMSLGNVQLPQAPMGPRAASPMNHSVQMNSMGSVPGMAISPSRMPQPPNMMGAHTNNMMAQAPAQSQFLPQNQFPSSSGAMSVGMGQPPAQTGVSQGQVPGAALPNPLNMLGPQASQLPCPPVTQSPLHPTPPPASTAAGMPSLQHTTPPGMTPPQPAAPTQPSTPVSSSGQTPTPTPGSVPSATQTQSTPTVQAAAQAQVTPQPQTPVQPPSVATPQSSQQQPTPVHAQPPGTPLSQAAASIDNRVPTPSSVASAETNSQQPGPDVPVLEMKTETQAEDTEPDPGESKGEPRSEMMEEDLQGASQVKEETDIAEQKSEPMEVDEKKPEVKVEVKEEEESSSNGTASQSTSPSQPRKKIFKPEELRQALMPTLEALYRQDPESLPFRQPVDPQLLGIPDYFDIVKNPMDLSTIKRKLDTGQYQEPWQYVDDVWLMFNNAWLYNRKTSRVYKFCSKLAEVFEQEIDPVMQSLGYCCGRKYEFSPQTLCCYGKQLCTIPRDAAYYSYQNRYHFCEKCFTEIQGENVTLGDDPSQPQTTISKDQFEKKKNDTLDPEPFVDCKECGRKMHQICVLHYDIIWPSGFVCDNCLKKTGRPRKENKFSAKRLQTTRLGNHLEDRVNKFLRRQNHPEAGEVFVRVVASSDKTVEVKPGMKSRFVDSGEMSESFPYRTKALFAFEEIDGVDVCFFGMHVQEYGSDCPPPNTRRVYISYLDSIHFFRPRCLRTAVYHEILIGYLEYVKKLGYVTGHIWACPPSEGDDYIFHCHPPDQKIPKPKRLQEWYKKMLDKAFAERIIHDYKDIFKQATEDRLTSAKELPYFEGDFWPNVLEESIKELEQEEEERKKEESTAASETTEGSQGDSKNAKKKNNKKTNKNKSSISRANKKKPSMPNVSNDLSQKLYATMEKHKEVFFVIHLHAGPVINTLPPIVDPDPLLSCDLMDGRDAFLTLARDKHWEFSSLRRSKWSTLCMLVELHTQGQDRFVYTCNECKHHVETRWHCTVCEDYDLCINCYNTKSHAHKMVKWGLGLDDEGSSQGEPQSKSPQESRRVSIQRCIQSLVHACQCRNANCSLPSCQKMKRVVQHTKGCKRKTNGGCPVCKQLIALCCYHAKHCQENKCPVPFCLNIKHKLRQQQIQHRLQQAQLMRRRMATMNTRNVPQQSLPSPTSAPPGTPTQQPSTPQTPQPPAQPQPSPVSMSPAGFPSVARTQPPTTVSTGKPTSQVPAPPPPAQPPPAAVEAARQIEREAQQQQHLYRVNINNSMPPGRTGMGTPGSQMAPVSLNVPRPNQVSGPVMPSMPPGQWQQAPLPQQQPMPGLPRPVISMQAQAAVAGPRMPSVQPPRSISPSALQDLLRTLKSPSSPQQQQQVLNILKSNPQLMAAFIKQRTAKYVANQPGMQPQPGLQSQPGMQPQPGMHQQPSLQNLNAMQAGVPRPGVPPQQQAMGGLNPQGQALNIMNPGHNPNMASMNPQYREMLRRQLLQQQQQQQQQQQQQQQQQQGSAGMAGGMAGHGQFQQPQGPGGYPPAMQQQQRMQQHLPLQGSSMGQMAAQMGQLGQMGQPGLGADSTPNIQQALQQRILQQQQMKQQIGSPGQPNPMSPQQHMLSGQPQASHLPGQQIATSLSNQVRSPAPVQSPRPQSQPPHSSPSPRIQPQPSPHHVSPQTGSPHPGLAVTMASSIDQGHLGNPEQSAMLPQLNTPSRSALSSELSLVGDTTGDTLEKFVEGL

SEQ ID NO: 18452 - protein, 2440 aa, Homo sapiens
MAENLLDGPPNPKRAKLSSPGFSANSNTDFGSLFDLENDLPDELIPNGGELGLLNSGNLVPDAASKHKQLSELLRGGSGSSINPGIGNVSASSPVQQGLGGQAQGQPNSANMASLSAMGKSPLSQGDSSSPSLPKQAASTSGPTPAASQALNPQAQKQVGLATSSPATSQTGPGICMNANFNQTHPGLLNSNSGHSLINQASQGQAQVMNGSLGAAGRGRGAGMPYTAPAMQGASSSVLAETLTQVSPQTAGHAGLNTAQAGGMAKIGMNGTTSPFGQPFSQAGGQPMGATGVNPQLASKQSMVNSLPTFPTDIKNTSVTNVPNMSQMQTSVGIVPTQAIATGPTADPEKRKLIQQQLVLLLHAHKCQRREQANGEVRACSLPHCRTMKNVLNHMTHCQAGKACQVAHCASSRQIISHWKNCTRHDCPVCLPLKNASDKRNQQTILGSPASGIQNTIGSVGTGQQNATSLSNPNPIDPSSMQRAYAALGLPYMNQPQTQLQPQVPGQQPAQPQTHQQMRTLNPLGNNPMNIPAGGITTDQQPPNLISESALPTSLGATNPLMNDGSNSGNIGTLSTIPTAAPPSSTGVRKGWHEHVTQDLRSHLVHKLVQAIFPTPDPAALKDRRMENLVAYAKKVEGDMYESANSRDEYYHLLAEKIYKIQKELEEKRRSRLHKQGILGNQPALPAPGAQPPVIPQAQSVRPPNGPLSLPVNRMQVSQGMNSFNPMSLGNVQLPQAPMGPRAASPMNHSVQMNSMGSVPGMAISPSRMPQPPNMMGAHTNNMMAQAPAQSQFLPQNQFPSSSGAMSVGMGQPPAQTGVSQGQVPGAALPNPLNMLGPQASQLPCPPVTQSPLHPTPPPASTAAGMPSLQHTTPPGMTPPQPAAPTQPSTPVSSSGQTPTPTPGSVPSATQTQSTPTVQAAAQAQVTPQPQTPVQPPSVATPQSSQQQPTPVHAQPPGTPLSQAAASIDNRVPTPSTVASAETNSQQPGPDVPVLEMKTETQAEDTEPDPGESKGEPRSEMMEEDLQGASQVKEETDIAEQKSEPMEVEDKKPEVKVEVKEEEESSSNGTASQSTSPSQPRKKIFKPEELRQALMPTLEALYRQDPESLPFRQPVDPQLLGIPDYFDIVKNPMDLSTIKRKLDTGQYQEPWQYVDDVWLMFNNAWLYNRKTSRVYKFCSKLAEVFEQEIDPVMQSLGYCCGRKYEFSPQTLCCYGKQLCTIPRDAAYYSYQNRYHFCEKCFTEIQGENVTLGDDPSQPQTTISKDQFEKKKNDTLDPEPFVDCKECGRKMHQICVLHYDIIWPSGFVCDNCLKKTGRPRKENKFSAKRLQTTRLGNHLEDRVNKFLRRQNHPEAGEVFVRVVASSDKTVEVKPGMKSRFVDSGEMSESFPYRTKALFAFEEIDGVDVCFFGMHVQDTALIAPHQIQGCVYISYLDSIHFFRPRCLRTAVYHEILIGYLEYVKKLVYVTAHIWACPPSEGDDYIFHCHPPDQKIPKPKRLQEWYKKMLDKAFAERIINDYKDIFKQANEDRLTSAKELPYFEGDFWPNVLEESIKELEQEEEERKKEESTAASETPEGSQGDSKNAKKKNNKKTNKNKSSISRANKKKPSMPNVSNDLSQKLYATMEKHKEVFFVIHLHAGPVISTQPPIVDPDPLLSCDLMDGRDAFLTLARDKHWEFSSLRRSKWSTLCMLVELHTQGQDRFVYTCNECKHHVETRWHCTVCEDYDLCINCYNTKSHTHKMVKWGLGLDDEGSSQGEPQSKSPQESRRLSIQRCIQSLVHACQCRNANCSLPSCQKMKRVVQHTKGCKRKTNGGCPVCKQLIALCCYHAKHCQENKCPVPFCLNIKHNVRQQQIQHCLQQAQLMRRRMATMNTRNVPQQSLPSPTSAPPGTPTQQPSTPQTPQPPAQPQPSPVNMSPAGFPNVARTQPPTIVSAGKPTNQVPAPPPPAQPPPAAVEAARQIEREAQQQQHLYRANINNGMPPGRDGMGTPGSQMTPVGLNVPRPNQVSGPVMSSMPPGQWQQAPIPQQQPMPGMPRPVMSMQAQAAVAGPRMPNVQPNRSISPSALQDLLRTLKSPSSPQQQQQVLNILKSNPQLMAAFIKQRTAKYVANQPGMQPQPGLQSQPGMQPQPGMHQQPSLQNLNAMQAGVPRPGVPPPQPAMGGLNPQGQALNIMNPGHNPNMTNMNPQYREMVRRQLLQHQQQQQQQQQQQQQQQNSASLAGGMAGHSQFQQPQGPGGYAPAMQQQRMQQHLPIQGSSMGQMAAPMGQLGQMGQPGLGADSTPNIQQALQQRILQQQQMKQQIGSPGQPNPMSPQQHMLSGQPQASHLPGQQIATSLSNQVRSPAPVQSPRPQSQPPHSSPSPRIQPQPSPHHVSPQTGTPHPGLAVTMASSMDQGHLGNPEQSAMLPQLNTPNRSALSSELSLVGDTTGDTLEKFVEGL

SEQ ID NO: 18453 - protein, 923 aa, Homo sapiens
YVTGHIWACPPSEGDDYIFHCHPPDQKIPKPKRLQEWYKKMLDKAFAERIIHDYKDIFKQATEDRLTSAKELPYFEGDFWPNVLEESIKELEQEEEERKKEESTAASETTEVFFVIHLHAGPVINTLPPIVDPDPLLSCDLMDGRDAFLTLARDKHWEFSSLRRSKWSTLCMLVELHTQGQDRFVYTCNECKHHVETRWHCTVCEDYDLCINCYNTKSHAHKMVKWGLGLDDEGSSQGEPQSKSPQESRRLSIQRCIQSLVHACQCRNANCSLPSCQKMKRVVQHTKGCKRKTNGGCPVCKQLIALCCYHAKHCQENKCPVPFCLNIKHKLRQQQIQHRLQQAQLMRRRMATMNTRNVPQQSLPSPTSAPPGTPTQQPSTPQTPQPPAQPQPSPVSMSPAGFPSVARTQPPTTVSTGKPTSQVPAPPPPAQPPPAAVEAARQIEREAQQQQHLYRVNINNSMPPGRTGMGTPGSQMAPVSLNVPRPNQVSGPVMPSMPPGQWQQAPLPQQQPMPGLPRPVISMQAQAAVAGPRMPSVQPPRSISPSALQDLLRTLKSPSSPQQQQQVLNILKSNPQLMAAFIKQRTAKYVANQPGMQPQPGLQSQPGMQPQPGMHQQPSLQNLNAMQAGVPRPGVPPQQQAMGGLNPQGQALNIMNPGHNPNMASMNPQYREMLRRQLLQQQQQQQQQQQQQQQQQQGSAGMAGGMAGHGQFQQPQGPGGYPPAMQQQQRMQQHLPLQGSSMGQMAAQMGQLGQMGQPGLGADSTPNIQQALQQRILQQQQMKQQIGSPGQPNPMSPQQHMLSGQPQASHLPGQQIATSLSNQVRSPAPVQSPRPQSQPPHSSPSPRIQPQPSPHHVSPQTGSPHPGLAVTMASSIDQGHLGNPEQSAMLPQLNTPSRSALSSELSLVGDTTGDTLEKFVEGL

SEQ ID NO: 18454 - protein, 770 aa, Mus musculus
MDFSKFLADDFDVKDWINAAFRAGPKDGAAGKADGHAATLVMKLQLFIQEVNHAVEETSLQALQNMPKVLRDVEALKQEASFLKEQMILVKEDIKKFEQDTSQSMQVLVEIDQVKSRMQLAAESLQEADKWSTLSADIEETFKTQDIAVISAKLTGMQNSLMMLVDTPDYSEKCVHLEALKNRLEALASPQIVASFTSQSVDQSKVFVKVFTEIDRMPQLLAYYYKCHKVQLLATWQELCQSDLPLDRQLTGLYDALLGAWHTQTQWATQVFKNPHEVVTVLLIQTLGALVPSLPMCLSAGVERAGPELELTRLLEFYDTTAHFAKGLEMALLPHLQDHNLVKVVELVDAVYGPYKPFQLKYGDMEENNLLIQISAVPLEHGEVIDCVQELSHSVHKLFGLASAAVDRCAKFTNGLGTCGLLTALKSLFAKYVSHFTNALQSIRKKCKLDDIPPNSLFQEDWTAFQNSVRIIATCGELLRQCGDFEQQLANRILSTAGKYLSDSYSPRSLAGFQDSILTDKKSPAKNPWQEYNYLQKDNPAEYASLMEILYTLKEKGSSNHNLLSASRTALTRLNQQAHQLAFDSVFLRIKQQLLLVSRMDSWNTAGIGETLTDDLPAFSLTPLEYISNIGQYIMSLPLNLEPFVTQEDSALELALHAGKLPFPPEQGDELPELDNMADNWLGSIARATMQTYCDVILQIPEVTPHSTKQLATDIDYLINVMDALGLQPSRTLQNIAALLKAKPEEYRQVSKGLPRRLAATVATMRGVNY

SEQ ID NO: 18455 - protein, 780 aa, Anopheles gambiae str. PEST
IWLIGSGLLSRKSTNRLLNSIQLLQNNTASTKLRWVRFGTHTLAKMDVSAFSGDDFDVSSWINASYERSQKTATGSVGKEAFVSSLVSKMQLYVQQINVALEQTGGQVLKNIPKVISDANMLQIESGLLKQRMNQVQREIAHLQTETGDCMVSLERLDDIKQRLQSSKQCLQEADGWGKLAGELDDLLEKSDIDASSGKLLSLQKSLAAQVGLHGHSERENLVEYFKNRLEALVSPSVVVALRSMDTAACRRYVGIFEGIGRLAQLKQYYRTVLKTFVQEQWSSAIEGSESGGSDVLKEFYDHLVELLKSHLRWSCQCFGEATDCVLAVADALENLDPTRESVVRSALKRATDKFWTLTQFSKVNVSMGSLIEGWVRGGPQQDIRCDDETTIDRLANSLFVFFGIFLKEYPTLENSQLEASLQGLTIVGTAPADSVHNLESANAKIIRWALEAVTRCQDITQNCALLSLGSVLQNYLLTYLDQYNKVQKQLAASQPSQTDWNLLQLSVVLLQYLGSFRQAAYELEQTFLQQVLTKHSQLTAGSARARFEYRLNTKGEFNELHKLATTFQQPSSESGREYFSEFHQRMKRTCEDIHDTMLQIAFSPITKHFKQIEPAATGPTGAAGGTTAMDTLPDYSYAPQEYITLISQYLLTLPQHLEPLLLSPAAALKAVLEVADHRYASNRPCADVFLALVVEESEALYVEQIENICSLSVSGAKQLATDIEYFGSVLEEMGQSLGGNLQQTVKLLRAPLESYASAATGCDPELVAAIRQKRNLISC

SEQ ID NO: 18456 - protein, 836 aa, Arabidopsis thaliana
MMLDLGPFSDEKFDAKRWVNSSCQARHPQDSLEKHLVDLEMKLQIASEEIGASLEEQSGGALLRVPRATRDVLRLRDDAVSLRGSVAGILQKLKKAEGSSADCIAALARVDNVKQRMEAAYKTLQDAAGLTQLSSTVEDVFASGDLPRAAETLASMRNCLSAVGEVAEFANVRKQLEVLEDRLEAMVQPRLTDALTYHKVDVAQDLRVILIRIGRFKSLELQYSKVRLKPIKQLWEDFDTKQRANKLANERSESQRLSSGDEFQSTSSQTSFASWLTSFYDELLLYLEQEWKWCMVAFPDDYMTLVPKLLVETMGVLGASFVSRLNLATGDAVPETKALAKGVMDLLSGDLPKGINIQTKHLEALIELHNVTGSFARNIQHLFAESELRILIDTLKAVYSPFESFKQKYGKMERAILSSEIAVVDLRGAVTRGVGAQGIELSETVRRMEESIPQVVVLLEAAVERCIGFTGGSEADELILALDDIMLQYISMLQETLKSLRVVCGVDGTGDGVGSKKDASAEKRESSRKMDLTSNEEWSIVQGALQILTVADCLTSRSSVFEASLRATLARLNSSLSISLFGTNLDHNLSHLKSEQTAGDLSMAGRASMDVAAIRLVDVPEKAHKLLNLLEQSKDPRFHALPLASQRVAAFADTVNELVYDVLISKVRQRLGEVSRLPIWSSVEEQTAFPLPNFSSYPQSYVTSVGEYLLTLPQQLEPLAEGISTNGDSNNEDAQFFATEWMFKVAEGATALYMDQLRGIQYISDRGAQQLSVDIEYLSNVLSALSMPIPPVLATFQTCLATPRGELKDVMKSEAGNELDCPTANLVCKMRRISFD

SEQ ID NO: 18457 - protein, 576 aa, Glycine max
  unsure (1)..(576): unsure at all Xaa locations
DRLQSVSPAIPFSSWLPCFYDELLLYLEQEWKWCMIAFPDDYKTLVPRLLSETMMAIGSSFISRLNLAIGDAVPETKALAKGLLDILAGDMQKGIKLQTKHLEALIELHNMTGTFARNIQHLFSVSDVRVLMDVLKSVYLPYESFKQRYGQMERAILSAEIAGVDLRGAVIRGLGAQGVELSETVRRMEESIPQITILLEAAAERCINFTGGSEADELILALDDIMLQYISTLQETLKSLRTVCGVDYGSDGTVKKDMEKKDGNQNARRVDLISNEEEWSIVQGALQILTVADNLTSRSSVFEASLRATLARLSTTLSFSAFGSSLDXXHQTINSSVDGEPSYGGRAALDMAALRLVDVSEKARKLFNLLNQSRDPRFHALPLASQRVAAFTDTVNELVYDVLISKVRQRLSDVSRLPIWSSVEEQGAFPLPTFSAYPQSYVTSVGEYLLTLPQQLEPLAEGISNNXXVNDEAQFFATEWMFKVAEGATALYIEQLRGIQYISDRGAQQLSVDIEYLSNVLSALSMPIPPVLATFQSCLSTPRNQLKDLLKTDSGNQLDMPTANLVCKMRRVNLDS

SEQ ID NO: 18458 - protein, 301 aa, Glycine max
  unsure (1)..(301): unsure at all Xaa locations
MMLDLGPFSNENFDPKKWINSACQSRHPQDSLDKHLVDMEMKLQMVSEEIAASLEEQSAAALLRVPRATRDVIRLRDDAVSLRSAVSSILQKLKKAEGSSAESIAALAKVDVVKQRMEAAYETLQDAAGLTQLSATVEDVFASGDLPRAAETLANMRHCLSAVGEVAEFANIRKQLEVLEDRLDNMVQPRLMDALSNRKVDAAQDLRGILIRIGRFKSLESQYVKVHLKPIKQLXWEDFDSRERASKPANEKNEMDRTSSGGDXXXXSPAIPFSSWLPSFYDELLLYLEQEWKWYLLAYIX

SEQ ID NO: 18459 - protein, 129 aa, Glycine max
  unsure (1)..(129): unsure at all Xaa locations
MMLDLGSFSNENFDPKKWINSACQSRHPQDSLDKHLVDMEMKLQMVSEEIAASLEEQSSAALLXXPRATRDVIRLRDDAVSLRSAVSSILQKLKKAEGSSAESIAALAKVDVVKQRMEAAYETLQDAAX

SEQ ID NO: 18460 - protein, 65 aa, Glycine max
  unsure (1)..(65): unsure at all Xaa locations
MVQPRLTDALSNPLIVVIQVDAAQDLRGIIIRIGRFKSLESQYIKVHLKPIKQLWEDFDSRERAX

SEQ ID NO: 18461 - protein, 644 aa, Triticum aestivum
  unsure (1)..(644): unsure at all Xaa locations
XQEKADEMXQPRLLDXLSNRKIDAVQDLRGILTRIGRFKSLEVQYTKIHIKPLKKLWEDFDLKQRASRAEVEKRGGEITSVSFSSWLPSFYDETLLYLEQEWKWCLTAFPEEYRSLVPKVLVETMNELNSSFVSRVKVATGDAVPETRSVAKGVLDVISGDLPKSIKLQNKHLAALIELHNMTGTFARNIQHLFSESDLGVVLSTLKAIYSPYETFKMRYGQMERAVLSAAMAGIDIRGAISRGLGAQGIELSETVRRMEESIPQMIVLLEAAVERCISLTGGSEADELVLALDDVMLQYISNLQETLKSLHEVCGLDNTTHTDASKKDAGLEKKEAPRLVDVSEEEEWSIVQGALQVLTVADCLTSRTSVFEASLRATLARIGTNFSLSGFGSSMDKLSAGTADDNSGAXXLGGRAALDIATIRLVEVPGLLHPDANLPGLRLGGPPGLPAVPVVFSGPEVFHDGVDXLVYDVQLAGVGERPGQIVDVPVGAGVRAVAGLRLVAKGAGRQXHVASLREPLHTLAPQLGPLAEGVXXDREAGDDESKLFATEWRCRVAAGATAASMEQLRGVQWRTAGGAEQLGADTVQLSNVVAALSVPIPLPRSQFHAWGPGPRAEVRGRLSPAGXXPGGRRVSGIRRRRWG

SEQ ID NO: 18462 - protein, 290 aa, Triticum aestivum
  unsure (1)..(290): unsure at all Xaa locations
XQVLTVADCLTSRTSVFEASLRATLARIGTNFSLSGFGSSMDKLSAGTADDNSGAXXLGGRAALDIATIRLTNLPDKSKKLLTVLEQSKDPRFHALPVTSQRVAAFSDKVNELVYDVLISKVRQRLCEIARLPIWSSVEEQGGLPLPSFSAYPQAYVTSVGEYLLTLPQQLEPLAEGISGSEAGNDEAQFFATEWIFKVAEGATALFMEQLRGIHYITDRGAQQLAADIEYLNXVLSALSMPIPPFLSTFHACISTPRDQVRDLIKSDGGTQLDLPXAHLVXQIRRISLE

SEQ ID NO: 18463 - protein, 783 aa, Zea mays
TGSQLALAAALTSPGASLFSFKLALDRRKPPSSTSALRFPAAPLARRSRRASVLQSLPPAVAPSAESIAALARIDTVKQRMEAAYTTLQDAAGLAQLSQSVEDVFSSGNLPKAAETLATMRHCLSAVGEVAEFANVRKQLEVLEERLDEMVQPRLVDALSNRKVDAVQDLRGILIRINRFKSLEVQYTKIHVKPLKKLWDDFELKQRSSKVDMEKLSGESISGLSFSSWLPNFYDETLLYLEQEWKWCLTAFPDEYKSLVPKVLTETMSELNSSFVSRINIATGDVIPETRSIAKGILDVLSGDLPKSTKLQNKHLQALIELHNMTGTFARNIQYLFSESDLAVVLNTLKAIYSPYETFKARYGQMERAILSAEMTSIDIRGAVPRGVGAQGIELSETVRRMEESIPEMIVLLEAAVERCISLTGGSEADELVLALDDVMLQYISNLQETLKSLRIICGLDSDALKKDAGLEKKEVQRLVDVSEEEEWSIVQGALQILTVADCLTSRTSVFEASLRATLARIGTNFSVSGFGSSLDKSPAATADENADLSFAGRAALDIAAIRLSDLPDKSKKFLTVLEQSKDPRFHALPLTSQRVAAFSDTVNELVYDVLISKVRQRLSEVARLPIWSSVEEQGGLPLPSFSAYPQAYVTSVGEYLLTLPQQLEPLAEGISGNEAGNDEAQFFATEWIFKVAEGATALFMEQLRGIHYITDRGSQQLAADIEYLNNVLSALSMPIPPFLSTFHACVSTPRDQVRDLIKSDGASQLDLPTTHLVCKIRRITLD

SEQ ID NO: 18464 - protein, 613 aa, Zea mays
  unsure (1)..(613): unsure at all Xaa locations
WSLEPAGPAIYPAPLPPSPDXFPPPTTSAMIPEIQTPSCRQTWTNSRQSITGXXSFSSRLANSYEETLLYLEQDWKRGLTAFPDEYKSLVPKVLTETMSELNSSFVSRINIATGDVIPETRSIAKGILDVLSGDLPKSTKLQNKHLQALIELHNMTGTFARNIQYLFSESDLAVVLNTLKAIYSPYETFKARYGQMERAILSAEMTSIDIRGAVPRGVGAQGIELSETVRRMEESIPEMIVLLEAAVERCISLTGGSEADELVLALDDVMLQYISNLQETLKSLRIICGLDSDALKKDAGLEKKEVQRLVDVSEEEEWSIVQGALQILTVADCLTSRTSVFEASLRATLARIGTNFSVSGFGSSLDKSPAATADENADLSFAGRAALDIAAIRLSDLPDKSKKFLTVLEQSKDPRFHALPLTSQRVAAFSDTVNELVYDVLISKVRQRLSEVARLPIWSSVEEQGGLPLPSFSAYPQAYVTSVGEYLLTLPQQLEPLAEGISGNEAGNDEAQFFATEWIFKVAEGATALFMEQLRGIHYITDRGSQQLAADIEYLNNVLSALSMPIPPFLSTFHACVSTPRDQVRDLIKSDGASQLDLPTTHLVCKIRRITLD

SEQ ID NO: 18465 - protein, 275 aa, Zea mays
  unsure (1)..(275): unsure at all Xaa locations
MVVVDASEFGAEGFDPKRWINAALDARHPSEPLDRFLADAEERLRSAADDAAAALERDSGDALRRVPLACRDALRLRDDAVALRSHLASVLQSLSLAEGSSAESIAALARIDTVKQRMEAAYTTLQDAAGLAQLSQSVEDVFSSGNLPKAAETLATMRHCLSAVGEVAEFANVRKQLEVLEERLDEMVQPRLVDALSNRKVDAVQDLRGILIRINRFKSLEVQYTKIHVKPLKKLLXDDFXAKARSSKVDMEKLSGGSISGLSFSSWLPNFYDEX

SEQ ID NO: 18466 - protein, 84 aa, Zea mays
SKDPRFHALPLTSQRVAAFSDTVNELVYDVLISKVRQRLSEVARLPIWSSVEEQGGLPLPSFSAYPQAYVTSVGEYLLTLPQQG

SEQ ID NO: 18467 - protein, 97 aa, Zea mays
  unsure (1)..(97): unsure at all Xaa locations
XWWSWTRRSSGRRASTRSGGSXAALDARHPSEPLDRFLADAEERLRSAADDAAAALERDSGDALRRVPLACRDALRLRDDAVALRSHLASVLQSLSL

SEQ ID NO: 18468 - protein, 67 aa, Zea mays
  unsure (1)..(67): unsure at all Xaa locations
XLAADIEYLNNVLFALXMPIPPFLFTFHAWVSTPRDQVRDLIKSDGASQLDLPIAHLVCKIRRIPLN

SEQ ID NO: 18469 - protein, 105 aa, Zea mays
RAGIYQTHCRVSCVHPEEPSTRSSEGNPLVFSRHRSGKRGSTDETFIPSEGSNPMRWINAALHARNPQELLDRLLADAHERLRSGVEYAVSALERDSGDTLRRVS

SEQ ID NO: 18470 - protein, 742 aa, Drosophila melanogaster
MDVSALSETTFSPAEWINANYKKFVEENGRDDSEAASAFIRSYVAKLQLYIFNVNNAVEESSRQVVASMPRIAKESAALQADVHRLQEKMSAMRLEVAAVQSETGECMATLERLNTKSQKLQVAKESLQESDGWGNLLAELEDGFERNDLKGVCDKLIALQKSLHAQEQLPGHAERQTQVEDFKNRLEALASPSVVQCFAEGNTEQAQHFVQIFTSIQRLPQLQQYYRAVQKNFWQQQWKQTLELQGTESQPQQQQFLTLYYDQLLEHCQRQVKWCSNLFGENSPQPFLVIAELLPALQPTRDAHILQLLKTSNERLEMLALFAKVNHSFVLHLNSLLEQSHITLSEELHRLLGEAIFEYFHKFIQQYPRLEETQLSTQVDRLSSNQATPSDGVRHLEESTRKLYEWLKEACERCASITSDLALCKLITLLNGIFKRQLESFGRIQRQIGLSLGSSSYAAQSENWSLLQYTMSQLQCLADFQVQLHQFEQDLHTRMVMLSNRLTKPSNRGPITIFQTCDHAARTQLLNSIADYQQKKSEATDSLGIFPQIYATLKSHFADTHDITLNILLQPIETHLAHIRPPVQDHAASGIEMPSFSFAPQESITQIGQYLLTLPQHLEPLLLSPSSLLKQALEVCNIKYTQAIPCADVLLSLVVEQCCVLYVTQILQIKSLPSSAATQLSVDIEYLSNVLEELGLSINLQLSQILTLLKAAPDQYLTLSSGCEPRLVTAIRQMRNIISTQ

SEQ ID NO: 18471 - protein, 637 aa, Macaca fascicularis
MKLQLFIQEVNHAVEETSHQALQNMPKVLRDVEALKQEASFLKEQMILVKEDIKKFEQDTSQSMQVLVEIDQVRSRMQLAAESLQEADKWSTLSADIEETFKTQDIAVISAKLTGMQNSLMMLVDTPDYSEKCVHLEALKNRLEALASPQIVAAFTSQAVDQSKVFVKVFTEIDRMPQLLAYYYKCHKVQLLAAWQELCQSDLPLDRQLAGLYDALLGAWHTQIQWATQVFQKPHEVVMVLLIQTLGALMPSLPSCLSNGVERAGPEQELTRLLEFYDATAHFAKGLEMALLPHLHEHNLVKVTELVDAVYDPYKPYQLKYGNMEESNLLIQMSAVPLEHGEVIDCVQELSHSVNKLFGLASAAVDRCIRFTNGLGTCGLLSALKSLFAKYVSDFTSTLQSVRKKCKLDDIPPDSLFQEDWTAFQNSIRIIATCGELLRHCGDFEQQLANRILSTAGKYLSDSCSPRSLAGFQESILTDKKSSAKNPWQEYNYLQKDNPAEYASLMEILYTLKEKGSSNHNLLAAPRAALTRLNQQAHQLAFDSVFLRIKQQLLLISKMDSWNTAGIGETLTDDLPAFSLTPLEYINVMDALGLQPSRTLQHIVTLLKTRPEDYRQVSKGLPRRLATTVATMRSVNY

SEQ ID NO: 18472 - protein, 770 aa, Homo sapiens
MDFSKFLADDFDVKEWINAAFRAGSKEAASGKADGHAATLVMKLQLFIQEVNHAVEETSHQALQNMPKVLRDVEALKQEASFLKEQMILVKEDIKKFEQDTSQSMQVLVEIDQVKSRMQLAAESLQEADKWSTLSADIEETFKTQDIAVISAKLTGMQNSLMMLVDTPDYSEKCVHLEALKNRLEALASPQIVAAFTSQAVDQSKVFVKVFTEIDRMPQLLAYYYKCHKVQLLAAWQELCQSDLSLDRQLTGLYDALLGAWHTQIQWATQVFQKPHEVVMVLLIQTLGALMPSLPSCLSNGVERAGPEQELTRLLEFYDATAHFAKGLEMALLPHLHEHNLVKVTELVDAVYDPYKPYQLKYGDMEESNLLIQMSAVPLEHGEVIDCVQELSHSVNKLFGLASAAVDRCVRFTNGLGTCGLLSALKSLFAKYVSDFTSTLQSIRKKCKLDHIPPNSLFQEDWTAFQNSIRIIATCGELLRHCGDFEQQLANRILSTAGKYLSDSCSPRSLAGFQESILTDKKNSAKNPWQEYNYLQKDNPAEYASLMEILYTLKEKGSSNHNLLAAPRAALTRLNQQAHQLAFDSVFLRIKQQLLLISKMDSWNTAGIGETLTDELPAFSLTPLEYISNIGQYIMSLPLNLEPFVTQEDSALELALHAGKLPFPPEQGDELPELDNMADNWLGSIARATMQTYCDAILQIPELSPHSAKQLATDIDYLINVMDALGLQPSRTLQHIVTLLKTRPEDYRQVSKGLPRRLATTVATMRSVNY

SEQ ID NO: 18473 - protein, 245 aa, Arabidopsis thaliana
MAATNVMRRDESLLIDPQRGDTSVSRGLSLEKKIEALESLAGQVSNRRSRRWLNDRILMELVPRLDAQEIRGLFAPPPWGDDVPPSAFSLTNVGEWDKFRNIDMDKEANIMDSLNRSSVRQKGSVDGDKIAVLNAWRRIDCRTRDALRRSFLPELIEGYESCISHFIEEGGEGDVLELKVQDPFHRLLLHGVCEYHNLVSTTATEQIGRIAMKTTSIKWKKSGDSGEKPSISLAHFLRMSKEGAW

SEQ ID NO: 18474 - protein, 256 aa, Arabidopsis thaliana
MAATNVMRRDESLLIDPQRGDTSVSRGLSLEKKIEALESLAGQVSNRRSRRWLNDRILMELVPRLDAQEIRGLFAPPPWGDDVPPSAFSLTNVGEWDKFRNIDMDKEANIMDSLNRSSVRQKGSVDGDKIAVLNAWRRIDCRTRDALRRSFLPELIEGYESCISHFIEEGGEGDVLELKVQDPFHRLLLHGVCEMLNEDIESNNLKETVFFGAVSQFGINNCNRTDRKDSNEDNEHQMEEEWRFRGETKHQPSAFP

SEQ ID NO: 18475 - protein, 244 aa, Glycine max
MVLHRELDHLFSSPFVDPPKDDAKSSGMSIEKKIEFLESLTGKVTNRRSRRWLNDRLLMELVPRLNAEEIRGLFAPPPWGDEVPPSTFSMTNMEEWDRFRNIDMDKEVNIIHSLENSIEKRKGHIDADKMAVLNGWHRIDCRTRDALRRSCLSELIEGYEECVRAFITESTDGDILELQIQDPFHRLLLHGVCEFYNLASDTVSGYNGVESSRITKIKRKKKGSPVLPNITLSHFLKMSKEGSW

SEQ ID NO: 18476 - protein, 268 aa, Oryza sativa
  unsure (1)..(268): unsure at all Xaa locations
HASANQSPHHILALETPRRAIHPPRNSTPSQILHRRSTSSFEAEEGERDKPAGRESTMADLLRREEEFYASLFDSPKGGDAVKSRGQMIERKIEVLEDMATKVSNRRSRRWLNDRLLIELVPRLHVEEIKGLFAPPPWGEELPVSAFCRTSVGEWDAFRSIDMDVEXARLMQQMKQSSTKQKNHVDSDELIALNAWHRIDRQTREAIKRNFLPDLLDIYEDRIRAFIEDASGKDVLVLNVQDPFQRLLLHGVCEIIRMTPIRHRYRGX

SEQ ID NO: 18477 - protein, 124 aa, Oryza sativa
  unsure (1)..(124): unsure at all Xaa locations
MADLLRREEEFYASLFDSPKGGDAVKSRGQMIERKIEVLEDMATKVSNRRSRRWLNDRLLIELVPRLHVEEIKGLFAPPPWGEELPVSAFCRTSDGEWDAFRSIDMDVEDRINCSIPSASTRPX

SEQ ID NO: 18478 - protein, 105 aa, Oryza sativa
  unsure (1)..(105): unsure at all Xaa locations
XDRQTREAKRGKFLPDLLDIYEDRIRAFIEDARGKDGLVLNVQDPVQRLLLHGVCEFYNVSSTTTTTMRDGKLWKTTTIKRRPGTGAPSRLTLVSFLRMKKNGSQ

SEQ ID NO: 18479 - protein, 190 aa, Oryza sativa
  unsure (1)..(190): unsure at all Xaa locations
KAGYRLQGTRVPGIIPGSDPPPFRAITRDPRPPVWDSPILALKPAPSGIGTRRPAWPGEERIGSAKGRGKSTWGGADLLRREEEFYASLFNSAKGGNAVKSRGQIIERKMEVFEDMAAKVSNRRSRRWLNDRLLIELVPRLHVEEIKGLFAPPPWGKIQGCSHFLTXHIACLTAWPSNVSFCLGGTKSLN

SEQ ID NO: 18480 - protein, 106 aa, Oryza sativa
  unsure (1)..(106): unsure at all Xaa locations
XDRQTREAIKRNFLPDLLDISGGRRRARREDASGKDVLVLNVQDPFQRLLLHGVCEFYNVSSTTTTTMRDGKLWKTTTXFRRSPGTGAPPRLTLVSFLRMKKNGSQ

SEQ ID NO: 18481 - protein, 158 aa, Mesocricetus auratus
MSGIALSRLAQERKAWRKDHPFGFVAVPTKNPDGTMNLMNWECAIPGKKGTPWEGGLFKLRMLFKDDYPSSPPKCKFEPPLFHPNVYPSGTVCLSILEEDKDWRPAITINQLFIGIQELLNEPNIQEPAQAEAYTIYCQNRVEYEKRFRAQAKKFCPS

SEQ ID NO: 18482 - protein, 151 aa, Mus musculus
MASMQKRLQKELLALQNDPPPGMTLNEKSVQNSITQWIVDMEGAPGTLYEGEKFQLLFKFSSRYPFDSPQVMFTGENIPIHPHVYSNGHICLSILTEDWSPALSVQSVCLSIISMLSSCKEKRRPPDNSFYVRTCNKNPKKTKWWYHDDTC

SEQ ID NO: 18483 - protein, 151 aa, Mus musculus
MASMQKRLQKELLALQNDPPPGMTLNEKSVQNSITHGVVDMEGAPGTLYEGEKFQLLFKFSSRYPFDSPQVMFTGENIPIHPHVYSNGHICLSILTEDWSPALSVQSVCLSIISMLSSCKEKRRPPDNSFYVRTCNKNPKKTKWWYHDDTC

SEQ ID NO: 18484 - protein, 148 aa, Mus musculus
MQKRLQKELLALQNDPPPGMTLNEKSVQNSITQVIVDMEGAPGTLYEGEKFQLLFKFSSRYPFDSPQVMFTGENIPIHPHVYSNGHICLSILTEDWSPALSVQSVCLSIISMLSSCKEKRRPPDNSFYVRTCNKNPKKTKWWYHDDTC

SEQ ID NO: 18485 - protein, 191 aa, Rattus norvegicus
MVRKCWAQARILRWTALQVPFPDWGALKLALLIFFFLRCPTLADSKRLQKELLALQNDPPPGMTLNEKSVQNSITQWIVDMEGAPGTLYEGEKFQLLFKFSSRYPFDSPQVMFTGENIPVHPHVYSNGHICLSILTEDWSPALSVQSVCLSIISMLSSCKEKRRPPDNSFYVRTCNKNPKKTKWWYHDDTC

SEQ ID NO: 18486 - protein, 116 aa, Rattus norvegicus
MEEYGETKKTVMFTGENIPVHPHVYSNGHICLSILTEDWSPALSVQSVCLSIISMLSSCKEKRRPPDNSFYVRTCNKNPKKTKWWYHEPRVGCISVVGCVVNEREAQAQRTCTGIS

SEQ ID NO: 18487 - protein, 85 aa, Brachionus plicatilis
RALQQELKSIQKEPLEGFTVSLVNDNLFEWEVAIFGPPNTLYQGGYFKSHIKFPSDYPYSPPSVRFATKMWHPNIYENGDVCISI

SEQ ID NO: 18488 - protein, 215 aa, African swine fever virus
MVSRFLIAEYRHLIENPSENFKISVNENNITEWDVILRGPPDTLYEGGLFKAKVAFPPEYPYAPPKLTFTSEMWHPNIYPDGRLCISILHGDNAEEQGMTWSPAQKIDTILLSVISLLNEPNPDSPANVDAAKSYRKYVYKEDLESYPMEVKKTVKKSLDECSPEDIEYFKNAASNVPPIPSDAYEDECEEMEDDTYILTYDDDEEEEDEEMDDE

SEQ ID NO: 18489 - protein, 213 aa, African swine fever virus (isolate Malawi Lil 20/1)
MVSSFLLAEYKNLIVNPSEHFKISVNEDNLTEWDVILKGPPDTLYEGGLFKAKIVFPPKYPYEPPRLTFTSEMWHPNIYSDGKLCISILHGDNAEEQGMTWSPAQKIDTVLLSVISLLNEPNPDSPANVDAAKSYRKYLYKEDLESYPMEVKKTVKKSLDECSAEDIEYFKNVPVNVLPVPSDDYEDEEMEDGTYILTYDDEDEEEDEEMDDE

SEQ ID NO: 18490 - protein, 160 aa, Populus euramericana
MSGGIARGRLAEERKSWRKNHPHGFVAKPETQPDGTVNLMVWHCTIPGKLGTDWEGGYFPLTLNFSEDYPSKPPKCKFPQGFFHPNVYPSGTVCLSILNEDSGWRPAITVKQILVGIQDLLDQPNPADPAQTEGYHLFIQDAAEYKKRVRQQAKQYPSLV

SEQ ID NO: 18491 - protein, 217 aa, Anopheles gambiae str. PEST
VCVCFVLRPESFFFKGSKMFNRLRMRKEKPSKSETISTTNTTVIQDAAKDNKKLILDNSRWEASLWFLLGRKRLQKELMSLIKEPPPGVSVDEESVSQNLTQWIINIDGVEGTLYEGEHFQLLFKFNNKYPFDSPEVTFIGSNIPIHPHVYSNGHICLSILTDDWSPALSVQSVCLSISSMLSSCREKRRPPDNGIYVKTCNKNPKKTKWWYHDDSV

SEQ ID NO: 18492 - protein, 178 aa, Giardia lamblia ATCC 50803
MQLAFKTRNSVKMANHKRIHATKNCWNSKMAQKRIQKELKEFQKDPPMNCSGGPVGDDISVWRACILGPKDSPYESGIFYLNICFPSDYPFKPPKVTFETKIFHPNISEDGVICLDILKKEWSPVLTIAKILLSICSLLDDPNPDDPLNSAAARLLKTDKENYIRTVKKYTLDYASKK

SEQ ID NO: 18493 - protein, 160 aa, Pseudotsuga menziesii
MSSTSTPNRGLTKIATNRLQKELVEWQVNPPAGFKHKVTDNLQRWIIEVTGAPGTLYANETYQLQVDFPEHYPMEAPQVIFLQPSPLHAHIYSNGHICLDILYDSWSPAMTVSSVCMSILSMLSSSTVKERPPDNDRYVKNCRNGRSPKETRWWFHDDKV

SEQ ID NO: 18494 - protein, 299 aa, Plasmodium falciparum 3D7
MKTLKEALTNVLSSLNIAEKKEILNVLYHILQKIIENPSRAKFRSLKKDNKTFVNKLLQFKESDELLRSLGFEEETEIWFFPVKNDHKLSSNLTEIRAFIKEHVNTIYNNQDSIFETGTASSSAHLPTDEKNVTENTSNLGDTCNNSEGLTLGGLSKRRLEKERLELLSQKENTIKLLQEHADKWIIQITGAENTLYSNETFQMQFKFTEKYPIESPEVIFLGQPPIHPHIYSNGHICLSILYDHWSPVLSVNSICLSIISMLSSCKKKRKPLDDILYCSTGPRISPKNMKWMFHDDKV

SEQ ID NO: 18495 - protein, 278 aa, Plasmodium falciparum 3D7
MFNIMRPIILFNILIGYYFFIVINNVVGNLPKKNSYYNIPNYKVKNVSNIKNNKYNYFIIDTYNNMKRKNNSIYEHNFNNFNRKNKTYLFIDNKKRRRKFFYSKIEENKNLQGKELKPSRTVEKHIKTKYNLGNANYRIQKELNNFLKNPPINCTIDVHPSNIRIWIVQYVGLENTIYANEVYKIKIIFPDNYPLKPPIVYFLQKPPKHTHVYSNGDICLSVLGDDYNPSLSISGLILSIISMLSSAKEKKLPIDNYTHADAKPGSSQNNFLYHDDKC

SEQ ID NO: 18496 - protein, 126 aa, Prunus armeniaca
GTVNLMVWHCTIPGKTGTDWEGGFFPLTLHFSEDYPSKPPKCKFPPGFFHPNVYPSGTVCLSILNEDSGWRPAITVKQILVGIQDLLDQPNPADPAQTEGYHLFIQDATEYKKRVRQQAKQYPPLV

SEQ ID NO: 18497 - protein, 161 aa, Arabidopsis thaliana
MTSSSSPSRKALSKIACNRLQKELSEWQVNPPTGFKHRVTDNLQKWVIEVTGAPGTLYANETYNLQVEFPQHYPMEAPQVIFVPPAPLHPHIYSNGHICLDILYDSWSPAMTVSSVCISILSMLSSSPEKQRPTDNDRYVKNCKNGRSPKETRWWFHDDKV

SEQ ID NO: 18498 - protein, 161 aa, Arabidopsis thaliana
MTSSSAPSRKALSKIACNRLQKELSEWQLNPPSGFRHKVTDNLQKWTIDVTGAPGTLYANETYQLQVEFPEHYPMEAPQVVFVSPAPSHPHIYSNGHICLDILYDSWSPAMTVNSVCISILSMLSSSPAKQRPADNDRYVKNCKNGRSPKETRWWFHDDKV

SEQ ID NO: 18499 - protein, 161 aa, Arabidopsis thaliana
MTSSSAPSRKALSKIACNRLQKELSEWQLNPPTGFRHKVTDNLQKWTIDVTGAPGTLYANETYQLQVEFPEHYPMEAPQVVFVSPAPSHPHIYSNGHICLDILYDSWSPAMTVNSVCISILSMLSSSPAKQRPADNDRYVKNCKNGRSPKETRWWFHDDKV

SEQ ID NO: 18500 - protein, 129 aa, Brassica oleracea
VSCSAGPVGDDMFHWQATIMGPTDSPFSGGVFLVSIHFPPDYPFKPPKVSFAPRFTTDINSNGSICLDILKEQWSPALTISKVLLSICSLLTDPNPDDPLVPEIAHTYKTDRVKYESTARSWTQKYAMG

SEQ ID NO: 18501 - protein, 134 aa, Oryza sativa (japonica cultivar-group)
MTSSSSPSRKVLSKIACNRLQKELAEWQVNPPSGFKHKVTDNLQRWVIEVAGAAGTLYAGETYQLQVDFPEHYPMEAPQVIFLHPAPMHPHIYSNGHICLDILYDSWSPAMTVSSVCISILSMLSSSPAKVVVS

SEQ ID NO: 18502 - protein, 153 aa, Catharanthus roseus
MANSNLPKRIIKETQRLLSEPAPGISASPSEDNMRDFNVMILGPAQSPYEGGVFKLELFLPEEYPMAPPKVRFLTKIYHPNIDKLGRICLDILKDKWSPALQIRTVLLSIQALLSAPNPDDPLSENIAKHWKSNEAEAVETAKEWTRLYATGA

SEQ ID NO: 18503 - protein, 148 aa, Hordeum vulgare
  unsure (1)..(148): unsure at all Xaa locations
MASKXILKEFKDLQKDPPTSCSAGPSGEDMFHWQATIMGPHDSPYAGGVFLVNIHFPPDYPFKPPKVSFKTKVFHPNINSNGSICLDILKEQWSPALTISKVLLSICSLLTDPNPDDPLVPEIAHMYKTDRSKYETTAXSWTQKYAMG

SEQ ID NO: 18504 - protein, 103 aa, Drosophila silvestris
MALKRINKELQDLGRDPPAQCSAGPVGDDLFHWQATIMGPPDSPYQGGVFFLTIHFPTDYPFKPPKVAFTTRIYHPNINSNGSICLHILRSQWSPALTISKVL

SEQ ID NO: 18505 - protein, 147 aa, Phytophthora infestans
MALKRINKELQDLGRDPPANCSAGPVGDDLFHWQATIMGPEDSPYAGGVYFLNIYFPADYPFKPPKVNFTTRIYHCNINANGGICLDILKDQWSPALTISKVLLSICSLLTDANPDDPLVPEIAQIYRTDRARHDATAREWTAKYAT

SEQ ID NO: 18506 - protein, 186 aa, Entodinium caudatum
GTPPGWKIDGPAAALEDSREAFCLSSNLSVAKKRLLTDFKRINQSQDNDDESVLATPHEDDIMIWDCIIFGPENSVWENGVFKLKMEFSEEYPNKPPHVLMKTKVFHPNFYVNGEICIDILKDQWSPIYDIKSILTSIQSLLTDPNPASPANVEAAKLYSDNIQEYNKKVKECVEKSIAEAEEDAN

SEQ ID NO: 18507 - protein, 188 aa, Pichia angusta
MSSTEKRLLKEYRAVKKELTEKRSPIHDTGIVDLHPLEDGLFRWSAVIRGPDQSPFEDALWKLEIDIPTNYPLDPPKIKFVVFGEEKIRQLQRKTSSGARKVCYKMPHPNVNFKTGEICLDILQQKWSPAWTLQSALVAIVVLLANPEPLSPLNIDMANLLKCDDTTAYKDLVHYYIAKYSAYESNDV

SEQ ID NO: 18508 - protein, 134 aa, Metarhizium anisopliae
MYNLNPLTKNNWRASLVPHRGNSSSNSSDSPYSGGVFFLAIHFPTDYPFKPPKVSFTTPIYHPNINSNGSICLDILRDQWSPALTISKVLLSICSMLTDPNPDDPLVPEIAHVYKTDRPRYEATAREWTRKYAV

SEQ ID NO: 18509 - protein, 147 aa, Guillardia theta
MATKRIQKEHKDLLKDPPSNCSAGPSDENLFRWTASIIGPSDSPYAGGVFFLSILFPPDYPFKPPKVQFTTKIYHPNINSNGSICLDILRDQWSPALTVSKVLLSISSLLTDPNPDDPLVPEIARVFKENRSRYEATAREWTQRYAT

SEQ ID NO: 18510 - protein, 148 aa, Leishmania major
MALRRIQKELKDLEKDPPANTSGGPVSESDLFNWKATIIGPEDSPYAGGLFFLNIHFPSDYPFKPPKLQFTTKIYHPNINNNGGICLDILKDQWSPALTISKVLLSVCSLLTDPNPDDPLVPDIARQYKTDRNAFNKTAAEWTRQYAM

SEQ ID NO: 18511 - protein, 151 aa, Trypanosoma cruzi
MALTTRIIKETEKLQREHQEGIEARPSPNNPRYFHVKIRGPPQSSYEGGIFHLELFLPEEYPMVPPKVRFLTRIYHPNVDKLGRICLDIIKDKWSPALQIIKVLLSIQLLMASPNPDDPLDNEVAESWKRDEAAAMRTAREWTQKYASPQA

SEQ ID NO: 18512 - protein, 425 aa, Paramecium tetraurelia
MGGMYFKEEELSRIGAVNAFFSAFADKTLAFEFNHIVKLVWFESFITDKCDFTNDFNNFIKLVDDASPRGGTKCYDAIAYAIEQLKEIKKKYPNIILRIIALTDGDDNQSKENPQSLVNRIFENQIIIDSFVVNNDCVGLKTLTHATNGRCYCPQTLAEGMSLFEIESILSISHREQKEYPKELQDLNSLKDKPFDTDGMKVVSMDVQKIAVMKKEEILKKISQIESAPQNSSSTSQSVNNTARILKELQDVTAQGDKLNFKCYPTADDIKTWKILLYGPKGTVYEGGLYILSYVFTQNYPFRPPKVQFITKLYHPNVSRGGSLCLDVLNTSWSPLLTTTKVLDAVSVMLQNPNADDALDCNIAAIYKHEPELFKQNALKEKLEAASPSEDNLLADILGAVDINSQEYLDTKKELQTWLEYQKSN

SEQ ID NO: 18513 - protein, 152 aa, Caenorhabditis elegans
MSDAATRRLMKELAQLKSEAPEGLLVDNTSTSNDLKQWKIGVVGAEGTLYAGEVFMLQFTFGPQYPFNSPEVMFVGETIPAHPHIYSNGHICLSILSDDWTPALSVQSVCLSILSMLSSSKEKKHPIDDAIYVRTCSKNPSKTRWWFHDDSV

SEQ ID NO: 18514 - protein, 177 aa, Spisula solidissima
MSGQNIDPAANQVRQKERPRDMTTSKERHSVSKRLQQELRTLLMSGDPGITAFPDGDNLFKWVATLDGPKDTVYESLKYKLTLEFPSDYPYKPPVVKFTTPCWHPNVDQSGNICLDILKENWTASYDVRTILLSLQSLLGEPNNASPLNAQAADMWSNQTEYKKVLHEKYKTAQSDK

SEQ ID NO: 18515 - protein, 156 aa, Spisula solidissima
MTTSKERHSVSKRLQQELRTLLMSGDPGITAFPDGDNLFKWVATLDGPKDTVYESLKYKLTLEFPSDYPYKPPVVKFTTPCWHPNVDQSGNICLDILKENWTASYDVRTILLSLQSLLGEPNNASPLNAQAADMWSNQTEYKKVLHEKYKTAQSDK

SEQ ID NO: 18516 - protein, 199 aa, Bombyx mori
MANIAAKRIKREFKEIMKSEEVIGGSIKLGLVNENWTELKGEIAGPVDTPYEGGTFLLEIKVPETYPFNPPKIRFLTKIWHPNVSSVTGAICLDILKDQWAAALTLRTVLLSLQALLSAGEPNDPQDAVVAKQFRENPRLFTMTARHWTNVYAGGPNIVHECNSKVQRMLDMGIDEHQARVALSSYDWDLERATEQLFG

SEQ ID NO: 18517 - protein, 140 aa, Pinus pinaster
ELQDLQRDPPTSCSAGPVGEDLFHWQATIMGPTESPYAGGVFFVMIHFPPDYPFKPPKVNFQTKVYHPNINSNGSICLDILKEQWSPALTISKVLLSICSLLTDPNPDDPLVPEIAHIYKSQRSRYEETARAWTQKYAMN

SEQ ID NO: 18518 - protein, 154 aa, Drosophila melanogaster
MSSKSPSERRLHKELMSLIKEPPPGVTIDTESVQQNLSEWKINIKGFEGTLYEGEDFQLLFKFNNKYPFDSPEVTFIGTNIPVHPHVYSNGHICLSILTEDWSPALSVQSVCLSIASMLSSCREKKRPPDNTIYVKTCNKNPKKTKWWYHDDSV

SEQ ID NO: 18519 - protein, 139 aa, Drosophila melanogaster
MSLIKEPPPGVTIDTESVQQNLSEWKINIKGFEGTLYEGEDFQLLFKFNNKYPFDSPEVTFIGTNIPVHPHVYSNGHICLSILTEDWSPALSVQSVCLSIASMLSSCREKKRPPDNTIYVKTCNKNPKKTKWWYHDDSV

SEQ ID NO: 18520 - protein, 224 aa, Plasmodium yoelii yoelii
MDIYIFLFRNLNQVQNYIKNNAYTIYNNTEHIFEQSQNSSNDLTNHTNNNCNNNITGNFKLEDKEKILKPRPDGLTLGGLSKRRLEKERNELLRERENTIKLIQEDSDKWIIQIKGAENTLYSNETFKMQFKFTDRYPIESPEVIFIGQPPIHPHIYSNGHICLSILYDHWSPVLSVNSICLSIISMLSSCTKKRKPIDDMLYCSAGSKVSPKNMRWMFHDDKV

SEQ ID NO: 18521 - protein, 276 aa, Plasmodium yoelii yoelii
MKSLKLAKGLAIFCICIFIFINNGKNVFVKGKSHLNISKCRGCPKFFNKYMNLMINTNNGEKKKRYKKGLIEAHSNYENSYNNNQINMSNKFIRRHTNCLLTIDPNKLTNNTPLKSNNVIQKHMRAKYNLGNANYRIQKELHNFLKNPPINCTLDVHPNNIRIWIVKYVGLENTIYANEVYKIKIIFPNDYPLKPPIVYFLQKPPKHTHVYSNGDICLSLLGNDYNPSLSISGLVLSIISMLSSAKEKKLPIDNYTHADAKPGSSQNNFLYHDDKC

SEQ ID NO: 18522 - protein, 98 aa, Platichthys flesus
KELNDLQRDPPASCSAGPVGEDMFHWQATITGPNDSPYHGGVFFLSVHFPTDYPFKPPKISFTTKIYHPNINSNGSICLDILRSQWSPALTVSKVLLS

SEQ ID NO: 18523 - protein, 152 aa, Avicennia marina
MSTPARKRLMRDFKRLQQDPPAGISGAPQDNNIMLWNAVIFGPDDTPWDGGTFKLTLQFTEDYPNKPPTVRFVSRMFHPNIYADGSICLDILQNQWSPIYDIAAILTSIQSLLCDPNPNSPANSEAARMFSENKREYNRRVREIVEQSWTAD

SEQ ID NO: 18524 - protein, 151 aa, Homo sapiens
MASMQKRLQKELLALQNDPPPGMTLNEKSVQNSITQWIVDMEGASGTLYEGEKFQLLFKFSSRYPFDSPQVMFTGENIPVHPHVYSNGHICLSILTEDWSPALSVQSVCLSIISMLSSCKEKRRPPDNSFYVRTCNKNPKKTKWWYHDDTC

SEQ ID NO: 18525 - protein, 151 aa, Homo sapiens
MASMQKRLQKELLALQNDPPPGMTLSEKSVQNSITQWIVDMEGAPGTLYEGEKFQLLFKFSSRYPFDSPQVMFTGENIPVHPHVYSNGHICLSILTEDWSPALSVQSVCLSIISMLSSCKEKRRPPDNSFYVRTCNKNPKKTKWWYHDDTC

SEQ ID NO: 18526 - protein, 151 aa, Homo sapiens
MASMQKRLQKELLALQNDPPPGMTLNEKSVQNSITQWIVDMEGAPGTLYEGEKFQLLFKFSSRYPFDSPQVMFTGENIPVHPHVYSNGHICLSILTEDWSPALSVQSVCLSIISMLSSCKEKRRPPDNSFYVRTCNKNPKKTKWWYHDDTC

SEQ ID NO: 18527 - protein, 162 aa, Homo sapiens
MASMQTTGRRVEVWFPKRLQKELLALQNDPPPGMTLNEKSVQNSITQWIVDMEGAPGTLYEGEKFQLLFKFSSRYPFDSPQVMFTGENIPVHPHVYSNGHICLSILTEDWSPALSVQSVCLSIISMLSSCKEKRRPPDNSFYVRTCNKNPKKTKWWYHDDTC

SEQ ID NO: 18528 - protein, 159 aa, Homo sapiens [sequence omitted]

SEQ ID NO: 18529 - protein, 126 aa, Equus caballus
LRDFKRLQEDPPAGVSGAPSENNIMVWNAVIFGPEGTPFEDGTFKLTIEFTEEYPNKPPTVRFVSKMFHPNVYADGSICLDILQNRWSPTYDVSSILTSIQSLLDEPNPNSPANSQAAQLYQENKR

SEQ ID NO: 18530 - protein, 126 aa, Sus scrofa
MRDFKRLQEDPPAGVSGAPSENNIMVWNAVIFGPEGTPFEDGTFKLTIELTEEYPNKPPTVRFVSKMFHPNVYADGSICLDILQNRWSPTYDVSSILTSIQSLLDEPNPNSPANSQAAQLYQENKR

SEQ ID NO: 18531 - protein, 250 aa, Oryctolagus cuniculus
RTGAPARTAAAAMAQQQMTSSQKALMLELKSLQEEPVEGFRITLVDESDLYNWEVAIFGPPNTLYEGGYFKAHIKFPIDYPYSPPTFRFLTKMWHPNIYENGDVCISILHPPVDDPQSGELPSERWNPTQNVRTILLSVISLLNEPNTFSPANVDASVMFRKWRDSKGKDKEYAEIIRKQVSATKAEAEKDGVKVPTTLAEYCIKTKVPSNDNSSDLLYDDLYDDDIDDEDEEEEDADCYDDDDSGNEES

SEQ ID NO: 18532 - protein, 323 aa, Mus musculus
MAAAARGSGRAPTRRLLVLLLLQLLWAPAGVRAGPEEDLSHRNQEPPAPAQQLQPQPAAVQGLEPARAEKGLTPVAPVHTNKEDAAAQTNLGFIHAFVAAISVIIVSELGDKTFFIAAIMAMRYNRLTVLAGAMLALALMTCLSVLFGYATTVIPRVYTYYVSTALFAIFGIRMLREGLKMSPDEGQEELEEVQAELKKKDEEFQRTKLLNGPDVETGTSTAIPQKKWLHFISPIFVQALTLTFLAEWGDRSQLTTIVLAAREDPYGVAVGGTVGHCLCTGLAVIGGRMIAQKISVRTVTIIGGIVFLAFAFSALFISPESGF

SEQ ID NO: 18533 - protein, 323 aa, Mus musculus
MAAAARGSGRAPTRRLLVLLLLQLLWAPAGVRAGPEEDLSHRNQEPPAPPSSCSPQPAAVQGLEPARAEKGLTPVAPVHTNKEDAAAQTNLGFIHAFVAAISVIIVSELGDKTFFIAAIMAMRYNRLTVLAGAMLALALMTCLSVLFGYATTVIPRVYTYYVSTALFAIFGIRMLREGLKMSPDEGQEELEEVQAELKKKDEEFQRTKLLNGPDVETGTSTAIPQKKWLHFISPIFVQALTLTFLAEWGDRSQLTTIVLAAREDPYGVAVGGTVGHCLCTGLAVIGGRMIAQKISVRTVTIIGGIVFLAFAFSALFISPESGF

SEQ ID NO: 18534 - protein, 204 aa, Rattus norvegicus
MAMRYNRLTVLAGAMLALALMTCLSVLFGYATTVIPRVYTYYVSTALFAIFGIRMLREGLKMSPDEGQEELEEVQAELKKKDEEFQRTKLLNGPDVETGTSTAIPQKKWLHFISPIFVQALTLTFLAEWGDRSQLTTIVLAAREDPYGVAVGGTVGHCLCTGLAVIGGRMIAQKISVRTVTIIGGIVFLAFAFSALFISPESGF

SEQ ID NO: 18535 - protein, 209 aa, Nostoc sp. PCC 7120
MLTAFTAGLLLITVSELGDKTFFIAMILAMHHSRRWVFTGVVGALAAMTILSVLFGKAASLLPPVYIYYAEITLFIAFGLKLLYDASKMSAAADKAEVMEEMEEAKAAVEKADLQLPKQKTPLSIILEAFVLTFMAEWGDRTQIATIALAAGNNIIGVTIGAILGHAICAAIAVIGGKMIAGKISERQLTFAGGCLFLIFGIVAAIEGV

SEQ ID NO: 18536 - protein, 206 aa, Synechocystis sp. PCC 6803
MLTAFTAGLLLITVSELGDKTFFIAMILAMRYPRRWVLVGVVGGLAAMTILSVLMGQIFTFLPTRYINYAEVALFLIFGTKLLWDARRIKATANLEEMEDAEKAIASGEKKLKIVPRGWGIVVESFALTFVAEWGDRTQIATIALAASNNAWGVSAGAILGHTICAVIAVMGGKFVAGRISEKTVTLIGGLLFYLFAVVSWWTKIA

SEQ ID NO: 18537 - protein, 235 aa, Anopheles gambiae str. PEST
SDIGFVHAFAASFMVIIVSELGDKTFFIAAIMAMRHPRLTVFAGAIAALALMTVLSVLFGIAATIIPRVYTFYISTALFALFGLKMLYDGYHMSATGAAEELEEVQSDLRKREDEVGPSRSVPSHPPIHPSIDPFAHPLLRGVALKLLLRIFMQAFTMTFVAEWGDRSQLTTVILSARENVYGVIAGGIIGHSICTGLAVIGGRMIAQRISVRTVTLIGGVVFLLFALSALIFGP

SEQ ID NO: 18538 - protein, 211 aa, Thermosynechococcus elongatus BP-1
MLTAFTAGLTLITISELGDKTFFIAMILATRHSKRWVFLGAWSALMTMTLLSVAVGKVFQLLPQEFTFYAAILLFTIFGLRMLIQGWRMGNKPCEDECEAAVETVEKAEANLSRWGSNPAWAAFVEAFSLTLMAEWGDRTQIATITLAAASQAFGVALGAIAGHGICTAIAVLGGGLIAGRISERTLTLSGGALFLIFAIVTALQGMPKLS

SEQ ID NO: 18539 - protein, 228 aa, Arabidopsis thaliana
MGSLLQGFTKSLAMTFLSEIGDKTFFAAAILAMRYPRRLVLAGCLSALIVMTILSATLGWAAPNLISRKWTHHITTFLFFGFGLWSLWDGFKEGGGSEELAEVEAELDSDLKKTNDQSKNSKIEDEQKKQKRPFLTAFFSPIFLKAFSINFFGEWGDKSQLATIGLAADENPLGVVLGGIVAQTLCTTAAVLGGKSLASQISERIVALSGGMLFIIFGIQSLLTPVDA

SEQ ID NO: 18540 - protein, 230 aa, Arabidopsis thaliana
MSSVLQGFTKSLAMTFVSEIGDKTFFAAAILAMRYPRRLVLAGCLSALIVMTILSATLGWAAPNLISRKWTHHITTLLFFGFGLWSLWDGFKEGGGGSEELAEVEAELDADLKANGKSPKDSSKREDENKKQNRAFLTQFFSPIFLKAFSINFFGEWGDKSQLATIGLAADENPFGVVLGGVVAQFLCTTAAVIGGKSLASQISERIVALSGGMLFIIFGIQSYLTSVEA

SEQ ID NO: 18541 - protein, 230 aa, Arabidopsis thaliana
MSSVLQGFTKSLAMTFVSQIGDKTFFAAAILAMRYPRRLVLAGCLSALIVMTILSATLGWAAPNLISRKWTHHITTLLFFGFGLWSLWDGFKEGGGGSEELAEVEAELDADLKANGKSPKDSSKREDENKKQNRAFLTQFFSPIFLKAFSINFFGEWGDKSQLATIGLAADENPFGVVLGGVVAQFLCTTAAVIGGKSLASQISERIVALSGGMLFIIFGIQSYLTSVEA

SEQ ID NO: 18542 - protein, 229 aa, Glycine max
MSSIVQGFSKSLAMTILSEIGDKTFFAAAILAMRHPRRLVLSGCLSALIVMTILSVLVGWAAPNLISRTWTHHITTFLFLGFGLWSLKDAIFEEGDAEELAEVEAKLDKDWKASNGATKNSNKDDDATKKHKRSFLSQFFSPIFLQAFSITFFGEWGDKSQLATIGLAADENPFGVVLGGILGQALCTAAAVVGGKSLASQISEKIVALSGGILFIVFGIQSFLSPVES

SEQ ID NO: 18543 - protein, 230 aa, Glycine max
  unsure (1)..(230): unsure at all Xaa locations
MSSIVQGFSKSLAMTILSEIGDKTFFAAAILAMRHPRRLVLSGCLSALIVMTILSALVGWAAPNLISRTWTHHITTFLFLGFGLWSLKDAIFEQGDAEELAEVEAKLDKDWKASNGATKNSNKDDDATKKHKRSFLSXSFFSPIFLQAFSITFFGEWGDKSQLATIGLAADENPFGVVLGGILGQALCTSAAVVGGKSLASQISEKIVALSGGILFIVFGIQSFLSPVES

SEQ ID NO: 18544 - protein, 205 aa, Glycine max
  unsure (1)..(205): unsure at all Xaa locations
XHASAILAMRHPRRLVLSGCLSALIVMTILSVLVGWAAPNLISRTWTHHITTFLFLGFGLWSLKDAIFEEGDAEELAEVEAKLDKDWKASNGATKNSNKDDDATKKHKRSFLSQFFSPIFLQAFSITFFGEWGDKSQLATIGLAADENPFGVVLGGILGQALCTAAAVVGGKSLASQISEKIVALSGGILFIVFGIQSFLSPVES

SEQ ID NO: 18545 - protein, 232 aa, Oryza sativa
MAPSLLGGFTKSLAMTVLSEIGDKTFFAAAILAMRYPRKLVLAGCLTSLTVMTALSVSLGWVAPNLISRKWTHHVTTLLFFVFGILSLWEGFKEDGDSEELAEVEAELDANFKSNKAESKSKSKANDDKKKQQRPFVLQFFSPIFIKAFSITFFGEWGDKSQIATIGLAADENPFGVVLGGVLAQALCTTAAVMGGKSLASQISEKMVGLSSGVLFLLFGIMSYLSGPEGEL

SEQ ID NO: 18546 - protein, 240 aa, Oryza sativa
MAPSLLGGFTKSLAMTVLSEIGDKTFFAAAILAMRYPRKLVLAGCLTSLTVMTALSVSLGWVAPNLISRKWTHHVTTLLFFVFGILSLWEGFKEDGDSEELAEVEAELDANFKSNKAESKSKSKANDDKKKQQRPFVLQFFSPIFIKAFSITFFGEWGDKSQIATIGLAADENPFGVVLGGVLAQALCTTAAVMGGKSLASQISEKMVGLSSGVLFLLFGIMSYLSGPRRRIIMPPESHA

SEQ ID NO: 18547 - protein, 232 aa, Triticum aestivum
MSPSLLGGLTKSLAMTVLSEVGDKTFFAAAILAMRHPRKLVLAGCLSALTVMTALSASLGWAAPNLISRKWTHHITTLLFFVFGIWSLWEGFKEEGESEDLAELEAKLDADFKSNKGESKNKSKATEDTKKKQRPFLMQFFSPIFIKAFSITFFGEWGDKSQIATIGLAADENPFGVVIGGVIAQALCTTAAVMGGKSLASQISEKMVELSSGVLFLLFGIMSLLSGPEGQL

SEQ ID NO: 18548 - protein, 232 aa, Triticum aestivum; identical to SEQ ID NO: 18547

SEQ ID NO: 18549 - protein, 287 aa, Schizosaccharomyces pombe
MKNPIKWAIIAVLLSTVVAKKIVGEGMADVSAIKHPEEVHPTNRDFLRSLIFSISMIFGCEIGDKTFIVAALLAFENSRLTVFAGSYSALFIMTLLGVLLGHAAPLLFPRKLTDILGGVLFVIFGIKMLMEAKEVMDSKESMSDEFQNVRNEIAANGPIDQLLEEGAAPSHYTGHRSRSGHTLMSQLKSKGRNVMATLFSPLFIKAFALTFVSEWGDRSQIATIAMAASDNVYGVFMGANVGHACCTALAVISGKYISTKIKVHKVMFIGGILFIAFGLVYFYQGFF

SEQ ID NO: 18550 - protein, 262 aa, Schizosaccharomyces pombe
MINVESPLNLETTLGSLQFSHGSVQNIGMSISMIIGCELGDKSFIVTALLAYQYGRASVFFGSYLALFFMTSFAVLVGRAAPFLFPKSITHILGGTLFLIFGVKMLKESKEVRESQQSLENEFDKVEKIIVNEEDMKKTLELGLPASNRSSSTLKDKFFKVFSMSCFKNLFSKKFSRAFIKAFALIFVSELGDRSQIATIVMSAKEKVLDVFIGVNIGHMLCTMVAVIVGRYISNKIEMYKVLFFGGIVFMIFGILYIFQGF

SEQ ID NO: 18551 - protein, 280 aa, Saccharomyces cerevisiae
MGNMIKKASLIALLPLFTAAAAAATDAETSMESGSSSHLKSFLMSVSMIGLSEIGDKTFLIAALMAMRHKRVLVFSAAATSLAIMTILSGVVGHSAVAFLSERYTAFFAGILFLVFGYKLTMEGLEMSKDAGVEEEMAEVEEEIAIKDMNQDMDDVEKGGDTAYDKQLKNASIGKKIVHRIRELASFMFSPVWVQIFLMVFLGELGDRSQISIIAMATDSDYWYVIAGAVIGHAICSGLAVVGGKLLATRISIRTITLASSLLFFIFALMYIYQAFTTQD

SEQ ID NO: 18552 - protein, 504 aa, Neurospora crassa
MRLRQLLIPSLAATAVIAQSTTESSKQLEKNAAIDSLVDVPPVAKKYGTKDAPVDGKDGKPHAGPFVDFESSAPETTKDLPVLKDRPEDPTIVGGKKIPDTNDGVMDDPNRQGPKEGTTGTSGGVSEKTKERILKENETGEKVENKPQAPKEAPPLPHAEQKKVDKETQDKHGDKAADDITGFEPANLPDKTHDKSPPLPDSAGRIDHLDVPSGEKTGASLGESGKGTEGVITPFHSFFLSFTMILFSEIGDKTFLVAALMAMKHDRLVVFSGAFAALITMTILSAVLGHAVPTLIPKKITNYLAAALFLVFGARLLREGMAMSPDEGVSAEMQEVEQELEEKEHLARKQGRRRSSVSPYSLEMGLGNRKSRSKSRFPTPPRSPSSSPDARNASPRGRNLTECLAGFNNLVSLLLSPAWVQTFVMTFLGEWGDRSQIATIAMAAGQDYWWVTLGAVVGHGICTSVAVIGGKAIAGKVSLKVITVGGAVAFLVFGVIYLVEGFYS

SEQ ID NO: 18553 - protein, 259 aa, Crithidia fasciculata
MEFTKSSSPIDGFLSSLSMILVSEIGDKTFFIACLMAMRHPRLTVYLGAISALAAMTVLSALMGVIVPSLLSVYLTQMLAAVLFLVFGGKILFDELVRNKAEDEESEDEMAEAAAALRRRDPNDAVETGSVASSVYTSAPARRWRRLLNPVMVEAFTLTFVAEWGDRSQLATIALAAAKNPYAVTVGGVLGHALCTGGAVLCGNLIAQRVSMKTVNVVGGVLFLIFGLVTLYELLGGGRHDLDNGQKNPAQNPPVKLFL

SEQ ID NO: 18554 - protein, 297 aa, Caenorhabditis elegans
MKFSLTFLLVSLLILVPHVTVAESDAVKDVDTVDVKLDETAVVEKTEEKEAQKEHKKISSEDISFYHGFLASFSVIVVSELGDKTWFIAVIMSMRHSRLTVFSGAMGALALMTVLSACLGWITQVIPRAVTYYLSTALFALFGLKMLHEGWTMSPNEGQEGYEEAQAEVAKREGELDAGKFEMLEGGGGVASQSETRKIFLFTSRIFIEAFSLTFVAEWGDRSQLTTIILGARENIAGVIGGGILGHALCTGIAVIGGKIVAQRISVRTVTLIGGVVFLLFALSALFINDIESAVDS

SEQ ID NO: 18555 - protein, 255 aa, Caenorhabditis elegans
MKFSLTFLLVSLLILVPHVTVAESDAVKDVDTVDVKLDETAVVEKTEEKEAQKEHKKISSEDISFYHGFLASFSVIVVSELGDKTWFIAVIMSMRHSRLTVFSGAMGALALMTVLSACLGWITQVIPRAVTYYLSTALFALFGLKMLHEGWTMSPNEGQEGYEEAQAEVAKREGELDAGKFEMLEGGGGVASQSETRKIFLFTSRIFIEAFSLTFVAEWGDRSQLTTIILGARENIGTEQAQRKSRENWTKIDKN

SEQ ID NO: 18556 - protein, 206 aa, Nostoc punctiforme
MLTAFTAGLLLITVSELGDKTFFIAVILAMHHPRRLVFIGVTAALAAMTIVSVLFGQAVSLLPKAYIHYAEIVLFLAFGIKLLYDASKMSSAACDTEVIEEAEAAVKKADLELPKKKTSLAIVIEAFILTFMAEWGDRTQIATIALAAGNNPIGVTVGAILGHTICAAIAVIGGKMIAGRISERQLTLIGGCLFLVFGFVAAIEGA

SEQ ID NO: 18557 - protein, 323 aa, Drosophila melanogaster
MSQNQSYFWQTTRHNVYLKRSAKWHMALALMVVLTFGTICAAEAQPDSADNAVIESGIQSNLDVQGDLNRPTDLSSLAEKPKDAADRPKTKGTFIDAFTASISVILLTELGDKTFFIAAIMAMRHPRLIVFGGAIAALALMTVLSCAFGMAANFIPKIYTYYISTALFLIFGLKMLYDGYKMKPTDAQEELEEVQTDLRKREDELDRDVNAALVNDAESGRRRPQKRGATYFTMRILAQAFTMTFLAEWGDRSQLTTIILAASKDVYGVIAGGIIGHCICTGLAVIGGRLVASKISVRTVTIVGGIVFIGFAIYAVAIPPDDI

SEQ ID NO: 18558 - protein, 305 aa, Danio rerio
MPLRAGERHGGGRFICFLVLLSVVLFSAGVTATQEEKKVINEEQPAEVQKGTTDHAPGPAIRVDEPNKGNLGFIHAFAAAISVIIVSELGDKTFFIAAIMAMRYNRLTVLAGAMLALGLMTCLSVLFGYATTIIPRIYTYYISTALFAIFGVRMLREGLRMSPDEGQEELEEVQAEIKKKDEELQRYKLANGAPDVEAGTAANMLPQRKWPSLISPIFIQALTLTFLAEWGDRSQLATIVLAAREDPFGVAVGGTLGHCLCTGLAVIGGRMVAQKISVRTVTIIGGIVFLAFAFSALFIKPDSGF

SEQ ID NO: 18559 - protein, 324 aa, Homo sapiens
MSGRGSGNGRASAPRLLLLFLVPLLWAPAAVRAGPDEDLSHRNKEPPAPAQQLQPQPVAVQGPEPARVEKIFTPAAPVHTNKEDPATQTNLGFIHAFVAAISVIIVSELGDKTFFIAAIMAMRYNRLTVLAGAMLALGLMTCLSVLFGYATTVIPRVYTYYVSTVLFAIFGIRMLREGLKMSPDEGQEELEEVQAELKKKDEEFQRTKLLNGPGDVETGTSITVPQKKWLHFISPIFVQALTLTFLAEWGDRSQLTTIVLAAREDPYGVAVGGTVGHCLCTGLAVIGGRMIAQKISVRTVTIIGGIVFLAFAFSALFISPDSGF

SEQ ID NO: 18560 - protein, 324 aa, Homo sapiens
MAAAAPGNGRASAPRLLLLFLVPLLWAPAAVRAGPDEDLSHRNKEPPAPAQQLQPQPVAVQGPEPARVEKIFTPAAPVHTNKEDPATQTNLGFIHAFVAAISVIIVSELGDKTFFIAAIMAMRYNRLTVLAGAMLALGLMTCLSVLFGYATTVIPRVYTYYVSTVLFAIFGIRMLREGLKMSPDEGQEELEEVQAELKKKDEEFQRTKLLNGPGDVETGTSITVPQKKWLHFISPIFVQALTLTFLAEWGDRSQLTTIVLAAREDPYGVAVGGTVGHCLCTGLAVIGGRMIAQKISVRTVTIIGGIVFLAFAFSALFISPDSGF

SEQ ID NO: 18561 - protein, 205 aa, Homo sapiens
MAMRYNRLTVLAGAMLALGLMTCLSVLFGYATTVIPRVYTYYVSTVLFAIFGIRMLREGLKMSPDEGQEELEEVQAELKKKDEEFQRTKLLNGPGDVETGTSITVPQKKWLHFISPIFVQALTLTFLAEWGDRSQLTTIVLAAREDPYGVAVGGTVGHCLCTGLAVIGGRMIAQKISVRTVTIIGGIVFLAFAFSALFISPDSGF

SEQ ID NO: 18562 - protein, 668 aa, Streptomyces coelicolor A3(2)
MWIVLAVLAVVVLMQVVGSSGGYKTVDTGQVVQAINDNRVESAKLTTGDEQTIKVQLKDGQKVEGSSKIQASYIGDQGVTLANTLQNKYQDKQIPDGYTVSPSKQNPFVGILLSLLPFVLIVVVFLFLMNQMQGGGSRVMNFGKSKAKLITKDTPKTTFSDVAGSDEAVEELHEIKEFLQEPAKFQAVGAKIPKGVLLYGPPGTGKTLLARAVAGEAGVPFYSISGSDFVEMFVGVGASRVRDLFEQAKANAPAIVFVDEIDAVGRHRGAGLGGGHDEREQTLNQLLVEMDGFDVKGGVILIAATNRPDILDPALLRPGRFDRQIAVDRPDMQGRLEILKVHQKGKPVAPDVDLSAVARRTPGMTGADLANVLNEAALLTARSDQKLIDNHMLDEAIDRVVAGPQKRTRIMSDKEKKITAYHEGGHALVAAASPNSDPVHKITILSRGRALGYTMVLPDEDKYSTTRNEMLDQLAYMLGGRAAEELVFHDPTTGAANDIEKATGLARAMVTQYGMTERLGAIKFGGDNSEPFLGREMAHQRDYSEEVAALVDEEVKKLIETAHNEAWEILVENRDVLDNLVLALLEKETLGKEEIAEVFSQIVKRPARPAWTGSSRRTPSTRPPVLSPKELALTNGANGATAAISTAKSTTVEPAPAPERAPEDRPES

SEQ ID NO: 18563 - protein, 648 aa, Streptomyces coelicolor A3(2)
MTNPSPPRKAPEPPWRTEGTPDEPPKPPPGGRRMRGGWWNLILAALIVYLIANLVLSFFNEGDEPTISYTEFSKQVDEGNVSKIYAKGDAIQGQLKKARDNPEGDGTYTKFTTERPTFADDQLWADLTKNRVTVTAEPVVQHRSFLANLLIALAPMLILVVLWIFIARRMRGALGGGAGGMLGRKAPPKPVELEAGKPRTTFADVAGIDEVEGELSDVVDFLKNPDAYRRMGAKMPRGVLLTGPPGTGKTLLARAVAGEAGVPFFSASASEFIEMIVGVGASRVRELFAEARKVAPSIIFIDEIDTIGRARGGGSGTGGHDEREQTLNQILTEMDGFSGSEGVIVIAATNRADILDAALTRPGRFDRVVSVSPPDRGGREAILEIHTREIPLAPDIDLAQVARTTPGMTGAELANLANEAALLAVKRKQERVTQANLSEALEKVQLGAERPLVMPEEERRRTAYHESGHALLGMLQPGADPVRKITIVPRGRALGVTLSTPDADKYAYTEEYLRGRIIGALGGMAAEHVVYGMITTGSESDLEQVTNIARGMVARWGMSERVGRLSALPGDAQQAYGLAAAPQTLDAIDGEMRRVVDSCYEEAVRKLRDHRGQLDALAESLLASETLDEADAYRIAGITRLTKDDPEA

SEQ ID NO: 18564 - protein, 588 aa, Streptomyces coelicolor A3(2)
MAAHDDDMNRGIRPGRGSEDPAGQVAYLEQEIAVLRRKLAESPRHTRILEERIVELQTNLAGVSAQNERLAGTLREARDQIVALKEEVDRLAQPPAGFGVFLQANEDGTADIFTGGRKLRVNVSPSVELDELRRGQEVMLNEALNVVEAMEYESVGDIVTLKEILEDGERALVLGHTDEERVVRLAEPLRGLTIRPGDALLLEPRSGYVYEVVPKSEVEELVLEEVPDIGYEQIGGLGGQIEMIRDAVELPYLYPDLFREHELRPPKGVLLYGPPGCGKTLIAKAVANSLAKKVAEVTGQAAGKSFFLNIKGPELLNKYVGETERQIRLVFQRAREKASEGTPVIVFFDEMESLFRTRGSGVSSDVENTIVPQLLAEIDGVEGLQNVVVIGASNREDMIDPAILRPGRLDVKIKIERPDAEAAKDIFGKYLTERLPLHSDDLAEHEKDKSATVSSMIQTAVEQMYAESEENRFLEVTYANGDKEVLYFKDFNSGAMIENIVGRAKKMAIKDFLDKNQKGLRVSHLLQACVDEFKENEDLPNTTNPDDWARISGKKGERIVYIRTLVTGKQGADTGRSIDTVANTGQYL

SEQ ID NO: 18565 - protein, 581 aa, Streptomyces coelicolor A3(2)
MNRGIRPGRGSEDPAGQVAYLEQEIAVLRRKLAESPRHTRILEERIVELQTNLAGVSAQNERLAGTLREARDQIVALKEEVDRLAQPPAGFGVFLQANEDGTADIFTGGRKLRVNVSPSVELDELRRGQEVMLNEALNVVEAMEYESVGDIVTLKEILEDGERALVLGHTDEERVVRLAEPLRGLTIRPGDALLLEPRSGYVYEVVPKSEVEELVLEEVPDIGYEQIGGLGGQIEMIRDAVELPYLYPDLFREHELRPPKGVLLYGPPGCGKTLIAKAVANSLAKKVAEVTGQAAGKSFFLNIKGPELLNKYVGETERQIRLVFQRAREKASEGTPVIVFFDEMESLFRTRGSGVSSDVENTIVPQLLAEIDGVEGLQNVVVIGASNREDMIDPAILRPGRLDVKIKIERPDAEAAKDIFGKYLTERLPLHSDDLAEHEKDKSATVSSMIQTAVEQMYAESEENRFLEVTYANGDKEVLYFKDFNSGAMIENIVGRAKKMAIKDFLDKNQKGLRVSHLLQACVDEFKENEDLPNTTNPDDWARISGKKGERIVYIRTLVTGKQGADTGRSIDTVANTGQYL

SEQ ID NO: 18566 - protein, 611 aa, Buchnera aphidicola str. APS (Acyrthosiphon pisum)
MVKNLIFWLVITVVLMSIFQNFNTNDVNNHKVDYSTFLSEVNQDQIREAYINGRMISVTKKDSSKYTTYIPINDPKLLDNLLVKRVKIIGAIPEEPSLFISILISWFPMLLLIGVWIFFMRQMQMGGGKGAMSFGKSKARMLSEDQIQTTFADVAGCDEAKEEVSELVEYLKEPSRFQKLGGKIPKGILMVGPPGTGKTLLAKAIAGEAKVPFFTISGSDFVEMFVGVGASRVRDMFEHSRKSAPCIIFIDEIDAVGRQRGAGLGGGHDEREQTLNQMLVEMDGFDGNEGIILIAATNRPDVLDPALLRPGRFDRQVIVALPDIRGREQILKVHMRKVPLSKDVDPMIIARGTPGFSGADLANLVNEAALFAARLDKRVVSMLEFERAKDKMMMGSERRSMVMSDFQKESTAYHEAGHVIIGRLVPDHDPAHKVTIIPRGRALGVTFFLPESDTLSISRQKLESQISTLYGGRLAEEIIYGAKNVSTGAYNDIKIATSLAKNMVTQWGFSEKLGPLLYAEEEGEIFLGRSVAKAKHMSDETARIIDEEVKLLIEINYSRARNILNENIDILHAMKEALIKYETIDAFQIDDLMKRREVRQPKGWIETDTNK

SEQ ID NO: 18567 - protein, 654 aa, Chloroflexus aurantiacus
MNDNRWLKNSFVYLIILVAALALFFQYFGQGASQTEEKGIADVIADAQVGLVSEIQAQAGDEQIIVTYKDGKKYRSRVETSDSVMQLLADYNVPLYDENGRRTINVTVQPAPAWGGLLSIFTILLPTLLLIGFFVFFMRQAQGSNNQAMSFGKSRARMFAGDKPTITFADVAGQEEAKQDLAEIVEFLKFPDKFAALGARIPRGVLMVGPPGTGKTLLSRAVAGEAGVPFFSISGSEFVEMFVGVGASRVRDLFDQAKRNAPCIVFIDEIDAVGRQRGAGLGGSHDEREQTLNQILVEMDGFDTNTNVIVIAATNRPDVLDPALVRPGRFDRQVVLDAPDVRGRIEILKVHVKGKPLAEDVNLEVIARQTPGFSGADLMNVVNEAAILAARRSKRKISMAEFQDAVERVAIGGPERRSRVMTDRQKLVVAYHEAGHAIVGAALPKADKVQKVTIIPRGQAGGYTLFLPDEDSLSLRTVSQFKARLAVSLGGRVAEEIVFGNDEVTTGASGDLMQVTRIARAMVTRYGMSQRLGPMVFGEKEELIFLGREISEQRNYGDEVARQIDEEVHAIVTEAYETAQQILLQNRAVLDDMANALLEYETLDGEQLEEMIRRVKPLALDLSKSSTPNGRAEERSTQPDASQHGFGGTNPLPA

SEQ ID NO: 18568 - protein, 594 aa, Ralstonia metallidurans
MDDAKNGKVVCVSTMQGRNLVVSPKEGSKYTIISPGDIWMVGDLMKYGVQVTGKADDEPNVLVQALYYLGPTLLIIVFWFYMMRQMQGGGKGGAFSFGKSRARLIDENQNAVTFADVAGCDESKEEVVELVDFLKDPQKFQKLGGRIPRGVLLVGPPGTGKTLLARAIAGEAKVPFFSISGSDFVEMFVGVGAARVRDMFENAKKQAPCIVFIDEIDAVGRHRGAGMGGGNDEREQTLNQMLVEMDGFEANSGVIVIAATNRADVLDKALLRPGRFDRQVYVGLPDIRGREQILKVHMRKVPIGNDVDASIIARGTPGFSGADLANLVNEAALFAARRSKRVVDMQDFEDAKDKIYMGPERKSTVMREEERKATAYHESGHAVVAKLLPKADPVHKVTIMPRGWALGVTWQLPEHDKYSKYKDNMLEEIAILFGGRAAEEVFLNAMSTGASNDFERATKIARDMVTRFGMSDSLGAMVYVDTEQDGMFGKLSSKTVSEATQQKVDAEIRRIIDDQYALAKRLLEENRDKVEAMTNALMEWETIDAEQVNDIMAGRPPRPPRGAQGPNSGGNTPPGGSPVAPTNAPATARADETV

SEQ ID NO: 18569 - protein, 655 aa, Neisseria meningitidis MC58
MGNTFKSILVWVALGIGLMAAFNALDGKKEDNGQIEYSQFIQQVNNGEVSGVNIEGSVVSGYLIKGERTDKSTFFTNAPLDDNLIKTLLDKNVRVKVTPEEKPSALAALFYSLLPVLLLIGAWFYFMRMQTGGGGKGGAFSFGKSRARLLDKDANKVTFADVAGCDEAKEEVQEIVDYLKAPNRYQSLGGRVPRGILLAGSPGTGKTLLAKAIAGEAGVPFFSISGSDFVEMFVGVGASRVRDMFEQAKKNAPCIIFIDEIDAVGRQRGAGLGGGNDEREQTLNQLLVEMDGFESNQTVIVIAATNRPDVLDPALQRPGRFDRQVVVPLPDIRGREQILNVHSKKVPLDESVDLLSLARGTPGFSGADLANLVNEAALFAGRRNKVKVDQSDFEDAKDKIYMGPERRSMVMHEDEKRATAYHESGHAIVAESLPFTDPVHKVTIMPRGRALGLTWQLPERDRISMYKDQMLSQLSILFGGRIAEDIFVGRISTGASNDFERATQMAREMVTRYGMSDKMGVMVYAENEGEVFLGRSVTRSQNISEKTQQDIDAEIRRILDEQYQVAYKILDENRDKMETMCKALMEWETIDRDQVLEIMAGKQPSPPKDYSHNLRENADAAEDNAPHAPTREETEAPAPADTASTESEQQPENKA

SEQ ID NO: 18570 - protein, 655 aa, Neisseria meningitidis Z2491
MGNTFKSILVWVALGIGLMAAFNALDGKKEDNGQIEYSQFIQQVNNGEVSGVNIEGSVVSGYLIKGERTDKSTFFTNAPLDDNLIKTLLDKNVRVKVTPEEKPSALAALFYSLLPVLLLIGAWFYFMRMQTGGGGKGGAFSFGKSRARLLDKDANKVTFADVAGCDEAKEEVQEIVDYLKAPNRYQSLGGRVPRGILLAGSPGTGKTLLAKAIAGEAGVPFFSISGSDFVEMFVGVGASRVRDMFEQAKKNAPCIIFIDEIDAVGRQRGAGLGGGNDEREQTLNQLLVEMDGFESNQTVIVIAATNRPDVLDPALQRPGRFDRQVVVPLPDIRGREQILNVHSKKVPLDKSVDLLSLARGTPGFSGADLANLVNEAALFAGRRNKVKVDQSDFEDAKDKIYMGPERRSMVMHEDEKRATAYHESGHAIVAESLPFTDPVHKVTIMPRGRALGLTWQLPERDRISMYKDQMLSQLSILFGGRIAEDIFVGRISTGASNDFERATQMAREMVTRYGMSDKMGVMVYAENEGEVFLGRSVTRSQNISEKTQQDIDAEIRRILDEQYQVAYKILDENRDKMETMCKALMEWETIDRDQVLEIMAGKQPSPPKDYSHNLRENADAAEDNAPHAPTREETEAPAPADTASTESEQQPENKA

SEQ ID NO: 18571 - protein, 618 aa, Deinococcus radiodurans
MKWWGWALLALTGGLLVLVLSGSPRSQSELNVNDFTQAVRTQQVKTADISFQNGTALVTGRLTSGLPYRARTLPADPVLKLGTLEGRGVTVTYLPPPRISVLGALSVLLTLALIGGLIALLVRSRNGGNNDAASSFGKSKAAIISEGQIKLTFADVAGCDEAKQDLQEVVEFLRQPEKYHQLGARIPRGVLLVGPPGSGKTLLAKAVAGEAKVPYFSISGSDFVEMFVGVGAARVRDLFEQARKASPCIVFIDEIDAVGRKRGMNIQGGNDEREQTLNQLLVEMDGFGSGQDVIILAATNRPDVLDAALLRPGRFDRQVVVDAPDVRGREQILRIHSRKKPLDVSVDLGVIARRTAGMVGADLENLLNEAALLAAREGRNRITGRDVDEARDRVLMGPERRSMVVREADRKVTAYHEVGHALVAQLLPHSDKAHKLTIVPRGRSLGSALYTPEDRMHHTRTALLDRICVALSGHAAEEVIYGEVTTGAQNDFQQATGLARRMVTEWGMSEVGQLALAQDNGNYLGFGPQPTNYSDHTAEQIDTAVADILNTQYARAHALLSEHVHVLHRLTDELVARESLSGDELQTVLNGGTLPELPAAVRPEGAPPPEGTLRPEGA

SEQ ID NO: 18572 - protein, 655 aa, Deinococcus radiodurans
MTRRAPVRRFSGRWSSRSGSWKAGLLTLHLLTLPVLVQGTAAATTAHVTASANAPTTPAPQPPTWTPNKGNPRLMPENYTVNRFFADLQAGKVERVKLDGAGNTQVFFKEPAGGPNPRWLLLPPDAATLARLRGSGVTMQVTPGGSRFAWLGQALPLVLTALILAVLWRSLRGNGGGGASSFAKSKAAIISEGQIKLTFADVAGCDEAKQDLQEVVDFLRQPEKYHQLGARIPHGVLLVGPPGSGKTLLAKAVAGEAKVPYFSISGSDFVEMFVGVGAARVRDLFEQARKSSPCIVFIDEIDAVGRKRGMNIQGGNDEREQTLNQLLVEMDGFGSGQDVIILAATNRPDVLDAALLRPGRFDRQVVVDAPDVRGREQILRIHSRKKPLDVSVDLGVIARRTAGMVGADLENLLNEAALLAAREGRNRITGRDVDEARDRVLMGPERRSMVVREADRKVTAYHEVGHALAAQLLPNAHRVAKLTVVPRGRAAGYMLPDADDRLHVTRAALEDMIAVALAGRAAEEVVYGEVTTGAQNDFQQATGLARRMVTEWGMSGRIGKVALASDEGNYLGGGPQPLPTSEHTSQVVDEEVRALIDAAYARVLALLREYLPQVHQIVTVLMQRETLSGEEFATLLAGGSLEPLPPVGQVALAPA

SEQ ID NO: 18573 - protein, 655 aa, Deinococcus radiodurans
MSLVHSTYGTAVCPNSVLSAVFPFSPLEAPLLKRLNPWIIVLLVLGLFLMFTNLPGSGRYTVNYNEFKSLLNQGRIERVTVREDVATVLLKERGQVSVITPQGQATKDGVESLIVRLPGNQATPDSGLIPQLEAKGVDYRFEAPSQWFAILINFLPLILLFGMMYFFFARSQGGQGGVMQFGQSKAKKYGKENRVPTKFTDVAGHEEAKRELIEVVDFLKNPAKYHQIGAEIPKGVLLVGPPGTGKTLLARAVAGEADVPFFSVSASEFMEMFVGVGASRVRTLFEDARKSAPAIIFIDEIDSIGRKRGAGIGGGHDEREQTLNQILSEMDGFDKSSSVIVLGATNRPDVLDPALLRPGRFDRQVTIDLPNLKEREAILKVHLRNKPLGEGVDVPEIAKSTPYFSGADLKNITNEAALEAARVGKTKIDMSDFYRALDKITLGLENSSLTISEPEKRAIAFHEAGHAVTAAVIPGSDKLQKVSIIPRGRALGAAFYLPEEQVLMSKERLENQLVVALGGRAAEEVFVGTITSGAADDFRKATNIARKMVLEWGMGENFRNMALQTDGGGPVFLGEDMGKPKMFSEHTAQLVDEDVKRILAAAYERSRQIVSDYKQAMQEVADALLTHELITGDVVRDAVARVGGQSVAVAPAPTV

SEQ ID NO: 18574 - protein, 659 aa, Burkholderia fungorum
MNEKSNYTGVLIPIGVVLLLLAQIFLYRQPTEAIAYSDFHRLLVARQLDNLEIGSDQITGSVRMPGAAPLLPASAASGLAANGEPWRFLTVRVSDDHLIEDLANSGVRYTGVADRIGLAAVLGWIVPILMLAAVWSVFMRRGGGGLRDFSGIGKSRPRVYVAQDTDVTFDDIAGIDEAKAELKQIVEFLRNAERYRRLGGKIPKGVLIVGAPGTGKTLLAKAVAGEAGVPFFSISGSAFVEMFVGVGAARVRDLFEQAQKKAPCIVFIDELDALGKVRGAGVTSGNDEREQTLNQLLVEMDGFQPNSGVIILAATNRPEILDPALLRPGRFDRHIAIDRPDLNGRRQILQVHVKKVTLAADVDLAEIASRTPGFAGADLANVVNEAALHAAELDKSAVGMVDFDEAIDRAMTGMERRSRVMNEQEKITIAYHEAGHALVALSRPHCDPVKKVSIIPRGVAALGYTQQVPTEDRYVLRKSELLDRLDAYLGGRVAEEIVFGDVSTGAENDLDRATALVRHMVTRYGMSERLGLFTFDSSDPGVGYPSAGGRGERFSESTAKLVDDEVRRELAEAHERVTRTLADSRAQLDRIARRLLECEVLDQATLLQLMTGDAAPPTALQQNATAAASAAGTGASGPAAPEANAAGTPSPLAQHGSVA

SEQ ID NO: 18575 - protein, 625 aa, Burkholderia fungorum
MFSKAAVWLVIALVLFTVFKQFDKPRVQEGVSYSQFMDDAKNGKVKNVIVQGRNLTVTPADGQKYQIVSPGDIWMVGDLMKYGVQVSGKADDEPNALVSALYYLGPTILIIGFWFYMMRQMQGGGKGGAFSFGKSRARLIDENNNAINFTDVAGCDEAKEEVSELVDFLRDPQKFQKLGGRIPRGVLLVGPPGTGKTLLARAIAGEAKVPFFSISGSDFVEMFVGVGAARVRDMFEQAKKHAPCIVFIDEIDAVGRHRGAGMGGGNDEREQTLNQMLVEMDGFEANSGVIVIAATNRSDVLDKALLRPGRFDRQVYVGLPDIRGREHIMKVHLRKVPISNDVDAAVIARGTPGFSGADLANLVNEAALFAARRGKRIVEMTDFEDAKDKIFMGPERKSAVIREESKRATAYHESGHAVIAKLLPKADPVHKVTIIPRGRALGVTWQLPEHDNETYSKDYLLDRLAILFGGRVAEELFLNLISTGASDDFNKATQTARAMVARFGMTDALGPMVYVDDENDATPFGRGFTRTISEATQQKVDAEIRRVLDEQYNLAKRLLDENRDKVEAMTAALMEWETIDADQINDIMAGRPPRSPKSSTPSATDASSGGSPGTEVKPGSATAPA

SEQ ID NO: 18576 - protein, 695 aa, Lactococcus lactis subsp. lactis
MNNNKQPKQGNFVKNILMWVILAIVVVVGFNFFFSSNQSSVDKISYSQLMTKLDGNKIENVTMQPSDSLITVTGEYKEPVKVKGTNNFPLLGNSSSEVKNFQAYIIPTDSVVKDIQNAAKSNDVKLSVVQASSSGMWVQILSYIIPMLLFVGIFWLMMGGMGARGGGGGGNPMSFGKSRAKQQDGKTSKVRFADVAGSEEEKQELVEVVDFLKNPKKYHDLGARIPAGVLLEGPPGTGKTLLAKAVAGEAGVPFYSISGSDFVEMFVGVGASRVRDLFENAKKTAPSIIFIDEIDAVGRQRGAGLGGGNDEREQTLNQLLVEMDGFQDDGNSVIVIAATNRSDVLDPALLRPGRFDRKVLVGAPDVKGREAVLKVHAKNKPLASDVDLHNVATQTPGYVGADLENVLNEAALVAARQNKKEINAADIDEGMDRAMAGPAKKDRIQSMREREIVAYHEAGHAIVGLVLENGSTVRKVTVVPRGRIGGYMLALPDEEIMQPTNFHLQDQLASLMGGRLGEEIVFGVATPGASNDIEKATHIARSMVTEYGMSKKLGMVSYEGDHQVFIGRDYGQTKTYSEATAVMIDDEVRRILGEAYDRAKEAIETHREQHKAIAEALLKYETLDAKQIMSLFKTGKMPDEAAAAEVPEPKTFEESLKDANANVDDFSNINIYNGDEKTDSKPEENKEKSEDETAE

SEQ ID NO: 18577 - protein, 602 aa, Clostridium acetobutylicum
MKKISSATVWIVVFLVVIFTILMLVQGGKATNTVSFDQFQKQYMGNNIKSFEMKDDKMTVDGKYKDGSSFETIVPLERLNQFLADHPTNGEIGESYAAPANIPVWISWMPTIIMILAMVVILVLFMQQTQGGTGKGVMGFGKSRAKMSSPDDLKQKVTFKDVAGADEEKGELEEIVDFLKQPKRYIEMGARIPKGVLLVGPPGTGKTLLAKAVSGEAGVPFFSISGSDFVEMFVGVGASRVRDLFEQAKKNSPCIIFIDEIDAVGRQRGAGLGGGHDEREQTLNQLLVEMDGFGVNEGIIILAATNRPDILDHALLRPGRFDRQILVGAPDVKGREEILKVHSKNKNLDDSIRLDVLAKRTPGFTGADLENLMNEAALLAVRNKKPIIGMEELEEATTRVIAGPEKKSRVISEEDRKITAYHEAGHAVLMELLPYSDPVHQISIVPRGMAGGYTMHLPEKDSSYMSKNKLKDEMVGLLGGRIAEKLVIGDISTGAKNDIDRATSIARKMVMEYGMSDKLGTITFGKDQDEVFLGRDLGTSRNFSEEIAAKIDNEVKELIDEAYTKAENLLKDNMSKLDAVAKALLEKEKLEADEFKEIFENA

SEQ ID NO: 18578 - protein, 621 aa, Clostridium acetobutylicum
MFDNKDFKDNKYKYAIFYTLGAIIFVLLVNYAASSIRTEEITYNKFLDLLNAKKVSQVNISDEKIMIVPKENAGFHKKILYTGRIEDPDLKTELKKSGAEIKPEIKNDDPIKNFLITWILPIILLAFFGKILFGKLDKKFGNGVMSFGKNNAKLYAESETGKTFEDVAGQEEAKESLVEIVDFLHNPNKYAEIGAKLPKGALLVGPPGTGKTLLAKAVAGEAKVPFFSMSGSDFVEMFVGMGAARVRDLFEQAQEKAPCIIFIDEIDAIGKSRENTLGGSNDEREQTLNQLLAEMDGFDSSKGVVILAATNRPEILDKALLRPGRFDRRVIVDRPDLKGREAILKVHAKDVKMSEDISLEEIAKATSGAVGADLANIVNEAALLAVKNGRNKVYQEDLDKAVEFIIAGKEKKDKILSDKDKKTVAYHEVGHALVAALLKHTNPVHKITIVPTTMGALGYTMQLPEEEKYLVTKDEMMDEISVLLGGRSSEEVVFGTISTGASNDIEKATQTARNMVTIYGMTDKFDMMALQSQGSRYLDGTPAKNCSNEVEYEADKEVLRIIKEAHNKAKDILKANRELLDSIAEILLVKETLTGSEFMKIVKESSAWKEMNEIQMEKLTD

SEQ ID NO: 18579 - protein, 582 aa, Clostridium acetobutylicum
MKYLKNKHFIVPAFIFLCSLTLFASSLVSINKTQYKMYINFEKDIKANKVETVYLTSSPKITVQLKSGSVYTTDNPRTDNFKENLLKNSIKVSEDDFKQSKSTVYLLILAISTLYFITSLIKVFKISIPTKKAFAVDKLETDSIENVGVKFNDVAGNEEAKESVQDIIDFLKNPEKYNLYGARMPKGVILYGEPGTGKTMLAKAIAGEANVPFYAMSGSDFIQVYVGVGASRIRQLFKKARSNGKAVIFIDEIDAIGKKRDGGKSGGSEERDQTLNALLTEMSGFKEKEGIVVIAATNRIDVLDSALLRPGRFDRHIEINLPDISARKKILSLLVKNKPVKDIDLNDLAQKTAYFSGAKLENLVNEAAILACKENSSFIENQHMDKAFSIVIAGYEKVDRSHISLTDKKITAYHESGHALVSLKVLPEEKVSKITIIPSTNGSGGYTLSIPEDKMYQNKEYIQNRIRVLLGGRAAEEIIFGKSSITTGAYNDLQKVTSAVTKLVTQYGMGSSLGLLNADALSEINYSVSTSVIDECKDLVETLYEDTKNILLNNKHILENMSNKLLDVETLNYEDIQGLNIQ

SEQ ID NO: 18580 - protein, 644 aa, Escherichia coli O157:H7 EDL933
MAKNLILWLVIAVVLMSVFQSFGPSESNGRKVDYSTFLQEVNNDQVREARINGREINVTKKDSNRYTTYIPVQDPKLLDNLLTKNVKVVGEPPEEPSLLASIFISWFPMLLLIGVWIFFMRQMQGGGGKGAMSFGKSKARMLTEDQIKTTFADVAGCDEAKEEVAELVEYLREPSRFQKLGGKIPKGVLMVGPPGTGKTLLAKAIAGEAKVPFFTISGSDFVEMFVGVGASRVRDMFEQAKKAAPCIIFIDEIDAVGRQRGAGLGGGHDEREQTLNQMLVEMDGFEGNEGIIVIAATNRPDVLDPALLRPGRFDRQVVVGLPDVRGREQILKVHMRRVPLAPDIDAAIIARGTPGFSGADLANLVNEAALFAARGNKRVVSMVEFEKAKDKIMMGAERRSMVMTEAQKESTAYHEAGHAIIGRLVPEHDPVHKVTIIPRGRALGVTFFLPEGDAISASRQKLESQISTLYGGRLAEEIIYGPEHVSTGASNDIKVATNLARNMVTQWGFSEKLGPLLYAEEEGEVFLGRSVAKAKHMSDETARIIDQEVKALIERNYNRARQLLTDNMDILHAMKDALMKYETIDAPQIDDLMARRDVRPPAGWEEPGASNNAGDNGSPKAPRPVDEPRTPNPGNTMSEQLGDK

SEQ ID NO: 18581 - protein, 561 aa, Xylella fastidiosa Dixon
PRDDKLVDVLYTKNIEMTRQKPSSGPGFWSLVLNFLPVILIIGFWVFIMRQMQGGGAKGAMSFGKSRAKLQGDDQIKITFADVAGCDEAKEEVGELVDFLRDPTKFTKLGGKIPRGVLMVGPPGTGKTLLAKAIAGEAKVPFFSISGSDFVEMFVGVGASRVRDMFEQAKKHAPCIIFIDEIDAVGRHRGAGLGGGHDEREQTLNQLLVEMDGFEGGEGVIVIAATNRPDVLDPALLRSGRFDRQVVVALPDVKGREQISRCHMRKLLLANDVEPLVIARGTPGFSGADLANLCNEAALFAARSNEKEVRMNHFDAARDKILMGTERRSMAMSEEEKTLTAYHEAGHAIVGRLVPEHDPVYKVTIIPRGRALGVTMYLPEGDKYSINKVAIQSQLCSLYGGRVAEELIFGEDKVTTGASNDIERVTKMARNMVTKWGLSDELGPVAYGEEEDEVFLGRSVTQHKNVSDETARKIDEVVRSILDKAYARTKRILADNLDKLHAMSQLLLQYETIDAPQIDAIMEGREPPPPVGWGKPSDNGSDDDMSKPRPLTTIVVPAEQV

SEQ ID NO: 18582 - protein, 697 aa, Staphylococcus aureus subsp. aureus Mu50
MQKAFRNVLVIVIIGVIIFGLFSYLNGNGNMPKQLTYNQFTEKLEKGDLKTLEIQPQQNVYMVSGKTKNDEDYSSTILYNNEKELQKITDAAKKQNGVKLTIKEEEKQSVFVSILSTLIPVVVIALLFIFFLSQAQGGGSGGRMMNFGKSKAKMYDNNKRRVRFSDVAGADEEKQELIEIVDFLKDNKKFKEMGSRIPKGVLLVGPPGTGKTLLARAVAGEAGAPFFSISGSDFVEMFVGVGASRVRDLFDNAKKNAPCIIFIDEIDAVGRQRGAGVGGGHDEREQTLNQLLVEMDGFGENEGIIMIAATNRPDILDPALLRPGRFDRQIQVGRPDVKGREAILHVHAKNKPLDETVDLKAISQRTPGFSGADLENLLNEASLIAVREGKKKIDMRDIEEATDRVIAGPAKKSRVISKKERNIVAHHEAGHTIIGMVLDEAEVVHKVTIVPRGQAGGYAMMLPKQDRFLMTEQELLDKICGLLGGRVSEDINFNEVSTGASNDFERATQIARSMVTQYGMSKKLGPLQFGHSNGQVFLGKDMQGEPNYSSQIAYEIDKEVQRIVKEQYERCKQILLEHKEQLILIAETLLTEETLVAEQIQSLFYEGKLPEIDYDAAKVVKDEDSEFNDGKFGKSYEEIRKEQLEDGQRDESEDRKEEKDIAEDKKEADKSDEKDEPAHRQAPNIEKPYDPNHPDNK

SEQ ID NO: 18583 - protein, 637 aa, Pseudomonas putida KT2440
MNDMAKNLILWLIIAAVLVTVMNNFSSPNEPQTLNYSDFIQQVKDGKVERVTVDGYIITGKRTDGDNFKTVRPAITDNGLIGDLVDNHVVVEGKQPEQQSIWTQLLVASFPILVIIAVFMFFMRQMQGGAGGKGGPMSFGKSKARLLSEDQVKTTLADVAGCDEAKEEVGELVEFLRDPGKFQRLGGRIPRGVLMVGPPGTGKTLLAKAIAGEAKVPFFTISGSDFVEMFVGVGASRVRDMFEQAKKHAPCIIFIDEIDAVGRHRGAGMGGGHDEREQTLNQLLVEMDGFEMNDGIIVIAATNRPDVLDPALLRPGRFDRQVVVGLPDIRGREQILKVHMRKVPIGENVNPAVIARGTPGFSGADLANLVNEASLFAARSNKRLVEMKEFELAKDKIMMGAERKTMVMSEKEKRNTAYHEAGHAIVGRLVPEHDPVYKVSIIPRGRALGVTMFLPEEDRYSLSKRALISQICSLYGGRIAEEMTLGFDGVTTGASNDIMRASQLARNMVTKWGLSEKLGPLMYAEEEGEVFLGRSAGSQHASVSGETAKLIDSEVRSIIDQCYATAKQLLIDNRDKLEAMTEALMKYETIDADQIDDIMAGRTPREPRDWDDDKHSGTPAAQDERPESPIGGPAAEH

SEQ ID NO: 18584 - protein, 659 aa, Streptococcus pyogenes M1 GAS
MKNNKNNGFVKNSFIYILMIIVVITGFQFYLKGTSTQSQQISYSKLIKHLKAGDIKSLSYQPSGSIIEVKGKYEKPQKVTVNSGLSFLGGRASTQVTEFSSLVLPSDTILKEMTAAADKNGTELTVKQESSSGTWITFLMSFLPIVIFAAFMMMMMNQGGGGARGAMSFGKNKAKSQSKGNVKVRFTDVAGAEEEKQELVEVVDFLKNPKKYKSLGARIPAGVLLEGPPGTGKTLLAKAVAGEAGVPFFSISGSDFVEMFVGVGASRVRSLFEDAKKAERAIIFIDEIDAVGRRRGAGMGGGNDEREQTLNQLLIEMDGFEGNENIIVIAATNRSDVLDPALLRPGRFDRKVLVGRPDVKGREAILRVHAKNKPLANDVNLKVVAQQTPGFVGADLENVLNEAALVAARRNKIKIDASDIDEAEDRVIAGPSKKDRTISQKEREMVAYHEAGHTIVGLVLSNARVVHKVTIVPRGRAGGYMIALPKEDQMLLSKEDLKEQLAGLMGGRVAEEIVFNAQTSGASNDFEQATQIARAMVTEYGMSEKLGPVQYEGNHAMMPGQISPEKAYSAQTAQMIDDEVRELLNQARNQAADIINENRDTHKLIAEALLKYETLDAAQIKSIYETGKMPVDLETDDNEAHALSYDEIKNKMTESESAE

SEQ ID NO: 18585 - protein, 645 aa, Xylella fastidiosa 9a5c
MRMNDLTKNVLLWVVVAVVLMVVFQSFSPRIGGVIGNEPITYTQFLNEVDSGRIKSVNYTDESGLTVNAIRFKRTDGSEGLVYGPRDDKLVDVLYSKNIEMTRQKPSTGPGFWSLVLNFLPVILIIGFWVFIMRQMQGGGAKGAMSFGKSRAKLQGDDQIKITFADVAGCDEAKEEVGELVDFLRDPTKFTKLGGKIPRGVLMVGPPGTGKTLLAKAIAGEAKVPFFSISGSDFVEMFVGVGASRVRDMFEQAKKHAPCIIFIDEIDAVGRHRGAGLGGGHDEREQTLNQLLVEMDGFEGGEGVIVIAATNRPDVLDPALLRPGRFDRQVVVALPDVKGREQILGVHMRKLLLANDVEPLVIARGTPGFSGADLANLCNEAALFAARSNEKEVRMNHFDAARDKILMGTERRSMAMSEEEKTLTAYHEAGHAIVGRLVPEHDPVYKVTIIPRGRALGVTMYLPEGDKYSINKVAIQSQLCSLYGGRVAEELIFGEDKVTTGASNDIERVTKMARNMVTKWGLSDELGPVAYGEEEDEVFLGRSVTQHKNVSDETARKIDEVVRSILDKAYARTKRILADNLDKLHAMSQLLLQYETIDAPQIDAIMEGREPPPPVGWGKPSDNGSDDDMSKPRPLTTIVVPAEQV

SEQ ID NO: 18586 - protein, 652 aa, Streptococcus pneumoniae TIGR4
MKKQNNGLIKNPFLWLLFIFFLVTGFQYFYSGNNSGGSQQINYTELVQEITDGNVKELTYQPNGSVIEVSGVYKNPKTSKEETGIQFFTPSVTKVEKFTSTILPADTTVSELQKLATDHKAEVTVKHESSSGIWINLLVSIVPFGILFFFLFSMMGNMGGGNGRNPMSFGRSKAKAANKEDIKVRFSDVAGAEEEKQELVEVVEFLKDPKRFTKLGARIPAGVLLEGPPGTGKTLLAKAVAGEAGVPFFSISGSDFVEMFVGVGASRVRSLFEDAKKAAPAIIFIDEIDAVGRQRGVGLGGGNDEREQTLNQLLIEMDGFEGNEGIIVIAATNRSDVLDPALLRPGRFDRKVLVGRPDVKGREAILKVHAKNKPLAEDVDLKLVAQQTPGFVGADLENVLNEAALVAARRNKSIIDASDIDEAEDRVIAGPSKKDKTVSQKERELVAYHEAGHTIVGLVLSNARVVHKVTIVPRGRAGGYMIALPKEDQMLLSKEDMKEQLAGLMGGRVAEEIIFNVQTTGASNDFEQATQMARAMVTEYGMSEKLGPVQYEGNHAMLGAQSPQKSISEQTAYEIDEEVRSLLNEARNKAAEIIQSNRETHKLIAEALLKYETLDSTQIKALYETGKMPEAVEEESHALSYDEVKSKMNDEK

SEQ ID NO: 18587 - protein, 652 aa, Streptococcus pneumoniae R6
MKKQNNGLIKNPFLWLLFIFFLVTGFQYFYSGNNSGGSQQINYTELVQEITDGNVKELTYQPNGSVIEVSGVYKNPKTSKEGTGIQFFTPSVTKVEKFTSTILPADTTVSELQKLATDHKAEVTVKHESSSGIWINLLVSIVPFGILFFFLFSMMGNMGGGNGRNPMSFGRSKAKAANKEDIKVRFSDVAGAEEEKQELVEVVEFLKDPKRFTKLGARIPAGVLLEGPPGTGKTLLAKAVAGEAGVPFFSISGSDFVEMFVGVGASRVRSLFEDAKKAAPAIIFIDEIDAVGRQRGVGLGGGNDEREQTLNQLLIEMDGFEGNEGIIVIAATNRSDVLDPALLRPGRFDRKVLVGRPDVKGREAILKVHAKNKPLAEDVDLKLVAQQTPGFVGADLENVLNEAALVAARRNKSIIDASDIDEAEDRVIAGPSKKDKTVSQKERELVAYHEAGHTIVGLVLSNARVVHKVTIVPRGRAGGYMIALPKEDQMLLSKEDMKEQLAGLMGGRVAEEIIFNVQTTGASNDFEQATQMARAMVTEYGMSEKLGPVQYEGNHAMLGAQSPQKSISEQTAYEIDEEVRSLLNEARNKAAEIIQSNRETHKLIAEALLKYETLDSTQIKALYETGKMPEAVEEESHALSYDEVKSKMNDEK

SEQ ID NO: 18588 - protein, 700 aa, Staphylococcus epidermidis ATCC 12228
MQKAFRNVLVIAIIGVIIFGLFSFLNGNGNMPKQLTYTQFVNKLNKGDLKTLEIQPEQNVYMVSGKTKKDEDYSSTILYNNEKDLQKITDTAKKQDNLKFTVKEEEKQSVFVSILTTLIPVLIIALLFIFFLSQAQGGGGGGRMMNFGKSKAKMYDSNKRRVRFSDVAGADEEKQELIEIVDFLKDNKKFKQMGSRIPKGVLLVGPPGTGKTLLARAVAGEAGAPFFSISGSDFVEMFVGVGASRVRDLFENAKKNAPCIIFIDEIDAVGRQRGAGVGGGHDEREQTLNQLLVEMDGFGENEGIIMIAATNRPDILDPALLRPGRFDRQIQVGRPDVKGREAILHVHAKNKPLDETVDLKAISQRTPGFSGADLENLLNEASLIAAREGKNKIDMRDIEEATDRVIAGPAKKSRVISEKERNIVAHHEAGHTIIGMVLDEAEIVHKVTIVPRGQAGGYAMMLPKQDRFLMTEPELLDKICGLLGGRVSEDINFGEVSTGASNDFERATQIARSMVTEYGMSKKLGPLQFSSNSGGQVFLGKDMQGEPNYSGQIAYEIDKEVQRIVKEQYERCKQILLEHEEQLKLIAKTLLSEETLVAEQIQSLFYDGVLPEVDYDSAKVVKNENSDYSDGKYGKSYNDIRKEQLEDDDKEDDDNHEKDEVNQDNTDREADNTSHTNEPGHQQSPNIDKPYNPNDPNHRQ

SEQ ID NO: 18589 - protein, 787 aa, Mycobacterium leprae
MNRKNVIRMVTAIAVVVLLGWSFFYFSDDTRGYKFVDTSVAMSQINGHNVKSAQIDDREQQLRLTLKKGNNDTDGSDKVITKYPTGYAVDLFNALSAKNTKVTTAVNEGSILGELLVYVLPLLLLVGLFVMFSRMQGGARMGFGFGKSRAKQLSKDMPKTTFADVAGVDEAVEELYEIKDFLQNPCRYQTLGAKIPKGVLLYGPPGTGKTLLARAVAGEAGVPFFTISGSDFVEMFVGVGASRVRDLFDQAKQNSPCIIFVDEIDAVGRQRGTGLGGGHDEREQTLNQLLVEMDGFGDRAGVILIAATNRPDILDPALLRPGRFDRQIPVSNPDLAGRRAVLRVHSKGKPIADDADLDGLAKRTVGMTGADLANVVNEAALLTARENGLVITGPALEEAVDRVIGGPRRKGRIISEQEKKITAYHEGGHTLAAWAMPDIEPIYKVTILARGRTGGHAVAVPEEDKGLRTRSEMIAQLVFAMGGRAAEELVFREPTTGAVSDIEKATKIARSMVTEFGMSSKLGAVRYGSEHGDPFLGRTMGTQADYSHEVARDIDDEVRKLIEAAHTEAWEILTEYRDVLDTLAGELLEKETLHRPELEGIFASVEKRPRLTMFDDFGGRIPSDKPPIKTPGELAIERGEPWPQPVPEPAFKAAIARASQAAEASHQAAQSDTDGPPGQGANGSHAGDRQRQHGPTQPDYGAPPGWHAPGWPPQQPPDYWYPPEQQPSQSPYWPQPAPSYPGQAPPPYPSYPPCPSYPPPGQSAPDAGKPPAQLDEGVSPSNPPAHG

SEQ ID NO: 18590 - protein, 790 aa, Mycobacterium leprae
MLLMNRKNVIRMVTAIAVVVLLGWSFFYFSDDTRGYKFVDTSVAMSQINGHNVKSAQIDDREQQLRLTLKKGNNDTDGSDKVITKYPTGYAVDLFNALSAKNTKVTTAVNEGSILGELLVYVLPLLLLVGLFVMFSRMQGGARMGFGFGKSRAKQLSKDMPKTTFADVAGVDEAVEELYEIKDFLQNPCRYQTLGAKIPKGVLLYGPPGTGKTLLARAVAGEAGVPFFTISGSDFVEMFVGVGASRVRDLFDQAKQNSPCIIFVDEIDAVGRQRGTGLGGGHDEREQTLNQLLVEMDGFGDRAGVILIAATNRPDILDPALLRPGRFDRQIPVSNPDLAGRRAVLRVHSKGKPIADDADLDGLAKRTVGMTGADLANVVNEAALLTARENGLVITGPALEEAVDRVIGGPRRKGRIISEQEKKITAYHEGGHTLAAWAMPDIEPIYKVTILARGRTGGHAVAVPEEDKGLRTRSEMIAQLVFAMGGRAAEELVFREPTTGAVSDIEKATKIARSMVTEFGMSSKLGAVRYGSEHGDPFLGRTMGTQADYSHEVARDIDDEVRKLIEAAHTEAWEILTEYRDVLDTLAGELLEKETLHRPELEGIFASVEKRPRLTMFDDFGGRIPSDKPPIKTPGELAIERGEPWPQPVPEPAFKAAIARASQAAEASHQAAQSDTDGPPGQGANGSHAGDRQRQHGPTQPDYGAPPGWHAPGWPPQQPPDYWYPPEQQPSQSPYWPQPAPSYPGQAPPPYPSYPPCPSYPPPGQSAPDAGKPPAQLDEGVSPSNPPAHG

SEQ ID NO: 18591 - protein, 609 aa, Mycobacterium leprae
MGESERSEAFNPPREAGMSSGDIAELEQLRREIVVLREQLEHAVGPHGSVRSVRDVHQLEARIDSLTARNSKLMDTLKEARQQLLALREEVDRLGQPPSGYGVLLAAHDDETVDVFTSGRKMRLTCSPNIEVASLRKGQTVRLNEALTVVEAGTFEAVGEVSTLREVLADGHRALVVGHADEERIVCLAEPLVAENLLDGVPGALNDDSRPRKLRPGDSLLVDPKAGYAFERVPKAEVEDLVLEEVPDVSYQDIGGLTRQIEQIRDAVELPFLHKELYREYALRPPKGVLLYGPPGCGKTLIAKAVANSLAKKMAEVRGDDAREAKSYFLNIKGPELLNKFVGETERHIRLIFQRAREKASEGTPVIVFFDEMDSIFRTRGTGVSSDVETTVVPQLLSEIDGVEGLENVIVIGASNREDMIDPAILRPGRLDVKIKIERPDAEAAQDIYSKYLTESLPVHADDLTEFDGDRAACIKAMIEKVVDRMYAEIDDNRFLEVTYANGDKEVMYFKDFNSGAMIQNVVDRAKKNAIKSVLETGQPGLRIQHLLDSIVDEFAENEDLPNTTNPDDWARISGKKGERIVYIRTLVTGKSSSASRAIDTESNLGQYL

SEQ ID NO: 18592 - protein, 645 aa, Xylella fastidiosa Temecula1
MRMNDLTKNVLLWVVVAVVLMVVFQSFSPRIGGVIGNEPITYTQFLNEVDSGRIKSVNYTDESGLTVNAIRFKRTDGSEGLVYGPRDDKLVDVLYSKNIEMTRQKPSTGPGFWSLVLNFLPVILIIGFWVFIMRQMQGGGAKGAMSFGKSRAKLQGDDQIKITFADVAGCDEAKEEVGELVDFLRDPTKFTKLGGKIPRGVLMVGPPGTGKTLLAKAIAGEAKVPFFSISGSDFVEMFVGVGASRVRDMFEQAKKHAPCIIFIDEIDAVGRHRGAGLGGGHDEREQTLNQLLVEMDGFEGGEGVIVIAATNRPDVLDPALLRPGRFDRQVVVALPDVKGREQILGVHMRKLLLANDVEPLVIARGTPGFSGADLANLCNEAALFAARSNEKEVRMNHFDAARDKILMGTERRSMAMSEEEKTLTAYHEAGHAIVGRLVPEHDPVYKVTIIPRGRALGVTMYLPEGDKYSINKVAIQSQLCSLYGGRVAEELIFGEDKVTTGASNDIERVTKMARNMVTKWGLSDELGPVAYGEEEDEVFLGRSVTQHKNVSDETARKIDEVVRSILDKAYARTKRILADNLDKLHAMSQLLLQYETIDAPQIDAIMEGRAPPPPVGWGKPSDNGSDDDMSKPRPLTTIVVPAEQV

SEQ ID NO: 18593 - protein, 447 aa, Giardia lamblia ATCC 50803
MGNAFSDSWGGMSSQASQQPGNQRGPPQGALRNRPRKTGAIHRMPAQNQVLFRIPTNMAPILPCYLKLLKQQRINALLAVENDFISNFSQSTFYKQVNKEQEQTIAKLRGTTQTIAVVQEIIDEEFLVVKKTEYSSIYTKALSFVDRELLQPNALVHLMEDAHRDIVVGVLSHDEDPNVTMMKVIERPKDTYADIGGQDEAIKELQETIQLPLTNPEYFVDLGIEPPRSCILHGPSGTGKSLLARACANETSACYMKMAGSELIQKYSGEGPRLVRELFKAAKANQPTIIFIDEVDAVGRKRYDADSGGAREIQRTMLELLNQLDGFDRTEGVKVIMATNLIESLDSALIRAGRIDRKIYVGLPDLTARRQIFKIHTRRMMLDKDIVEDEILNCKDDLSGADIKAITLEAGLLALRDRRIRVCMSDFRKARDKVLYKKIQEVGDLYT

SEQ ID NO: 18594 - protein, 659 aa, Streptococcus pyogenes MGAS8232
MKNNKNNGFVKNSFIYILMIIVVITGFQFYLKGTSTQSQQISYSKLIKHLKAGDIKSLSYQPSGSIIEVKGKYEKPQKVTVNSGLSFLGGRASTQVTEFSSLVLPSDTILKEMTAAADKNGTELTVKQESSSGTWITFLMSFLPIVIFAAFMMMMMNQGGGGARGAMSFGKNKAKSQSKGDVKVRFTDVAGAEEEKQELVEVVDFLKNPKKYKSLGARIPAGVLLEGPPGTGKTLLAKAVAGEAGVPFFSISGSDFVEMFVGVGASRVRSLFEDAKKAERAIIFIDEIDAVGRRRGAGMGGGNDEREQTLNQLLIEMDGFEGNENIIVIAATNRSDVLDPALLRPGRFDRKVLVGRPDVKGREAILRVHAKNKPLANDVNLKVVAQQTPGFVGADLENVLNEAALVAARRNKIKIDASDIDEAEDRVIAGPSKKDRTISQKEREMVAYHEAGHTIVGLVLSNARVVHKVTIVPRGRAGGYMIALPKEDQMLLSKEDLKEQLAGLMGGRVAEEIVFNAQTSGASNDFEQATQIARAMVTEYGMSEKLGPVQYEGNHAMMPGQISPEKAYSAQTAQMIDDEVRELLNQARNQAADIINENRDTHKLIAEALLKYETLDAAQIKSIYETGKMPVDLETDDNEAHALSYDEIKNKMTESESAE

SEQ ID NO: 18595 - protein, 647 aa, Yersinia pestis KIM
MSDMAKNLILWLVIAVVLMSVFQSFGPSESNGRRVDYSTFMSDVTQDQVREARINGREINVSKKDNSKYTTFIPVNDPKLLDTLLTKNVKVVGEPPEEQSLLASIFISWFPMLLLIGVWIFFMRQMQGGGGKGAMSFGKSKARMLTEDQIKTSFADVAGCDEAKEEVSELVDYLREPSRFQKLGGKIPKGVLMVGPPGTGKTLLAKAIAGEAKVPFFTISGSDFVEMFVGVGASRVRDMFEQAKKAAPCIIFIDEIDAVGRQRGAGLGGGHDEREQTLNQMLVEMDGFEGNEGIIVIAATNRPDVLDPALLRPGRFDRQVVVGLPDVRGREQILKVHMRRVPLDTDIDASVIARGTPGFSGADLANLVNEAALFAARGNKRVVSMVEFEKAKDKIMMGAERRSMVMTEAQKESTAYHEAGHAIIGRLVPEHDPVHKVTIIPRGRALGVTFFLPEGDAISASRQKLESQISTLYGGRLAEEIIYGPEKVSTGASNDIKVATSIARNMVTQWGFSEKLGPLLYAEEEGEIFLGRSVAKAKHMSDETARIIDQEVKLLVERNYQRARKLLLENMDVLHSMKDALMKYETIDAPQIDDLMNRKEVRPPAGWDNVTKNKSSDNDNTPTATMPADEPNTPTSGNTVSEQLGDK

SEQ ID NO: 18596 - protein, 410 aa, Methanothermobacter thermautotrophicus str. Delta H
MENNSQNVLKKIEDLKKEVRMLKEENSKTKRNLMWKIRKLEKDKLLIENERTRLDREVKSLRGEIERFRTPPLVIATVTEVLDDHRVAVKSTTGPHFVINYSRFIDRKQLEPGARVALNQQTFSIVDVLPSEKDPVVTGMEVEEKPDVSYEQIGGLEEQVREVKETVELPLKKPELFEKIGIEPPKGVLLYGPPGTGKTLLAKAVAHETNATFIKIVASEFVRKYIGEGARLVRGVFELAKEKSPSIIFIDEIDAVAAKRLKSSTSGDREVQRTLMQLLAELDGFESRGNVGIVAATNRPDILDPALLRPGRFDRFIEVPLPNEDGRREILKIHTSGMALAEEVDIELLARITDGASGADLKAICTEAGMFAIRDERDEVTMADFMDAVDKIMGVEKEEEYKQETGVMFG

SEQ ID NO: 18597 - protein, 648 aa, Xanthomonas campestris pv. campestris str. ATCC 33913
MRMNDLTKNLLLWVVVAVVLMVVFQSFSPRMAGGVGPDSITYTQFLKEVDSGRVKSVDYTDETNLAVNAIRFKRTDGSEATVYGPRDDKLVDVLYSKNIEMTRQKPSTGPGFWSLVLNFLPVILIIGFWLFIMRQMQGGGGGAKGAMSFGKSRAKLQGEDQVKVTFADVAGCDEAKEEVGELVDFLRDPTKFTKLGGKIPRGVLMVGPPGTGKTLLAKAIAGEAKVPFFSISGSDFVEMFVGVGASRVRDMFEQAKKHAPCIIFIDEIDAVGRHRGAGLGGGHDEREQTLNQLLVEMDGFEGGEGVIVIAATNRPDVLDPALLRPGRFDRQVVVGLPDVKGREQILRVHMRKLPLADDVVPLVIARGTPGFSGADLANLANEAALFAARGNEKEVRMDHFDRARDKILMGAERRSMAMSEDEKTLTAYHEAGHAIVGRLVPEHDPVYKVTIIPRGRALGVTMYLPEGDRYSMNRVAIESQLCSLYGGRVAEELIFGGDKVTTGASNDIERATKMARNMVTKWGLSDELGPVAYGEEEDEVFLGRSVTQHKNVSDETARKIDEVVRSILDKAYSKTKTILTENLDKLHAMSQLLLQYETIDVPQIDAIMEGRDPPPPAGWGKSDKDGGNNNDKGSPRPLPPIAGPAEQL

SEQ ID NO: 18598 - protein, 648 aa, Xanthomonas axonopodis pv. citri str. 306
MRMNDLTKNLLLWVVVAVVLMVVFQSFSPRMAGGVGADSITYTQFLKEVDSGRVKSVDYTDETNLAVNAIRFKRTDGSEATVYGPRDDKLVDVLYSKNIEMTRQKPSTGPGFWSLVLNFLPVILIIGFWLFIMRQMQGGGGGAKGAMSFGKSRAKLQGEDQIKITFADVAGCDEAKEEVGELVDFLRDPTKFTKLGGKIPRGVLMVGPPGTGKTLLAKAIAGEAKVPFFSISGSDFVEMFVGVGASRVRDMFEQAKKHAPCIIFIDEIDAVGRHRGAGLGGGHDEREQTLNQLLVEMDGFEGGEGVIVIAATNRPDVLDPALLRPGRFDRQVVVGLPDVKGREQILRVHMRKLPLADDVVPMVIARGTPGFSGADLANLCNEAALFAARGSEKEVRMDHFDRARDKILMGAERRSMAMSEDEKTLTAYHEAGHAIVGRLVPEHDPVYKVTIIPRGRALGVTMYLPEGDRYSMNRVAIESQLCSLYGGRVAEELIFGGDKVTTGASNDIERATKMARNMVTKWGLSDELGPVAYGEEEDEVFLGRSVTQHKNVSDETARKIDEVVRSILDKAYSKTKTILTENLDKLHAMSQLLLQYETIDVPQIDAIMEGREPPPPAGWGKSDKDGGNNNDKGSPRPLPPIAGPAEQL

SEQ ID NO: 18599 - protein, 626 aa, Caulobacter crescentus CB15
MNFRNLAIWLVIVAVLGGVFVVSQNSRTKSSSEISYSQLLKDVDAGKIKSAEIAGQTVLAKTADNKTLTVNAPMNSEELVNRMVAKNADVKFKSGSISFLAILVQLLPILLVVGVWLFLMRQMQGGAKGAMGFGKSKARLLTENKNRITFEDVAGVDEAKEELQEVVDFLKDPAKFQRLGGKIPKGALLVGPPGTGKTLIARAVAGEAGVPFFTISGSDFVEMFVGVGASRVRDMFEQAKKNAPCIIFIDEIDAVGRHRGAGLGGGNDEREQTLNQLLVEMDGFEANEGIILIAATNRPDVLDPALLRPGRFDRQVVVPNPDVAGREKIIRVHMKNVPLAADVDVKTLARGTPGFSGADLANLVNEAALMAARKNRRMVTMQDFEQAKDKVMMGAERRSMAMNEEEKKLTAYHEGGHAIVALNVPLADPVHKATIVPRGRALGMVMQLPEGDRYSMKYQQMTSRLAIMMGGRVAEEIIFGKENITSGASSDIKAATDLARNMVTRWGYSDILGTVAYGDNQDEVFLGHSVARTQNVSEETARLIDSEVKRLVQYGLDEARRILTDKIDDLHTLGKALLEYETLSGEEIADILKGIPPKREEEEAATAVIAPSLVPLSPGAGASVTA

SEQ ID NO: 18600 - protein, 645 aa, Campylobacter jejuni subsp. jejuni NCTC 11168
MNNNTQNNKGNPQGNNFFNKNPIFIFAIFAIIMIIIFKGFFDGNGSFGGALNGNEVNKNVPYSELKKLIESGQINQVSIGQTTIKAISSSHNTVYTAKKVNDPELVSLLDSKNIAYGAYSETNWFTDILFSWVLPVFIFFGIWMFLASRMQKNMGSSILGIGSSKKLVNSEKPKVKFSDVAGVEEAKEEVKEIVDFLKYPERYIKLGAKIPKGLLLVGPPGTGKTLLAKAVAGEADVPFFSVSGSSFIEMFVGVGASRVRDLFENAKKEAPAIVFIDEIDAIGKSRAASGMMGGNDEREQTLNQLLAEMDGFGTESSPVIVLAATNRPEVLDAALLRPGRFDRQVLVDKPDFKGRCDILKVHMKDVKISPKVKVEDIARLTAGLAGADLANIINEAALLAGRDSKKYVEQNDLVEAVERAIAGLEKKSRRINEKEKKIVTYHECGHALIAETTKGAKRVSKVSVIPRGLAALGYTLNTPEENKFLMQKHELIAEVDVLLGGRAAEEVFIGEISTGASNDLERATDIIKAMISMYGMSEIAGLMVLEKQRNTFLSGGQTIKDYSEKMAESLDDYVKKTLDERYKDVKDTLNTYKGAIETMVAALYEEETIEGNKVREIIKEFEDQNSLPTRLQELEEVKTEVKVEE

SEQ ID NO: 18601 - protein, 538 aa, Campylobacter jejuni subsp. jejuni NCTC 11168
MKNKKIILASFMVLCMLLGILYFKNEPKYIDENLYQSLLSQNLIQKAVIDKDEIWLKAEGENYVIIKDGIDIKTLLSKVPVEVKKDNTLWVFFVLLIFIIALFISLGYFARKKELAKYPISNKNQNHTQAQNSNINLESSHIKPVISNITFNDVAGVDEVKMELSELVDFLQNPKKYKEFGVKMPKGVLMVGPPGVGKTLIAKAVAGEAGVPFFYQSGSSFVEIYVGMGAKRVRELFSKAKMMAPSIVFIDEIDAVGKARGEMSNVERDSTLNQLLTQMDGFEDNSGVIVIAATNKIELMDPALLRSGRFDRRIFLSLPDFKDRLKILEIYMKDKNNNINLNKIAKASVGFSGAGLETLVNEAAINALRRNSALVEESDFYAVLNKVLLGKKKILSFNNEEKKIQATYQAAKALSAYYFDIGFEKITLIEDRFKEYEHNIRSKSELINRIKVYLAGSRAMRLIYNESYTNSQDDFLKIKELLDYMLSFDMLKESNLSEQKKEMDEFLNSMKDKILKLSELLLEKEKIEYDDVKDIMQV

SEQ ID NO: 18602 - protein, 601 aa, Clostridium perfringens str. 13
MKKLQSMITYIAIFAVVLMFAFAFYRNGTQGKVISYTEFKEAYVENKIETMTIKEDKMSVDGVFKDGKRFTSYVSNKMLDNLLQETQGVETVIKYTPPNNMGIWISFLPTILIIGVIFFGLFMFTQQAQNSGGNRGVMNFGKSKAKMANLDGKKVTFKDVAGADEEKGELEEIVDFLKQPKRYIEMGARIPKGVLLVGPPGTGKTLLAKAIAGEAGVPFFSISGSDFVEMFVGVGASRVRDLFEQAKKNAPCIIFIDEIDAVGRQRGAGLGGGHDEREQTLNQLLVEMDGFGVNEGIIMIAATNRPDILDPALLRPGRFDRRILVGAPDVKGREEVLKVHTRNKHLSEDVDLKVLAKMTPGFSGADLENLTNEAALLAVRGGKSSIDMADIEEAITRVIAGPEKKSRVVSEYDRRITAVHESGHAVVSNVLEYADPVHEISIIQRGMAAGYTMNLPEEDRTHTSKKQLKDKMVELLGGRVAEKLVIGDISAGAKNDIDRASHIARSMVMEYGMSDVIGPISFGNSDGGEVFLGRDIGKSSNISEETSAKIDEEIKKLIDEAYNRAESILRENISKLNAVTDVLLQKEKIDGDEFREIFKNS

SEQ ID NO: 18603 - protein, 812 aa, Corynebacterium efficiens YS-314
MRMKNKKFLQYGGIAAVVLITLFLFSLFTSDTRNFQEVDTSVAMEQLEANNVSEAQIDDREQRLRLTLREPIEVEEREGVEEIITQFPARTAPLIFDKVEASDAESYTTNVTQDNFLVSMLSFILPLLIVFGLLMFFLSRAQGGGMFGMGASKARQLTKDTPTNTFADVAGADEAVDELHEIKDFLEDPTRYQDLGAKIPRGVLLYGPPGTGKTLLARAVAGEAGVPFFSISGSDFVEMFVGVGASRVRDLFKQAKENSPCIIFIDEIDAVGRARGSGMGGGHDEREQTLNQLLVEMDGFGDRGSVILMAATNRPDVLDPALLRPGRFDRQIPVTAPDLKGREQILEIHAKGKPFAPDANLKALAKRTAGMSGADLGNVLNEAALLTARIGGNAITADALEEATDRVIGGPRRSSKIISEQEKKVTAYHEGGHTLSAWALSDIERVYKVTILARGRTGGHAMTVQEDDKGMYNRNELFARLVFAMGGRAAEELVFGAPTTGASADIEQATKIARAMVTEYGMSPTVGMVKYGEEQGDPFSGRGGGGTLTHSQEVAALIDTEVAYLLDKAHEVSYNILREYRDHLDRLAEKLLEKETLRRPDLEVLFSDIEPRSIDEVFPDENDRFPRQEDREPVKTPVEIAIERGEEPPKRFSIVEASKAARERRRKELEEQKGAGVSVPVGLSTGNAPTPDYGTPPPADWTVPGSGAKRPNPYAGTAAPSPEAEHPGMKAYGFGDKELMDQSTGEEHAPGNVSRKGTGPGDAPTQIIGFRLPDHERPDHDRPEGTVEERPGMMDEATEVDPGTENEGDKRG

SEQ ID NO: 18604 - protein, 853 aa, Corynebacterium glutamicum ATCC 13032
MKNKKYLQFGGIAAVILIVLFLVSLFSSDTRNFQEVDTSVAMAQLDAGNVAEAQIDDREQRVRLTLREPITVDEREGVEEILAQYPARTAPAIFEKVEASNTDSYTTNVTQESFLMSMLSFILPMVIIFGLLMFFLTRMQGGGMFGIGGSKAKQLTKDMPTNTFADVAGAEEAVDELHEIKDFLEDPTRYEALGAKIPRGVLLYGPPGTGKTLLARAVAGEAGVPFYSISGSDFVEMFVGVGASRVRDLFKQAKENSPCIIFVDEIDAVGRARGSGMGGGHDEREQTLNQLLVEMDGFGDRQGVILMAATNRPDVLDPALLRPGRFDRQIPVTNPDLRGREQILEVHAKGKPFAPDADIKALAKRTAGMSGADLANVLNEAALLTARVGGNVITADALEEATDRVVGGPRRSGKVISEKEKKVTAYHEGGHTLSAWALEDIERVYKVTILARGRTGGHAMTAQEDDKGMYNRNELFARLVFAMGGRSAEELVFGEPTTGASADIEMATKIARSMVTEYGMSPAVGMVKYGQEQGDPFSGRGGGGNLDHSQEVAATIDTEVQFLLDKAHEVSYSILAEYRDHLDRLAEKLLEKETLRRPDLEALFDDIVPRKVAEVFPDESTRFPRQENREPVKTPVELALERGEEPPKKFSILEASRATRERRRKELEAQGKLPVQPASSAGVAPAAGAAAGSYGTPPPADWSVPGSAGKHRSRAEEQPAEQGFPAQTPAQAPEQSPDSSGGRPNPYATPTASGEHPGMKAYGFGDSELMDQSTGAEHTPGNVSQESPTEMIGFRLPDHERSDYPEKAQKESVLDASETTEMPVVPDQPIDGDSGKSAEGTQENPENEGDNRG

SEQ ID NO: 18605 - protein, 860 aa, Corynebacterium glutamicum ATCC 13032
MSRLPLRMKNKKYLQFGGIAAVILIVLFLVSLFSSDTRNFQEVDTSVAMAQLDAGNVAEAQIDDREQRVRLTLREPITVDEREGVEEILAQYPARTAPAIFEKVEASNTDSYTTNVTQESFLMSMLSFILPMVIIFGLLMFFLTRMQGGGMFGIGGSKAKQLTKDMPTNTFADVAGAEEAVDELHEIKDFLEDPTRYEALGAKIPRGVLLYGPPGTGKTLLARAVAGEAGVPFYSISGSDFVEMFVGVGASRVRDLFKQAKENSPCIIFVDEIDAVGRARGSGMGGGHDEREQTLNQLLVEMDGFGDRQGVILMAATNRPDVLDPALLRPGRFDRQIPVTNPDLRGREQILEVHAKGKPFAPDADIKALAKRTAGMSGADLANVLNEAALLTARVGGNVITADALEEATDRVVGGPRRSGKVISEKEKKVTAYHEGGHTLSAWALEDIERVYKVTILARGRTGGHAMTAQEDDKGMYNRNELFARLVFAMGGRSAEELVFGEPTTGASADIEMATKIARSMVTEYGMSPAVGMVKYGQEQGDPFSGRGGGGNLDHSQEVAATIDTEVQFLLDKAHEVSYSILAEYRDHLDRLAEKLLEKETLRRPDLEALFDDIVPRKVAEVFPDESTRFPRQENREPVKTPVELALERGEEPPKKFSILEASRATRERRRKELEAQGKLPVQPASSAGVAPAAGAAAGSYGTPPPADWSVPGSAGKHRSRAEEQPAEQGFPAQTPAQAPEQSPDSSGGRPNPYATPTASGEHPGMKAYGFGDSELMDQSTGAEHTPGNVSQESPTEMIGFRLPDHERSDYPEKAQKESVLDASETTEMPVVPDQPIDGDSGKSAEGTQENPENEGDNRG

SEQ ID NO: 18606 - protein, 613 aa, Buchnera aphidicola str. Sg (Schizaphis graminum)
MVKNLIFWLVITVVLMSVFQNFNSSDTSNHRVDYSTFLSEVNQDQVREAYINGRIISVTKKDSSKYITYIPINDPKLLDNLLTKNVKIVGEIPEEPSLLISIFISWFPMLLLIGVWIFFMRQMQMGGGKGAMSFGKSKARMLSEDQIQTTFADVAGCDEAKEEVSELVEYLKEPSRFQKLGGKIPKGILMVGPPGTGKTLLAKAIAGEAKVPFFTISGSDFVEMFVGVGASRVRDMFEHARKSAPCIIFIDEIDAVGRQRGAGLGGGHDEREQTLNQMLVEMDGFDGNEGVILIAATNRPDVLDPALLRPGRFDRQVIVALPDVRGRKQILKVHMRKVPLSEDVDPMIIARGTPGFSGADLANLVNEAALFAARFNNRVVSMIHFEKAKDKIMMGSERRSMVMSDFQKESTAYHEAGHVIIGRLVPDHDPAHKVTIIPRGQALGITFFLPESDILSISRQKLESQISTLYGGRLAEEIIYGSQNVSTGAFNDIKVATNLARNMVTQWGFSDKLGPLLYAEEEGEVFLGRSVAKAKHMSDETARIIDEEVKLLIEVNYNRARKILNENLDILHAMKDALIKYETIDSLQIDDLMERREVRKPKGWLEVDQKKDI

SEQ ID NO: 18607 - protein, 682 aa, Thermobifida fusca
MNLKRLYRGPWLWFIAILLMLLVTSQFMGWGSGPEHVKTDTSKVFTLIEQDQVRDAKIIDKDQRIELTTVDGKLYEAYWVDGQGAELAEALRANQGGNLEAYDVEVPGDNIWLSLLFSFLPLLLVIAVFFFIMNQMQGGGSRVMNFGKSRAKLISKDTPKTTFADVAGADEAIEELKEIKDFLQNPGKFQSLGAKIPKGVLLYGPPGTGKTLLARAVAGEAGVPFYSISGSDFVEMFVGVGASRVRDLFEQAKANAPAIIFIDEIDAVGRHRGAGMGGGHDEREQTLNQLLVEMDGFDSRGGVILIAATNRPDILDPALLRPGRFDRQIVVDRPDLEGRKGILRVHAQGKPLGPDVDLDVIARRTPGFTGADLANVINEGALLTARRGKQQIDMATLEEAIDRVIAGPERKSRVMSEAEKKIIAYHEGGHALVGHALPNADPVHKVTILPRGRALGYTMSLPTEDKFLTSRSEMMDQLAMMLGGRAAEELVFHEPTTGAANDIEKATNLARSMVTEYGMSERLGARKFGNSNTEPFLGREMAHSREYSEEIAALIDEEVRRLIEAAHDEAWEILVEYRDVLDELVLQLLDKETLSKEEVLEIFAPVRKRPSRGSYKGYGKRIPSDKPPVLTPKELALMGPKDVEDLVGGSNGQANTAGELSWEQKHDRKAGPGDANPGADRD

SEQ ID NO: 18608 - protein, 638 aa, Microbulbifer degradans 2-40
MAKNLVLWLVIATVLFMVFKNFNEPAVQQEMAYSDFVTEVRAGNVREVVFEGNIIRGVGYNNQPFRVVMLPTIDLDLRSELVENGVAFKAEKKEEAGFFENLLLATVPVLLFIAVFIFFMRQMQGGSGGRGGPMSFAKSKARLLGEDQVKTTFADVAGVDEAKEEVSELVEYLRDPSKFQRLGGRIPRGVLMSGPPGTGKTLLAKAIAGEAKVPFFSISGSDFVEMFVGVGASRVRDMFEQAKKQAPCIIFIDEIDAVGRHRGGGGHGGGHDEREQTLNQLLVEMDGFEGNEGVIVIAATNRSDVLDKALLRPGRFDRQVNVGLPDVRGREQILKVHMRKVPISDAVKASIIARGTPGFSGADLANLVNEAALLAARGNKRLVTEEEFENARDKILMGTERRTLVMTEQEKESTAYHEAGHAIVGYLSPEHDPIHKVTIIPRGRALGVTHFLPEGDRISESKRKMMGDIACAYGGRIAEEMIYGADGVSTGAYGDIRGATAIARAMVVNYGLSDTLGPLDYDARDSDGIGSKKISGHTARLIDEEVKNITDACYKRAEQILEENRDILEAMKDALMEYETLDSDQVSDLMARRKIRPPKSWSDDLTDGGASAGETDSGSTAEKTKASDSSLGGPASEH

SEQ ID NO: 18609 - protein, 697 aa, Bifidobacterium longum DJO10A
MSFPQGPGNGNNPNPNNNRNNGNPFTNPFNRGNNGNNGKGNNNENRPIWQSPWLWGAVLVVMVVLMFQMFAGGGTKTIDTKDGFALINQGKATYAEITDNKQVVRLKLKNDYTKKNADTGKVTNYGKNVQFYYTFAQGAQVAKAVENGNLEKGWTSNIEQTSMLSYLVTSILPFIIFFALFWWLMSRMGGAGGMLGMGGRKNSGKLLEGQTPTTKFADVAGEDEAVAEVEEIKDFLKDPSKYKALGARIPRGVLLYGPPGTGKTLLARAIAGEAGVPFYSMAGSDFVEMFVGLGASRVRDLFDEAKKNAPAIIFIDEIDAVGRKRGSGMGGGHDEREQTLNQLLVEMDGFDNDTNLIIIAATNRPDVLDPALLRPGRFDRQVGVAAPDLEGREAILRVHAKGKPFVPDVDLHMVAVRTPGFTGADLANVLNEAALLCARAGAQLIDNRAIDEAIDRVQAGPKRKSKGMALEELRNTAYHEGGHALVAAALNNTDPVTKVTILPRGRALGYTAVMPTSDRYSQSRNQLLDQMAYAMGGRTAEEIVFHDPTTGASNDIEKATNIARTMVIEYGFSDKLGAIKWGSDDDQTTVMDGLQPRKYSDRTAEVIDDEVLKLVETAHTEAWTIINDNREILDELVRQLLVKETLNEKELAAIFAPIKKAPVRPVWLSNDRRPDSDKPPVEIPESLKRSVGMKPEE

SEQ ID NO: 18610 - protein, 521 aa, Bifidobacterium longum DJO10A
MSDTEDLAALNDRLMAKNHALAEALSRAGKELTKAKSQLAQLAQPPLTFATMVKVDSTRTDEDGIQHASAEVISGTRRMVVPVASNVNAARLTAGATVMLNEKLVLVEQRDADTVGQIRSVKQVLDDGRLIVTDASGNPVLIRRSGALAYAGINQGDRIIIDPSVRLAIEALPAEGDKDLVLEETPDVTFADIGGLDSEIGRIRDAVQLPFQHRALFERYDLKPPKGVLLYGPPGNGKTMIAKAVANALCEGGYDSNGDGAISPAETHVKGVFLSVKGPELLNKYVGESERLIRLIFQRARERAADGNPVVVFIDEMDSLLRTRGSGVSSDVETTIVPQFLSELDGVESLDNVMVIGASNRVDMIDPAVLRPGRLDVKIRVGRPKTNQAIAIVDHYLTDDLPLEDGVDAHALSAVLVHDIYGTSERRHLCDVQEENGQWHALFLADVVSGAMLKNIVDRAKTRAVKESIETGLDVALTVPLLAAAVEDEYRETRDSMADVDPEQWSRINGMDPIRRIRTAE

SEQ ID NO: 18611 - protein, 609 aa, Haemophilus somnus 129PT
MVKNIVLWIVVAVVMMTAYQSFSGNSSNNAIDYTTFISDVENNQVSATKFNEVGEIFVTKKDGSKYTTVLPTPLEDRKLLDDLIKSKVKIDGALPEQRGFLSQILISWFPMILLIGVWFFFMRQMQGGGGKAMSFGKSRAKMLTKEQIKTTFADVAGCDEAKEEVGEIVDFLRDPSKFQKLGGKIPKGILMVGPPGTGKTLLAKAIAGEAQVPFFTISGSDFVEMFVGVGASRVRDMFEQAKKNAPCLIFIDEIDAVGRQRGAGLGGGHDEREQTLNQMLVEMDGFEGNEGVIVIAATNRPDVLDPALTRPGRFDRQVVVGLPDVRGREHILKVHMRKVPVADDVDAMTLARGTPGYSGADLANLVNEAALFAARTNKKLVTMLEFEKAKDKINMGPERRSMIMTDKVKESTAYHEAGHAIVGYLVPEHDPVHKVTIIPRGRALGVTFFLPEGDQVSISQKQLESKLSTLYAGRLAEELIYGEENISTGASNDIKVATNIARNMVTQWGFSDKLGPILYSEDEGEVFLGRSMAKAKHMSDETAHTIDEEVRSIVNRNYQRARQILTDNMDILHAMKDALVKYETIEEEQIKQLMNREPVVAPPGWTNNE

SEQ ID NO: 18612 - protein, 634 aa, Pseudomonas syringae pv. syringae B728a
MAKNLILWLIIAAVLVTVMNNFSSPNEPQNLNYSEFIQQVKDGKVEKVSVDGYVITGKRSDGDTFKTIRPNIPDNGLIGDLVSNNVVIEGKQPEQQSIWTQLLVASFPILVIIAVFMFFMRQMQGGAGGKGGPMSFGKSKARLLSEDQVKTTLADVAGCDEAKEEVGELVEFLRDPGKFQRLGGRIPRGVLMVGPPGTGKTLIAKAIAGEAKVPFFTISGSDFVEMFVGVGASRVRDMFEQAKKHAPCIIFIDEIDAVGRHRGAGMGGGHDEREQTLNQLLVEMDGFEMNDGIIVIAATNRPDVLDPALLRPGRFDRQVVVGLPDIRGREQILKVHMRKVPMGEDVNPGVIARGTPGFSGADLANLVNEASLFAARSGKRVVEMKEFELAKDKIMMGAERKSMVMSDKEKRNTAYHEAGHAIVGRLVPEHDPVYKVSIIPRGRALGVTMFLPEEDRYSLSKRALISQICSLYGGRIAEEMTLGFDGVTTGASNDIMRASQIARNMVTKWGLSEKLGPLMYSEDEDAGYLGRGGSQNSSVSGDTAKLIDSEVRSIIDHCYGTAKQLLTDNRDKLEAMADALMKYETIDADQIDDIMTGRTPREPRDWGGGSGTNGTPITPDPRPETPIGGPAAEH

SEQ ID NO: 18613 - protein, 635 aa, Pseudomonas fluorescens PfO-1
MAKNLILWLIIAAVLVTVMNNFSSPNEPQTLNYSDFIQQVKDGKVERVAVDGYVITGKRNDGDSFKTIRPAIQDNGLIGDLVDNHVVVEGKQPEQQSIWTQLLVASFPILVIIAVFMFFMRQMQGGAGGKGGPMSFGKSKARLLSEDQVKTTLADVAGCDEAKEEVGELVEFLRDPGKFQRLGGRIPRGVLMVGPPGTGKTLLAKAIAGEAKVPFFTISGSDFVEMFVGVGASRVRDMFEQAKKHAPCIIFIDEIDAVGRHRGAGMGGGHDEREQTLNQLLVEMDGFEMNDGIIVIAATNRPDVLDPALLRPGRFDRQVVVGLPDIRGREQILKVHMRKVPMGDDVAPAVIARGTPGFSGADLANLVNEASLFAARAGKRIVEMKEFELAKDKIMMGAERKSMVMSEKEKQNTAYHEAGHAIVGRVVPEHDPVYKVSIIPRGRALGVTMFLPEEDRYSLSKRALISQICSLYGGRIAEEMTLGFDGVTTGASNDIMRASQIARNMVTKWGLSEKLGPLMYAEEEGEVFLGRGGGGQNASFSGETAKLIDSEVRSIIDQCYGTAKQILTDNRDKLDAMADALMKYETIDAEQIDDIMAGRTPREPRDWSGGTGTGTPPVIQGERPETPIGGPAADV

SEQ ID NO: 18614 - protein, 696 aa, Bifidobacterium longum NCC2705
MSFPQGPGNGNNPNPDNNRNNGNPFTNPFNRGNNGNNGKGNKENRPIWQSPWLWGAVLVVMVVLMFQMFAGGGTKTIDTKDGFALINQGKATYAEITDNKQVVRLELKNDYTKKNADTGKVTNYGKNVQFYYTFAQGAQVAKAVENGDLEKGWTSNIEQTSVMSYLITSILPFVIILALFWWLMSRMGGAGGMLGMGGKKNSGKLLDGQTPTTKFADVAGEDEAVAEVEEIKDFLKDPSKYKALGARIPRGVLLYGPPGTGKTLLARAIAGEAGVPFYSMAGSDFVEMFVGLGASRVRDLFDEAKKNAPAIIFIDEIDAVGRKRGSGMGGGHDEREQTLNQLLVEMDGFDNDTNLIIIAATNRPDVLDPALLRPGRFDRQVGVAAPDLEGREAILRVHAKGKPFVPDVDLHMVAVRTPGFTGADLANVLNEAALLCARAGAQLIDNRAIDEAIDRVQAGPKRKSKGMALEELRNTAYHEGGHALVAAALNNTDPVTKVTILPRGRALGYTAVMPTSDRYSQSRNQLLDQMAYAMGGRTAEEIVFHDPTTGASNDIEKATSIARTMVIEYGFSDKLGAIKWGSDDDQTTVMDGLQPRKYSDRTAEVIDDEVLKLVETAHTEAWTIINDNRDILDELVRQLLVKETLNEKELAEIFAPIKKAPVRPVWLSNDRRPDSDKPPVEIPESLKRSVGMKPEE

SEQ ID NO: 18615 - protein, 521 aa, Bifidobacterium longum NCC2705
MSDTEDLAALNDRLMAKNHALAEALSRAGKELTKAKSQLAQLAQPPLTFATMVKVDSTRTDEDGIQHASAEVISGTRRMVVPVASNVNAARLTAGATVMLNEKLVLVEQRDADTVGQIRSVKQVLDDGRLIVTDASGNPVLIRRSGALAYAGINQGDRIIVDPSVRLAIEALPAEGDKDLVLEETPDVTFADIGGLDSEIGRIRDAVQLPFQHRALFERYDLKPPKGVLLYGPPGNGKTMIAKAVANALCEGGYDTNGDGSISPAETHVKGVFLSVKGPELLNKYVGESERLIRLIFQRARERAADGNPVVVFIDEMDSLLRTRGSGVSSDVETTIVPQFLSELDGVESLDNVMVIGASNRVDMIDPAVLRPGRLDVKIRVGRPKTNQAIAIVDHYLTDDLPLEDGVDAHALSAVLVHDIYGTSERRHLCDVQEENGQWHALFLADVVSGAMLKNIVDRAKTRAVKESIETGLDVALTVPLLAAAVEDEYRETRDSMADVDPEQWSRINGMDPIRRIRTAE

SEQ ID NO: 18616 - protein, 725 aa, Desulfovibrio desulfuricans G20
  unsure (1)..(725): unsure at all Xaa locations
MQVVQLSEKPEKACCRHCQTVRTTLNFLARKQYPSCTEWRLLALNQFSRNLVLWAVISLLMVVLFNLFSQPPGPQAQMSYTEFLNKVTQGEVVQVTIQGEKLKGQTAEGQSFQTIAPNDPDLVNRLLEKGVQVKAEPKEEAPWYMTLLVSWFPMLLLIGVWIFFMRQMQGGGGKAMSFGRSRARMISHESAKVTFDDVAGVDEAKEELTEVVDFLSNPKKFTRLGGRIPKGVLLVGPPGTGKTLLARAVAGEAGVPFFSISGSDFVEMFVGVGASRVRDLFVQGXXXXXXXXXXXXXXXXXKKNAPCLIFIDEIDAVGRQRGAGLGGGHDEREQTLNQLLVEMDGFESNEGVILIAATNRPDVLDPALLRPGRFDRQVVVPTPDLRGRKRILEVHSKRTPLARDVDMEMLAKGTPGFSGADLENLVNEAALQAAKMNKDQVNMLDFETAKDKLLMGKERRSLVMSDKEKRVTAYHEGGHALTARLLPGTDPVHKVSIIPRGRALGVTMQLPDEDRHGYSRTYLLNNLVVLLGGRLAEEVVFGEITTGAGNDIERATKMARKMVCEWGMSDAIGPMNIGEQGEEVFIGREWAHSRNYSEETARMVDAEVKRIIDEAREKARTLLQENLDTLHRIAEALLERETINADDLERLIEGRPLLPVPEITATHPEGDAENAGPEDSVAAAPAEHAGDEFLLESDEAARPAAKDGEDAPDGQEEDTTDRREK

SEQ ID NO: 18617 - protein, 627 aa, Desulfovibrio desulfuricans G20
MEKKDQWNIGYWIVAGLLLLTLQNYWQAAKTVEPVPYSEFEKALAEGRVAEVLVSDRTVTGRLKSPDSRGKTTIVATRVEPDLAERLSKYDVPYARVVESTWLRDVLSWILPAVAFFGVWFFLFRRFAEKQGMGGFLSIGKSRAKVFMEKNTGVTFADVAGVDEAKADLVEIVDFLKNPQEYGRLGARIPKGVLLAGPPGTGKTLLAKAVAGEAAVPFFSISGSEFVEMFVGVGAARVRDLFEQARVQAPAIIFIDELDALGRARGVGGPIGGHDEREQTLNQLLTEMDGFDSSVGLIILAATNRPEILDQALLRAGRFDRQVLVDRPDKKGRLDILKVHVKKITLAHGVDLEQVAALTTGFSGADLANLVNEAALNATRRKAQAVELQDFTAAIERIVAGLERKNRVLNPKERETVAYHEMGHALVALALPGTDPVHKISIVPRGIGALGYTLQRPTEDRFLMTRADLEHKIAVLLGGRAAEKLVFGELSTGASDDLARATDIARDMITRFGMDEGLGYVAFEAQRPRFLDAPELVQGGCRVAESTQTRIDQAIRDIVMGVFDRAYRILEINREVLERCARELLARETLDEYSIRQLTQGLQLESPCHSGPTAGAITSSVSKGAAS

SEQ ID NO: 18618 - protein, 658 aa, Streptococcus agalactiae 2603V/R
MKNNKNNGFLKNSFIYILLIIAVITTFQYYLKGTSSQNQQISYTKLVKQLKAGEIKSISYQPSGGVVEVSGTYKKAKTIKSANSFTFLGGSVATKVTGFNSVILPNDSSIKSLVSAAEENNTNIQVKHESSSGTWISYIASFLPLVIMIGFFMMMMNQGGGGGARGAMSFGKNKARSSSKDEVKVRFSDVAGAEEEKQELIEVVDFLKDPKRYKSLGARIPAGVLLEGPPGTGKTLLAKAVAGEAGVPFFSISGSDFVEMFVGVGASRVRSLFEDAKKAERAIIFIDEIDAVGRRRGAGMGGGNDEREQTLNQLLIEMDGFEGNESIIVIAATNRSDVLDPALLRPGRFDRKVLVGQPDVKGREAILRVHAKNKPLADNVDLKVVAQQTPGFVGADLENVLNEAALVAARRNKKVIDASDIDEAEDRVIAGPSKKDRTISERERAMVAYHEAGHTIVGLILSNARVVHKVTIVPRGRAGGYMIALPKEDQMLLSKDDMKEQLAGLMGGRVAEEIIFNAQTTGASNDFEQATAMARAMVTEYGMSEKLGPVQYEGNHAMMAGQMSPEKSYSAQTAQLIDDEVRHLLNEARNKAADIINENRDTHKLIAEALLKYETLDAAQIKSIFETGKMPETENDEDKARALSYDEIKEKMQEEDKK

SEQ ID NO: 18619 - protein, 639 aa, Pseudomonas aeruginosa PAO1
MAKNLILWLIIAAVLVTVMNNFSSPSEPQTLNYSDFIQQVKDGKVERVTVDGYVITGKRSDGDTFKTIRPAIQDNGLIGDLVNNNVVVEGKQPEQQSIWTQLLVASFPILVIIAVFMFFMRQMQGGGGGRGGPMSFGKSKARLLSEDQVKTTFADVAGCDEAKEEVSELVEFLRDPGKFQRLGGRIPRGVLMVGPPGTGKTLLAKAIAGEAKVPFFTISGSDFVEMFVGVGASRVRDMFDQAKKHAPCIIFIDEIDAVGRHRGAGLGGGHDEREQTLNQLLVEMDGFEMNDGIIVIAATNRPDVLDPALLRPGRFDRQVVVGLPDIRGREQILKVHMRKVPLGDHVDPAVIARGTPGFSGADLANLVNEASLFAARSNKRIVDMREFELAKDKIMMGAERKTMVMSEKEKRNTAYHEAGHAIVGRLVPEHDPVYKVSIIPRGRALGVTMFLPEEDRYSLSKRALESQICSLFGGRIAEEMTLGFEGVTTGASNDIMRATQLARNMVTKWGLSEKLGPLMYAEEEGEVFLGRSAGSQHANVSGETAKMIDQEVRRIIDDCYGTAKRLLDENRDKLEMMADALMKYETIDSDQIDDIMAGRVPREPRDWQGGSGTGTPPANLEESGRRENTPPIGGPAGEH

SEQ ID NO: 18620 - protein, 702 aa, Mycoplasma genitalium
MKKRNKGLVEQTTTEKNNFSRKTAWKVFWWVIILAVVIGVLAYIFSPRAATAVVESWKLNGGSNSTLTAKVSGFSNELTFKQINGSTYVTDTILQVSITFDGLNSPLTVTAHKTVNSNGNVIFNIANLSINQSNGQITVNSNGTMMNGGSSNNTKSIAGFETLGTFIAPDTRARDVLNGLFGLLPIIIFVVFFLLFWRSARGISAGGREEDNIFSIGKTQAKLAKSTVKFTNIAGLQEEKHELLEIVDYLKNPLKYAQMGARSPRGVILYGPPGTGKTLLAKAVAGEAGVPFFQSTGSGFEDMLVGVGAKRVRDLFNKAKKAAPCIIFIDEIDSVGSKRGRVELSSYSVVEQTLNQLLAEMDGFTSRTGVVVMAATNRLDVLDDALLRPGRFDRHIQINLPDIKEREGILKVHAENKNLSSKISLLDVAKRTPGFSGAQLENVINEATLLAVRDNRTTININDIDEAIDRVIAGPAKKSRVISDEDRKLVAYHEAGHALVGLHVHSNDEVQKITIIPRGQAGGYTLSTPKSGDLNLKRKSDLLAMIATAMGGRAAEEEIYGNLEITTGASSDFYKATNIARAMVTQLGMSKLGQVQYVPSQGTLPSNVKLYSEQTAKDIDNEINFIIEEQYKKAKTIIKSNRKELELLVEALLIAETILKSDIDFIHKNTKLPPEILLQKQEQQAKQKLNKSEVKPESETNS

SEQ ID NO: 18621 - protein, 632 aa, Helicobacter pylori
MKPTNEPKKPFFQSPIILAVLGGILLIFFLRSFNSDGSFSDNFLASSTKNVSYHEIKQLISNNEVENVSIGQTLIKASHKEGNNRVIYIAKRVPDLTLVPLLDEKKINYSGFSESNFFTDMLGWLMPILVILGLWMFMANRMQKNMGGGIFGMGSAKKLINAEKPNVRFNDMAGNEEAKEEVVEIVDFLKYPERYANLGAKIPKGVLLVGPPGTGKTLLAKAVAGEAHVPFFSMGGSSFIEMFVGLGASRVRDLFETAKKQAPSIIFIDEIDAIGKSRAAGGVVSGNDEREQTLNQFLAEMDGFGSENAPVIVLAATNRPEILDPALMRPGRFDRQVLVDKPDFNGRVEILKVHIKGVKLANDVNLQEVAKLTAGLAGADLANIINEAALLAGRNNQKEVKLQHLKEAVERGIAGLEKKSRRISPKEKKMVAYHESGHAVISEMTKGSGRVNKVYIIPRGMAALGYTLNTPEENKYLMQKHELIAEIDVLLGGRAAEDFFLEEISTGASNDLERATDIIKGMVSYYGMSSVSGLMVLEKQRNAFLGGGYGSSREFSEKTAEEMDLFIKNLLEERYKHVKQTLSDYREAIEIMVKELFDKEVITGERVREIISEYEVANNLESRLIPLEEQAS

SEQ ID NO: 18622 - protein, 632 aa, Helicobacter pylori
MKPTNEPKKPFFQSPIILAVLGGILLIFFLRSFNSDGSFSDNFLASSTKNVSYHEIKQLISNNEVENVSIGQTLIKASHKEGNNRVIYIAKRVPDLTLVPLLDEKKINYSGFSESNFFTDMLGWLMPILVILGLWMFMANRMQKNMGGGIFGMGSAKKLINAEKPNVRFNDMAGNEEAKEEVVEIVDFLKYPERYANLGAKIPKGVLLVGPPGTGKTLLAKAVAGEAHVPFFSMGGSSFIEMFVGLGASRVRDLFETAKKQAPSIIFIDEIDAIPKSRAAGGMISGNDEREQTLNQLLAEMDGFGSENAPVIVLAATNRPEILDPALMRPGRFDRQVLVDKPDFNGRVEILKVDIKGVKLANDVNFEEVAKLTAGLAGADLANIINEAALLAGRNNQKEVKQQHLKEAVERGIAGLEKKSRRISPKEKKIVAYHESGHAVISEMTKGSARVNKVSIIPRGMAALGYTLNTPEENKYLMQKHELIAEIDVLLGGRAAEDVFLEEISTGASNDLERATDIIKGMVSYYGMSSVSGLMVLEKQRNAFLGGGYGSSREFSEKTAEEMDLFIKNLLEERYEHVKQTLSDYREAIEIMVKELFDKEVITGERVREIISEYEAANNLESRLIPLEEQAS

SEQ ID NO: 18623 - protein, 656 aa, Streptococcus mutans UA159
MKNNRNNGFVRNSLVYIILILAIVTGFQYFFRGTGSQSEKISYTTLVKRVKSGDIKSITYQPSGSIVQVTGDYTKSREIKTNSDLAFFNGTTTKVKKFTSIVLPNSTSIEKIEKLAEDKGTKISVKQESSSGAWISFLMSFLPIFIMIFFFTMMLNQSGGGARGAMSFGKNKARSSSKSDVKVRFSDVAGAEEEKQELIEVVDFLKDPKRYNALGARIPAGVLLEGPPGTGKTLLAKAVAGEAGVPFFSISGSDFVEMFVGVGASRVRSLFEDAKKAERAIIFIDEIDAVGRRRGAGMGGGNDEREQTLNQLLIEMDGFEGNENIIVIAATNRSDVLDPALLRPGRFDRKVLVGQPDVKGREAILRVHAKNKPLASDVNLKVVAQQTPGFVGADLENVLNEAALVAARRSKKIIDASDIDEAEDRVIAGPSKKDKTVSEHERQMIAYHEAGHTIVGLVLSNARVVHKVTIVPRGRAGGYMIALPKEDQNLLSKSDLKEQLAGLMGGRVAEEIIFNAQTTGASNDFEQATQLARSMVTEYGMSEKLGPVQYEGNHSMMPGQFASEKTYSAQTALLIDEEVRELLNEARNKAAGIINDNRETHKLIAEALLKYETLDAAQIKSIYETGKMPEKSEDSKDAHALSYDEIKEKMSEDNTD

SEQ ID NO: 18624 - protein, 709 aa, Mycoplasma pneumoniae
MKKNKGLNEATTSEKPQFPKRTAWKIFWWVVILAIIIGILVYILMPRATTAVIEKWELSGTTLSAQIKGLSGKHTFQRINNSTYVTDDILQVSISFQGINPIVVTAHKATNGSGETIFNIANLSINQSTGKAIVNGMMTQDQKSNNGTELASIKGLHDIGTFVAPDTRARDVLNIFFGLLPIIIFVIFFLLFWRSARGISGGGRSEEDNIFSIGKTQAKLAKSSVRFDNIAGLQEEKHELLEIVDYLKNPLKYAQMGARSPRGVILYGPPGTGKTLLAKAVAGEAGVPFFQSTGSGFEDMLVGVGAKRVRDLFNKAKKAAPCIIFIDEIDSVGSKRGRVELSSYSVVEQTLNQLLAEMDGFTSRTGVVVMAATNRLDVLDDALLRPGRFDRHIQINLPDIKEREGILQVHAKNKNLSSKISLLDVAKRTPGFSGAQLENVINEATLLAVRDNRTTINMNDIDEAIDRVIAGPAKKSRVVSDADRKLVAYHEAGHALVGLHVHSNDEVQKITIIPRGQAGGYTLSTPKSGDLNLKRKSDLLAMIATAMGGRAAEEEIYGPLEITTGASSDFYKATNIARAMVTQLGMSKLGQVQYVPSQGTVPPGTKLFSEQTAKDIDFEINAIIEEQYKKARTIIKTNRKELELLVEALLIAETILKSDIDYIHEHTKLPPEILAQKQEQQAKQKAEAKEAKLNKKTEKDTEKDSETNS

SEQ ID NO: 18625 - protein, 725 aa, Mycoplasma pulmonis
MDKMKKPKINWLLIVIVGIIAALLITVLVLLFSPKTQPKSFDYLLKHFEEAAKSTTDDIYFETIKINSLDNTIGVIFRNGAMREEYFVAASAAQANFLTSGNVEVREILQLANVQAYIQSIKTLNGTISWFTFMNKFLAQHPGYDASKAGLFGQHIVQENGFITFIKAIWFPALIAIIIFLGYKAQSRAASGGIFNPGKNQAVIVKTDKKFTDIAGNKEPIEEVQELVDYLKNPKKYAAAGARFPKGILLGGPPGTGKTLLAKATAGEANVPFFFISASSFVELYVGLGAKRVREMFKEARKLAPAIIFIDELDAVGRSRGSGIGGGNDEREQTLNQILVEMDGINENAGILIMGATNRTDVLDPALLRPGRFDRIITVGLPDIKEREEILKLHSKGKRLSKEIKFDKIAKRTPGYSGAQLENVINEASLLSVREKTDVIISTQIDEAIDRVMAGPAKKSRVISQEELKAVAYHEAGHAVVGLKVKGGNKVQKITIIPRGNAGGYNLMTPEEEKYNASKKELLATIASYMGGRAAEMIIYGKENISTGASDDISRATKIARKMVTEWGMSALGPIKYEEDTENPFLGRDYSKGTFGSKMAHEIDLEIRKIISASEEIAIKAIEQNLELLELIKDSLLENETIVAEEIEYIEKNMKLPPNNEKIKPDGESKKVNIEDLINQVNESQEKDKQKNAQIKEDLSKMDKKDNLTKAKDKGEEETLAEKAE

SEQ ID NO: 18626 - protein, 649 aa, Shewanella oneidensis MR-1
MAKNLILWVVIAVVLMSVFQGYSPSSSSSQKMDYSTFLDNVRDGQVATVEVKSDQRTIEGSKRTGEKFTTIMPLYDQDLINDLDRKGITMKGQEAEESGFLTQIFISWFPMLLLIGVWIFFMRQMQGGGGKGAMSFGKSKAKLMSEDQIKTTFADVAGCDEAKEEVKELVDYLRDPTKFQKLGGRIPTGVLMVGPPGTGKTLLAKAIAGESKVPFFTISGSDFVEMFVGVGASRVRDMFEQAKKSAPCIIFIDEIDAVGRQRGAGLGGGHDEREQTLNQMLVEMDGFEGNEGIIVIAATNRPDVLDSALLRPGRFDRQVVVGLPDVRGREQILKVHMRKVPLSEDVKASVIARGTPGFSGADLANLVNEAALFAARGNRRVVGMEEFERAKDKIMMGAERRSMVMSEAEKEMTAYHEAGHAIVGCLVPEHDPVHKVTIIPRGRALGVTFFLPEADAISQSRRKLESQISVAYGGRLAEELIYGTEKVSTGASQDIKYATSIARNMVTQWGFSDKLGPLLYAEEEGEVFLGRSMGKAKAMSDETATLIDTEVKAFIDKNYSRAKQILQDNVDILHSMKDALMKYETIDSLQIDDLMNRREVRQPADWQADENGSNDKGNGKGEPAVKVDEVVKSAPAEAELKDADESPVK

SEQ ID NO: 18627 - protein, 721 aa, Ureaplasma urealyticum
MYFLKKIVNLFSSKIESEDNNVKKDDLTQPRKQSPEARKRRNRRIIFWLIILLIIGTIIGVIIYFSVRKEYDNVIVKSAQTEVVNNKKVLYLNTIRPNSTQITRYTIDEDQLLTARVNILNNTNFQIISNASSLGLSRISFNIVREGVEKFKLGETNIYAPISGNTNNQWNWLTSIITQNAGIPSSGFNPQVIISPLISIIFFIIFLYIILRVSKAQSDSLLGTNKANAKLTKSGVRFSDVAGIAEVKEELIEIVDFLKEPKKYVAAGARIPKGVMLYGPPGTGKTLIAKAVAGEANVPFFQTTGSSFEDTFVGVGARRVRELFEKARKSAPAIIFIDEIDSVAKKRGNSLTAVQDQTINQLLSELDGFDTSSGVIVMAATNRLDTLDDAILRPGRFDRQISVNLPDILEREQILRIHSRNKNLSAKVSLEDIARRTAGFSGAQLENVLNEAALLSVRDKATSIHMNHLDEAIDRVIAGPSRPNKVISEREREQVSYHEAGHALIGLYSPGADVVQKITIVARGRAAGYTLQTPERNENILQNKTELISRVRTALGGRAAEELIYGPNEITTGAANDFYKITNIVRAMVASFGMTDVGLTQYIATEGVDNPYRNSYSEQTALAIDIEIEKIIQREYKIVKEMINEHREELELIVQTLLELETILKPQIDYIHQYKQLPPEVIANKNKREASQKQANSSVEEAKVVDDEESIKDKEKDQKSN

SEQ ID NO: 18628 - protein, 638 aa, Helicobacter felis
MDNNHKGPNDPNSKKPLLQNPLLLIAIFGIIIFVAMRVMNSDEGFGDRFLSTSTKNISYHEMKELIEKKEVDSVSIGQTLIKAISKEGNNKTIYVAKRVPDLSLVPLLDSQKINYSGFSESNFFADILGWLLPVLVILGLWMFMASRMQKNMGGGIFGMGSSKKLINAEKPKVRFNDMAGNEEAKEEVVEIVDFLKYPDRYASLGAKIPKGVLLVGPPGTGKTLLAKAVAGEASVPFFSMGGSSFIEMFVGLGASRVRDLFDIAKKEAPSIIFIDEIDAIGKSRAAGGMISGNDEREQTLNQLLAEMDGFGSENAPVIVLAATNRPEILDPALLRPGRFDRQVLVDKPDFKGRVEILKVHIKPVKLANDVDLQEIAKLTAGLAGADLANIINEAALLAGRNNQKEVKQQHLKEAVERGIAGLEKKSRRISPKEKKIVAYHESGHAVISEMTKGSARVNKVSIIPRGMAALGYTLNTPEENKYLMQKHELIAEIDVLLGGRAAEDVFLQEISTGASNDLERATDIIKGMVSYYGMSDVSGLMVLEKQRNSFLGGGFGSGREFSEKMAEEMDSFIKNLLEERYVHVKQTLSDYKDAIEVMVNELFEKEVITGERVREIISEYEVSHNLQTRLVPLEEHAS

SEQ ID NO: 18629 - protein, 644 aa, Yersinia pestis CO92
MAKNLILWLVIAVVLMSVFQSFGPSESNGRRVDYSTFMSDVTQDQVREARINGREINVSKKDNSKYTTFIPVNDPKLLDTLLTKNVKVVGEPPEEQSLLASIFISWFPMLLLIGVWIFFMRQMQGGGGKGAMSFGKSKARMLTEDQIKTSFADVAGCDEAKEEVSELVDYLREPSRFQKLGGKIPKGVLMVGPPGTGKTLLAKAIAGEAKVPFFTISGSDFVEMFVGVGASRVRDMFEQAKKAAPCIIFIDEIDAVGRQRGAGLGGGHDEREQTLNQMLVEMDGFEGNEGIIVIAATNRPDVLDPALLRPGRFDRQVVVGLPDVRGREQILKVHMRRVPLDTDIDASVIARGTPGFSGADLANLVNEAALFAARGNKRVVSMVEFEKAKDKIMMGAERRSMVMTEAQKESTAYHEAGHAIIGRLVPEHDPVHKVTIIPRGRALGVTFFLPEGDAISASRQKLESQISTLYGGRLAEEIIYGPEKVSTGASNDIKVATSIARNMVTQWGFSEKLGPLLYAEEEGEIFLGRSVAKAKHMSDETARIIDQEVKLLVERNYQRARKLLLENMDVLHSMKDALMKYETIDAPQIDDLMNRKEVRPPAGWDNVTKNKSSDNDNTPTATMPADEPNTPTSGNTVSEQLGDK

SEQ ID NO: 18630 - protein, 650 aa, Vibrio vulnificus CMCP6
MAKNLILWLVIAVVLMSVFQSFGPGESNGRAVDYTTFVQEVGQGQIQEATFKDGEITFVRRGGGGKFVTYMPVYDQKLLDDLINQNVKVQGTPPEEQSLLGTIFISWFPMILLIGVWIFFMRQMQGGGGKGAMSFGKSKARMMSEEQIKTTFGDVAGCDEAKEDVKELVDYLRDPSRFQKLGGKIPTGVLMVGPPGTGKTLLAKAIAGEAKVPFFTISGSDFVEMFVGVGASRVRDMFEQAKKASPCIIFIDEIDAVGRQRGAGVGGGHDEREQTLNQMLVEMDGFEGNEGIIVIAATNRPDVLDPALLRPGRFDRQVVVGLPDVRGREQILKVHMRKVPLAGDVEPSLIARGTPGFSGADLANLVNEAALFAARGNKRNVSMVEFELAKDKIMMGAERRSMVMSEEIKESTAYHEAGHAIVGRLVPEHDPVYKVSIIPRGRALGVTMYLPEQDRVSMSRQHLESMISSLYGGRLAEELIYGVDRVSTGASNDIERATDIARKMVTQWGFSEKLGPMLYAEEEGEVFLGRSVTQTKHMSDDTAKLIDDEVRKLIDRNYERARQILIDNMDIMHAMKDALMKYETIDAGQIDDLMARKETIREPAGWGDQAATEKTEKSEAKAEEKTAEPEVTAQSQPDEVQQPTDKKDAE

SEQ ID NO: 18631 - protein, 745 aa, Lactobacillus plantarum WCFS1
MNNRRNGLFRNSLFYILMFLSLMGIIYFFFGGNSGSQTQNIRYSEFVKQLDKNNVKNVSIQPSGGVYKVTGSYRKARTTSSANALGIKSASTKTTSFSTTMLENNSTVDQVSKLAAKHDVKVTAKAEESSGIWVTLLMYIAPVILMLFLFYMMMGQAGQGGGNNRVMNFGKTKAKPADSKQNKVRFSDVAGEEEEKQELVEVVEFLKDPRKFVSLGARIPSGVLLEGPPGTGKTLLAKAVAGEAGVPFFSISGSDFVEMFVGVGASRVRDLFEQAKKNAPSIIFIDEIDAVGRQRGNGMGGGHDEREQTLNQLLVEMDGFTGNEGVIVMAATNRSDVLDPALLRPGRFDRKILVGRPDVKGREAILKVHAKNKPLAADVDLKEIAKQTPGFVGADLENLLNEAALLAARRNKKQVDAADLDEAEDRVIAGPAKHDRVVNKHERETVAYHEAGHTIVGLVLNDARVVHKVTIVPRGRAGGYAIMLPREDQMLMSKRDAKEQMAGLMGGRAAEEIIFGAQSSGASNDFEQATQIARAMVTQYGMSEKLGPVELENANQQAAYQQGMGASAFSQHTAQLIDDEVRRLSQEAHQTATDIIESHREQHKLIAEALLKYETLDEKQILSLFKTGKMPEKDSNEFPSEKAATFEESKRELERREAEKHAQNQSADDKQADSADTTTNVSVAEPSFPSESDASSEVSADSSVNSTANSATESATDSDVATSATGLPNAESATPSSQDDTNSQA

SEQ ID NO: 18632 - protein, 634 aa, Pseudomonas syringae pv. tomato str. DC3000
MAKNLILWLIIAAVLVTVMNNFSSPNEPQNFNYSEFIQQVKDGKVEKVSVDGYVITGKRSDGDTFKTIRPNIPDNGLIGDLVSNNVVVEGKQPEQQSIWTQLLVASFPILVIIAVFMFFMRQMQGGAGGKGGPMSFGKSKARLLSEDQVKTTLADVAGCDEAKEEVGELVEFLRDPGKFQRLGGRIPRGVLMVGPPGTGKTLIAKAIAGEAKVPFFTISGSDFVEMFVGVGASRVRDMFEQAKKHAPCIIFIDEIDAVGRHRGAGMGGGHDEREQTLNQLLVEMDGFEMNDGIIVIAATNRPDVLDPALLRPGRFDRQVVVGLPDIRGREQILKVHMRKVPMGEDVNPGVIARGTPGFSGADLANLVNEASLFAARSGKRVVEMKEFELAKDKIMMGAERKSMVMSDKEKRNTAYHEAGHAIVGRLVPEHDPVYKVSIIPRGRALGVTMFLPEEDRYSLSKRALISQICSLYGGRIAEEMTLGFDGVTTGASNDIMRASQIARNMVTKWGLSEKLGPLMYSEDEDGGYLGRGGSQNSSVSGDTAKLIDSEVRSIIDHCYGTAKQLLTDNRDKLEAMADALMKYETIDADQIDDIMTGRPPREPRDWDGGSGTNGTPITPDPRPETPIGGPAAEH

SEQ ID NO: 18633 - protein, 662 aa, Vibrio parahaemolyticus RIMD 2210633
MSDMAKNLILWLVIAVVLMSVFQSFGPGESNGRTVDYTTFVQEVGQGQIQEATFKDGEISFVRRGGGAKMVTYMPVYDQKLLDDLINQNVKVQGTPPEEQSLLGTIFISWFPMILLIGVWIFFMRQMQGGGGKGAMSFGKSKARMMSEEQIKTTFADVAGCDEAKEDVKELVDYLRDPSRFQKLGGKIPTGVLMVGPPGTGKTLLAKAIAGEAKVPFFTISGSDFVEMFVGVGASRVRDMFEQAKKAAPCIIFIDEIDAVGRQRGAGVGGGHDEREQTLNQMLVEMDGFEGNEGIIVIAATNRPDVLDPALLRPGRFDRQVVVGLPDVRGREQILKVHMRKVPLAGDVEPSLIARGTPGFSGADLANLVNEAALFAARGNKRNVSMVEFELAKDKIMMGAERRSMVMSEETKESTAYHEAGHAIVGRLVPEHDPVYKVSIIPRGRALGVTMYLPEQDRVSMSRQHLESMISSLYGGRLAEELIYGPEKVSTGASNDIERATDIARKMVTQWGFSEKLGPLLYAEDEGEVFLGRSVTQTKHMSDDTAKLIDDEVRQIIDRNYDRAKKILEDNMDIMHAMKDALMKYETIDARQIDDLMERKAEIREPAGWGDNPMNKPKDDDKSQATPEVKEEEKATDSANAAEQVTSQDSASSEVPEKKDSE

SEQ ID NO: 18634 - protein, 398 aa, Archaeoglobus fulgidus DSM 4304
MGDSEIQYLLEKLKKLEEDYYKLRELYRRLEDEKKFIESERIRYEREVRRLRSEVERLRSPPLLVGVVSDILEDGRVVVKSSTGPKFVVNTSQYINEEELKPGARVALNQQTLAIVNVLPTSKDPMVYGFEVEEKPEVSYEDIGGLDVQIEEIREAVELPLLKPELFAEVGIEPPKGVLLYGPPGTGKTLLAKAVANQTRATFIRVVGSEFVQKYIGEGARLVREVFQLAKEKAPSIIFIDELDAIAARRTNSDTSGDREVQRTMMQLLAELDGFDPRGDVKVIGATNRIDILDPAILRPGRFDRIIEVPLPTFEGRIQIFKIHTRKMKLAEDVDFKELARITEGASGADIKAICTEAGMFAIREERAKVTMLDFTKAIEKVLKKTTPIPDLKGVMFV

SEQ ID NO: 18635 - protein, 639 aa, Borrelia burgdorferi B31
MNGNNNMNNNGKSNNKKKNKNWILGLVVVFLISAIFMSYFIRGGESYKNVPYSTFQSYLDNGLVESVVIIDKNLIQFVVKGSNFAKSYFSTSIPYLDINLLSELKNKKVELSSGKSQASLIGVLLQTLPWILFFIFFFFIFRQTQGGGGKVFTFGKSNAQKYEAGKNKITFKDVAGQEEVKQELREVVEFLKNPKKFEKIGAKIPKGVLLVGSPGTGKTLLAKAVAGEAGVSFFHMSGSDFVEMFVGVGASRVRDLFDNARKNSPCIIFIDELDAVGRSRGAGLGGGHDEREQTLNQLLVEMDGFGTHTNVIVMAATNRPDVLDSALLRPGRFDRQVTVSLPDIKEREAILNIHSLKTKLSKDINLQVIARATPGASGADLANLINEGALIAARNNQDEILMKDMEEARDKILMGVAKKSMTITDRQKLETAYHEAGHALLHYYLEHADPLHKVTIIPRGRALGVAFSLPREDRLSINKHQILDKIKICYGGYASEQINLGVTTAGVQNDLMQATSLAKKMVTEWGMGEEVGPIFLVDDEAPIFLPKEFSKAKAYSENTADKVDREVKRILEECLKEASDILLKHKDQLVKLAKELVLKETLTDKEVRELLGFEANKDEYDLFSSDSTTKEVKGEDVKG

SEQ ID NO: 18636 - protein, 610 aa, Buchnera aphidicola str. Bp (Baizongia pistaciae)
MAKNLMLWLVIAVVLMSIFQNFSANNINNRKIDYSTFLSDVNQDQVREVHISGREMNIIRKDNGRYITYIPISDPKLLDNLLVKNVKIIGAAPEEQSFFTAIFISWFPMLLLIGVWVFFMRQMQVGGGKGAMSFGKSKARMLPEDQVKITFSDVAGCDEAKEEVQELVEYLKEPSRFQKLGGKIPKGILMVGPPGTGKTLLAKAIAGEAKVPFFTISGSDFVEMFVGVGASRVRDMFEHSRKVAPCIIFIDEIDAVGRQRGAGLGGGHDEREQTLNQMLVEMDGFDGNEGIILIAATNRPDVLDPALLRPGRFDRQIFVALPDIRGREKIIQVHMKKVPLGNNVDPMIIARGTPGFSGADLANLVNEAALFAARNNRDVVMMSDFESAKDKITMGSERRSMVMTEKQKESTAYHEAGHVIVGRLVPEHDPAHKVTIIPRGRALGVTFFLPKDDVLSINKNKLESQISTLYGGRLAEEIIYGVNNVSTGAHNDIKVATNLARNMVTQWGFSKKLGPLLYSEEEGEIFLGRTVTKSKHMSDETARIIDEEVKLLVEKNYNRAKKILEENLDILHAMKDALIKYETINSRQIDDLMKRKSIQSSNICTDDDNN

SEQ ID NO: 18637 - protein, 647 aa, Coxiella burnetii RSA 493
MNSMIKNLLLWLVIAVVLITVFSNFGSRQSDVQPYSYSQFVQAVNNDKVSSVVIQGHEIKGVTKDNKHFTTYLPMEDQALLNQLMAKGVSVKGEPPKQQSMFLHILISWLPFLILIFVWILFMRQMQGGGRGGGPMSFGRSKARLLSQDQVKVTFDDVAGVDEAKEEVKELVEFLRDPGKFQRLGGKMPCGVLLVGPPGTGKTLLAKAVAGEAKVPFFTISGSDFVEMFVGVGASRVRDMFDQAKKQAPCIIFIDEIDAVGRHRGAGLGGGHDEREQTLNQLLVEMDGFEGKEGIIVMAATNRPDVLDPALLRPGRFDRQVVVPLPDIKGREYILKVHMNKLPLAKDVKASVIARGTPGFSGADLANIVNEAALFAARENKKDVSMSEFERAKDKIMMGAERRSMVMSDDEKKLTAYHEAGHAIVGLHMLEHDPVYKVTIIPRGRALGVTMFLPEHDRYSMTKRRLECQLAGLFGGRIAEEIIFGPDLVTTGASNDIEKATEIARNMVTKWGLSQKLGPLTYREEEGEVFLGRSVTQRKDISDATNKEIDSEVRRIVDTAYTTAKQTLEEHIEQLHLMAKALIKYETIGEAQIKEILAGKEPSPPPDWKEENGSASAHKENSEKELSEEKGEEKTVNPSRPRPAEDG

SEQ ID NO: 18638 - protein, 664 aa, Streptomyces avermitilis MA-4680
MWIVLAVLAVVVLMQVVGSSGGYKTVDTGQVVQAINENKVQQAKITTGDEQVIKVELKDGQKVDGSSKIQASYIGDQGVTLAGTLQDKYQNKQIPDGYTVSPSKQNPFVGILLSLLPFVLIVVVFLFLMNQMQGGGSRVMNFGKSKAKLITKDTPKTTFSDVAGSDEAVEELHEIKEFLQEPAKFQAVGAKIPKGVLLYGPPGTGKTLLARAVAGEAGVPFYSISGSDFVEMFVGVGASRVRDLFEQAKANAPAIVFVDEIDAVGRHRGAGLGGGHDEREQTLNQLLVEMDGFDVKGGVILIAATNRPDILDPALLRPGRFDRQIAVDRPDMQGRLEILKVHQKGKPVAPDVDLSAVARRTPGFTGADLANVLNEAALLTARSDKKLVDNSMLDEAIDRVVAGPQKRTRIMSDKEKKITAYHEGGHALVAAASPNSDPVHKITILSRGRALGYTMVLPDEDKYSTTRNEMLDQLAYMLGGRAAEELVFHDPTTGAANDIEKATATARAMVTQYGMTERLGAIKFGGDNTEPFLGREMSHPRDYSEEVAALVDEEVKKLIENAHNEAWEILVENRDVLDALVLQLLEKETLSKEQIAEVFAPIVKRPARPAWTGSSRRTPSTRPPVLSPKELSLTNGANGASPAIANATESVPAAESAPEDRTEG

SEQ ID NO: 18639 - protein, 588 aa, Streptomyces avermitilis MA-4680
MAAHDDDMNRGIRPGRGSDDPAGQIAYLEQEIAVLRRKLADSPRHTRILEERIVELQTNLAGVSAQNERLANTLREARDQIVALKEEVDRLAQPPAGFGVFLTANEDGTADIFTGGRKLRVNVSPSVELEELRRGQELMLNEALNVVEAMEYESVGDIVTLKEILEDGERALVVGHTDEERVVRLAEPLLDVTIRPGDALLLEPRSGYVYEVVPKSEVEELVLEEVPDIGYEQIGGLGNQIEMIRDAVELPYLYPDLFKEHELRPPKGVLLYGPPGCGKTLIAKAVANSLAKKVAEVTGQATGKSFFLNIKGPELLNKYVGETERQIRLVFQRAREKASEGTPVIVFFDEMESLFRTRGSGVSSDVENTIVPQLLAEIDGVEGLQNVVVIGASNREDMIDPAILRPGRLDVKIKIERPDAEAAKDIFGKYLTERLPLHTEDVGEHGGDRSATVHGMIQTAVEQMYAESEENRFLEVTYANGDKEVLYFKDFNSGAMIENIVGRAKKMAIKDFLEHSQKGLRVSHLLQACVDEFKENEDLPNTTNPDDWARISGKKGERIVYIRTLITGKQGADTGRSIDTVANTGQYL

SEQ ID NO: 18640 - protein, 628 aa, Porphyra purpurea
MKLSWKTLLLWSLPIFVVGFFFWQGFLGPTTTDVGSNIASSRMTYGRFLEYLDMGWVKRVDLYENNHTAIVEAVGPELGNRVQRIRVELPASAPELITKLRKANVDLDAHPPKSTSAVWGLLGNLLFPLILVGGLAFLFRRSNNASGGPGQAMSFGKSKALFQMEAKTGVVFNDVAGVEEAKEEFQEVVTFLKQPESFTAVGAKIPKGVLLVGPPGTGKTLLAKAIAGEAGVPFFSISGSEFVEMFVGVGASRVRDLFKKAKDNAPCIVFIDEIDAVGRQRGTGVGGGNDEREQTLNQLLTEMDGFEGNTGVIVIAATNRADILDSALLRPGRFDRQVSVDVPDFRGRLAILEVHAKNKKMESKVSLETIARRTPGFSGADLANLLNEAAILTARRRKSAMTMSEIDTSIDRVVAGLEGTPLIDSKSKRLIAYHEVGHAIIGSLLEHHDPVQKVTLIPRGQARGLTWFTPSDDQSLISRSQILARIVGALGGRAAEEIIFGDAEVTTGASNDLQQVTSMARQMVTRFGMSKIGPLSLESQGSDPFLGRGMGGGSEYSDEVATNIDKQVREIVSECYKEAKKIVKDNRVVMDRLVDLLIEKETIEGNEFRHIVKEYTAIPEKNYYISQF

SEQ ID NO: 18641 - protein, 644 aa, Odontella sinensis
MNDNKNNTVRNLLIGIALLSGISLTAKKFDLIGVQGSESGKNINQVNPNVISSKMTYGRFLEYLEMGWVNQVDLYDNSRNAIVQASSPELGNRPQTIRVEIPVGASQLIQKLKEYNIDFDAHPAEQKNIFVNILSNILLPIIFITGLVYLFQNSENFGGGSGQSPMSLGKSTARFERRPDTGVSFKDIAGIDEAKTEFEEIVSFLKEPDKYTIVGAKIPKGILLVGPPGTGKTLLAKAIANEADVPFFSVAGSEFVEMFIGIGAARVRDLFKKASENAPCIVFIDEIDAVGRERGAGVGGGNDEREQTLNQLLTEMDGFKENKGVIVVGATNRADILDAALLRPGRFDRQVTVNLPDRLGRVGILKVHARNKPLGEDVSLVQLANRTPGFSGADLANLLNEAAILATRYKKSSITKNEVNEAADRIIGGIAGAPMEDTKNKRLIAYHEVGHAITGSVLKSHDEVEKITLTPRGGAKGLTWFTPEEDQSLLSRSALLARIITTLGGRAAEQVIFGEPEVTTGASSDLQQVTNLARQMVTRFGMSNIGPLALEDESTGQVFLGGNMASGSEYAENIADRIDDEVRKIITYCYEKAIEIVLDNRVVIDLIVEKLLDKETMDGDEFRELLSTYTILPNKNIPYVSKFN

SEQ ID NO: 18642 - protein, 399 aa, Pyrococcus abyssi
MNIMSGDEVQFHENYDDYITYLKRRIRQLELQVRMLEADKERLERELSRLRSEMSRLRQPPAFAGTVIEVLDDDRAIVQNYNGPRFVVRIAPWIERDKLRPGARVALDQRTMAIIELLPSSKDPTVLGFEVIERPNVTYNDIGGLKKQLQELREAIELPLKHPELFEEVGIDPPKGVLLYGPPGCGKTLMAKALAHEVNATFIRVVGSELVRKYIGEGARLVHELFELAKEKAPTIIFIDEIDAIGAKRMDETTGGEREVNRTLMQLLAEMDGFDPRGNVKVIAATNRPDILDPALLRPGRFDRLIEVPLPDFEGRLEILKVHTRRMKLKNVDLRVIAEITEGASGADLKAIATEAGMFAIRERRTYVTQEDFLKAVDKVLGNERKLLQQITSHEIIYG

SEQ ID NO: 18643 - protein, 628 aa, Ralstonia solanacearum
MNNNWFQKAAIWLVIALVLFTVFKQFDKPRAQEGVTYSQFMDDAKGGKIKRVEVQGRNLLVTPNEGGKYTIISPGDIWMVGDLMKYGVQVTGKAEEEQGVLLSALYYLGPTLLIIVFWFYMMRQMQGGGKGGAFSFGKSRARLIDENNNSVTFADVAGCDESKEEVVELVDFLKDPQKFQKLGGRIPRGVLLVGPPGTGKTLLARAIAGEAKVPFFSISGSDFVEMFVGVGAARVRDMFENAKKQAPCIVFIDEIDAVGRHRGAGMGGGNDEREQTLNQMLVEMDGFEANSGVIVIAATNRADVLDKALLRPGRFDRQVYVGLPDIRGREQILKVHMRKVPIGNDVDASVLARGTPGFSGADLANLVNEAALFAARRNKRVVDMQDFEDAKDKIYMGPERKSAVIREEERRATAYHESGHAVVAKLLPKADPVHKVTIMPRGWAGGLTWQLPEHDKHYAYKDTMLEEIAILFGGRAAEEVFLGAMSTGASNDFERATKMARDMVTRYGMSDSLGTMVYVDTEQDGFFGRMSSKTVSEATQQKVDSEIRRIVDEQYALAKRLLEENREKVEAMTAALLEWETIDADQVNDIMAGKPPRPPRYGSSGGGSTPPNGGTPAGVTPGNVPATA

SEQ ID NO: 18644 - protein, 397 aa, Rhipicephalus appendiculatus
MPSPEPPLSYPQLHKLRIDYRKKLTECKEVESKLKDVREQLKELNKQYEKSENDLKALQSVGQIVGEVLKQLTEEKFIVKATNGPRYVVGCRRQLDKAKLKSGTRVALDMTTLTIMRYLPREVDPLVYNMSHEDPGNISYSMIGGLAEQIRELREVIELPLLNPELFQRVGITPPKGCLLYGPPGTGKTLLARAVASQIEANFLKVVSSAIVDKYIGESARLIREMFNYARDHQPCVIFMDETMPLVAVGSRKGRGGDREIQRTLMELLNQMDGFDSLGQVKIIMATNRPDTLDPALLRPGRLDRKIEIPLPNEQARLDIVKIHATPITKHGEVDWEAVVKLSDGFNGADLRNVCTEAGMFAIRADREFVIEEDFMKAVRKVADNKKLESKLDYKPV

SEQ ID NO: 18645 - protein, 630 aa, Azotobacter vinelandii
MSLAGSGRTSIGGIVKQQAQFHIGYWFLAVLGFVLIQSLLTEHQQVAQIPYSEFEQYLKEGRVEELAITDRQIQGTLKEPLPGGQTRFVAIRIEPQLAEHLQQYPVRYAGKVESTLLRDLLSWTLPALIFFSLWLFLLKRIGGGLGGGMMQIGKSKAKVYVETDMKVTFADVAGVDEAKDELKEIVDFLKDPQTYGRLGGRMPKGVLLVGPPGTGKTLLARAVAGEAKVPFFSISGSEFVEMFVGVGAARVRDLFEQARAQAPAIIFIDELDALGRARGVGPLGGGHDEKEQTLNQLLVELDGFDTSTGLVLLAATNRPEILDPALLRAGRFDRQVLVDRPDKAGRVQILQVHLKRARLSADVDPQQIAALTPGFTGADLANLVNEAALLATRRRADAVTMDDFTAAIERIIAGLEKRNRLLNPKEREIVAHHEMGHALVAMALPGMDPVHKVSIIPRGMGALGYTIQRPIEDRFLMTREELENKMAVLLGGRAAEWIVFSHFSTGAADDLAKVTDIARAMVTRYGMSERLGHVSLEREQRSFLGAEQMYGLPPRHEYGETTATAIDTEVQAIVEHAFQRTVTLLEERRALLERSARRLLEEETLDAEQLAELVGKAQGTTAERSGAIPQ

SEQ ID NO: 18646 - protein, 637 aa, Azotobacter vinelandii
MAKNLILWLIIAAVLVTVMNNFTNPSEPQTLNYSDFIQQVKDGKVERVTVDGYIITGQRIDGDNFKTIRPAIQDGGLIGDLIDNNVQIEGKQPEQQSIWSQLLVASFPILVIIAVFMFFMRQMQGGAGGKGGPMSFGKSKARLLSEDQVKTTFADVAGCDEAKEEVSELVEFLRDPGKFQRLGGRIPRGVLMVGPPGTGKTLLAKAIAGEAKVPFFTISGSDFVEMFVGVGASRVRDMFDQAKKHAPCIIFIDEIDAVGRHRGAGLGGGHDEREQTLNQLLVEMDGFEMNDGIIVIAATNRPDVLDPALLRPGRFDRQVVVGLPDIRGREQILKVHMRKVPVSEDVNPAVIARGTPGFSGADLANLVNEASLFAARANKRIVEMREFELAKDKIMMGAERKTMVMSEKEKLNTAYHEAGHAIVGRLVPEHDPVYKVSIIPRGRALGVTMFLPEEDRYSLSKRALISQICSLFGGRIAEEMTLGFEGVTTGASNDIMRATQIARNMVTKWGLSEKLGPLMYAEEEGEVFLGRTAGTQHSNVSAETARLIDQEVRSIIDQCYATATKLLTDSRDKLDMMAEALLKYETIDADQIDDIMAGRVVREPKDWQGGGSGTSGTPASQGTSRPEAPIGGPAGEH

SEQ ID NO: 18647 - protein, 426 aa, Spinacia oleracea
MAIEHEDDLKDEKNPRPLDEDDIALLKTYGLGPYSASIKKVEKEIKDMSKKVNDLIGIKESDTGLAAPSQWDLVSDKQMMQEEQPLQVARCTKIINPNTEDAKYVINVKQIAKFVVGLGDKVSPTDIEEGMRVGVDRNKYQIQIPLPPKIDPSVTMMTVEEKPDVTYNDVGGCKEQIEKMREVVELPMLHPEKFVKLGIDPPKGVLCYGPPGTGKTLLARAVANRTDACFIRVIGSELVQKYVGEGARMVRELFQMARSKKACIVFFDEVDAIGGARFDDGVGGDNEVQRTMLEIVNQLDGFDARGNIKVLMATNRPDTLDPALLRPGRLDRKVEFGLPDLEGRTQIFKIHTRTMNCERDIRFELLARLCPNSTGADIRSVCTEAGMYAIRARRKTVTEKDFLDAVNKVIKGYQKFSATPKYMVYN

SEQ ID NO: 18648 - protein, 638 aa, Wigglesworthia glossinidia endosymbiont of Glossina brevipalpis
MSDMAKNLILWLIIAVVLMSIFQSFGPNDSNRRKVEYSAFISELNQDQIKETRINGREIFALKKDGSRYVTYIPINDSKLLDILLSKNVKIIGEPPEEPSLLTSIFISWFPMLLLIGVWIFFMRQMQGGGGKGAMSFGKSKAKMLTEDQIKTTFSDVAGCDEAKEEVSELVDYLKEPSRFQKLGGKIPKGILMVGPPGTGKTLLAKAIAGEAKVPFFTISGSDFVEMFVGVGASRVRDMFDQAKKTAPCIIFIDEIDAVGRQRGAGLGGGHDEREQTLNQMLVEMDGFEGNEEIIVIAATNRPDVLDPALLRPGRFDRQVVVGLPDVRGREQILKVHMKAIPLSSDIDAAVIARGTPGFSGADLANLVNEAALFAARKNKKNVSMMEFEKAKDKIMMGAERKSLVMTEKQKEATAYHEAGHAIVGRLVPGHDPVHKVTIIPRGRALGITFFLPKGDVISISRQKLESQISTLYGGRLAEEIIYGLSNVSTGASNDIKVATSIARNMITQWGFSDKLGPLLYSEEEGEIFLGRSVTKSQNISDKTARIIDQEIKILIEKNYLRAKNLIIDNIDILHAMKDALMKYETINAYQIDDLMKRKPVRPPCDNQDSKRHNNKDDIINKSKNNISNNTSVTNNIQ

SEQ ID NO: 18649 - protein, 635 aa, Wigglesworthia glossinidia endosymbiont of Glossina brevipalpis
MAKNLILWLIIAVVLMSIFQSFGPNDSNRRKVEYSAFISELNQDQIKETRINGREIFALKKDGSRYVTYIPINDSKLLDILLSKNVKIIGEPPEEPSLLTSIFISWFPMLLLIGVWIFFMRQMQGGGGKGAMSFGKSKAKMLTEDQIKTTFSDVAGCDEAKEEVSELVDYLKEPSRFQKLGGKIPKGILMVGPPGTGKTLLAKAIAGEAKVPFFTISGSDFVEMFVGVGASRVRDMFDQAKKTAPCIIFIDEIDAVGRQRGAGLGGGHDEREQTLNQMLVEMDGFEGNEEIIVIAATNRPDVLDPALLRPGRFDRQVVVGLPDVRGREQILKVHMKAIPLSSDIDAAVIARGTPGFSGADLANLVNEAALFAARKNKKNVSMMEFEKAKDKIMMGAERKSLVMTEKQKEATAYHEAGHAIVGRLVPGHDPVHKVTIIPRGRALGITFFLPKGDVISISRQKLESQISTLYGGRLAEEIIYGLSNVSTGASNDIKVATSIARNMITQWGFSDKLGPLLYSEEEGEIFLGRSVTKSQNISDKTARIIDQEIKILIEKNYLRAKNLIIDNIDILHAMKDALMKYETINAYQIDDLMKRKPVRPPCDNQDSKRHNNKDDIINKSKNNISNNTSVTNNIQ

SEQ ID NO: 18650 - protein, 446 aa, Tortula ruralis
MGQGQSGGLPKQGPGGERNKGDGQKKEKKYEPAAPPTRVGRKQRKQKGSEAAARLPVVTPATKCNLRLLKLDRAKDYLLMKEEFVRTQKRLNPQEDKTEKDRSKVDDLRGSPMSVGNLEEIIDENHAIVSSSVGPEYYVNILSFVDKDQPGPGCAILMHNKVLSVVGLLQDDVDPMVSVMKVEKAPLESYADIGGLDPQIQEIKEAVELPLTHPELYEDIGIKPLKGVILYGEPGTGKTLLAKAVANSTSATFLRVVGSELIQKYLGDGPKLVRELFRVADELSPTIVFIDEIDAIGTKRYDAHSGGEREIQRTMLELLNQLDGFDSRGDVKVILATNRIESLDPALLRPGRIDRKIEFPLPDTKTRRRIFQIHTSRMTMADDVNLEEFVMTKDEFSGADIKAICTEAGLLALRERRMKVTHADFKKAKEKVMYKKKEGVPEGLYM

SEQ ID NO: 18651 - protein, 706 aa, Medicago sativa
MAFSTSSLLSTNFLGARNIPTPKTTKPSISLPLFFKTKFFNSQNDNNNNNSEPIKSAAVSALILSSMFTPAALAADNLPPPPPPVLEAQPNQLNPANSTSPFSQNISLTAPKPQAQSSTDLPDGSQWRYSEFLNAVKKGKVERVRFSKDGSVLQLTAVDGRRANVIVPNDPDLIDILAMNGVDISVSEGEQGNGLFSFVGSLLLPFLAFAGLFLIFRRGQGGPGGPGGLGGPMDFGRSKSKFQEVPETGVTFADVAGADQAKLELQEVVDFLKNPDKYTALGAKIPKGCLLVGPPGTGKTLLARAVAGEAGTPFFSCAASEFVELFVGVGASRVRDLFEKAKSKAPCIVFIDEIDAVGRQRGAGLGGGNDEREQTINQLLTEMDGFSGNSGVIVLAATNRPDVLDSALLRPGRFDRQVTVDRPDVAGRVKILQVHSRGKALAKDVDFDKIARRTPGFTGVDLQNLMNEAAILAARRDLKEISKDEIADALERIIAGPEKKNAVVSEEKKKLVAYHEAGHALVGALMPEYDPVAKISIIPRGQAGGLTFFAPSEERLESGLYSRSYLENQMAVALGGRVAEEVFGQDNVTTGASNDFMQVSRVARQMVERFGFSKKIGQVAIGGGGGNPFLGQQMSSQKDYSMATADIVDKEVRELVDKAYERATQIINTHIDILHKLAQLLIEKETVDGEEFMSLFIDGKAELYVS

SEQ ID NO: 18652 - protein, 949 aa, Oryza sativa (indica cultivar-group)
MVEATRQRRKPLVLASTQALLDSLPGDRRGSALPPPPPPEPVRIRAGVLRFPNSSSSSSSAGGGEFGEAASFVALPSSALRRLAVVTGTPVLVKNADNNVGRIAKAVVLDHPCLDDSLTEHTEPVDAASPLDNAMGILPCRSFPTNGFLPLDEEVAYVSPLLAFNLGVHVSCLKLLVQKGEKPFKFCSKVEDSDLAAGEESNPILHLEILPSPQVPKHALHLRVSVVRIPECGVFASLKANSAIGGSDYQDMIDQALNEHFKFDRFLARGDVFCIRNNWNCGATSCLACNREDNRLHPHDMIYFKVTGMEPSDEPVHRVNCNQTALVLGGGASASIPPYSLFASPGASVPLHSEIVEHLASIIAPALCPSNILPKVKFSTFLYGPSANIESVIKQYIGQHWVATESLPARDINGNPYLVEPECVSPLQVILVATADRAEGMPQSIRRCFRHEINMKSINEEQRRNLISETLHCVSTSADESINDKFVKDLAVQTSGFMPRDILALVADAGISFAHKVETDKNNSEGDKLKGILPTSSSSSQNEEKTFCKEYILSSLERAKKRNRAALGTPKVPNVKWEDVGGLEEVKKVILDTIQLPLLYKHLFSSKLGKRSGVLLYGPPGTGKTLLAKAVATECSLNFLSVKGPELINMYVGESEKNVRDIFEKARSARPCVIFFDELDSLAPARGSSSDSAGVMDRVVSQLLVEIDGLSDNSQDLFIIGATNRPDLLDSALLRPGRFDKLLYVGVNSDASYRERILKAQTRKYKLHENVSLLSIAQQCPPNFTGADIYALCADAWYHAAKNLAKTLEADPSRTSEASADDVIVEINDFMTQFTLAGRTTRLMRSPHHGVQTVRPFTQYSRWPPRRRRRRLHVWLWARLESAEQGFATAGAAEIDRPIRRRTAGRHARPARGPARRCSRRERRAPQLAAASARAREGDDGDLRNQDCA

SEQ ID NO: 18653 - protein, 662 aa, Capsicum annuum
KYFNFHSKRKCIITQSTLNKKPNSDNFKNAQSKAALAALLFSSITPHAIALDDAAPIASPPQVMEVEAPNPNTSNPLPFSQNLVLNAPKTQASPVSDLPESTQWRYSEFLNAVKKGKVERVRFSKDGSALQLTAVDGRRANVIVPNDPDLIDILAMNGVDISVSEGEGGNGLFSVIGNLLFPFIAFAGLFFLFRRSQGGPGGPGGLGGPMDFGRSKSKFQEVPETGVTFADVAGADQAKLELQEVVDFLKNPDKYTALGAKIPKGCLLVGPPGTGKTLLARAVAGEAGVPFFSCAASEFVELFVGVGASRVRHLFENAKSKAPCIVFIDEIDAVGRQRGAGLGGGNDEREQTINQLLTEMDGFSGNSGVIVLAATNRPDVLDSALLRPGKFDRQVTVDRPDVAGRVRILQVHSRGKALAKDVDFDKIARRTPGFTGADLQNLMNEAAILAARRDLKEISKDEISDALERIIAGPEKKNAVVSDEKKKLVAYHEAGHALVGALMPEYDPVAKISIIPRGQAGGLTFFAPSEERLESGLYSRSYLENQMAVALGGRVAEEVIFGEDNVTTGASNDFMQVSRVARQMVERLGFSKKIGQVAIGGGGGNPFLGQQMSTQKDYSMATADVVDSEVRELVEKAYERAKQIITTHIDILHKLAQLLIEK

SEQ ID NO: 18654 - protein, 603 aa, Cyanidioschyzon merolae
MKNLWIWSLPLIVLAFIGWQELANQMPVATSRMTYGRLLEYMQMGWVKRIDVYDRTALIEASSPETGWQWIRVDLPANSSDWLEQAKTLHIDVDVHAVSNWINVASNWIIPLIIIGVVIWLLSRSASSNTTGALNFGKSKARFQMVAKTGIMFDDVAGIEEAKEELAEVVAFLKNPSKFLAVGASIPKGVLLVGPPGTGKTLLAKAIAGEASVPFFSISGSEFVEMFVGVGASRVRDLFKKAKQNAPCLVFIDEIDAVGRQRGAGIGGGNDEREQTLNQLLTEMDGFEGNTGVIVIAATNRVDVLDAALLRPGRFDRQIMVSMPDVKSRIAILKVHANQKKLHPQVSLEAVARRTAGFAGADLANLLNEAAILAVRRGLKQITWKEIDDAIDRVIAGMEGTPIMDGKIKRLIAYHETGHALTATLLPNHPPVQKVTLIPRRQAKGLTWFMQDNERDLLSKSQLMSMIMVALGGRAAEEAVFGNAEVTTGASNDLQQVTNLARQMVTRFGMSSLGPLCLETGNEEIFLGRDMRLMPEVSEEVIAQIDAQVRGMIEACYEKVLELMQANRVVMDRIVEELMEKETLDGKEFRQLVSQAARLTAVN

SEQ ID NO: 18655 - protein, 437 aa, Pneumocystis carinii
MFMTGQCSKKESKYEPLVMSTRIGRRYNRNKGPDASYKFPMVYPTTRCRLKLLKMERIKDYLLLEQEFVSNQELLKLDSEKRDQKGEEEDDDKLQSLIGSPMGVGTLEEMIDDDHAIVSSATGPEYYVSIMSFVNKDLLEPGCSVLLHHKAVSIVGVLSDDIDPMVSVMKLDKAPTESYADIGGLESQIQEIKETVELPLTHPELYEEIGIRPPKGVILYGEPGTGKTLLAKAVANQTSATFLRIVGSELIQKYLGDGPKFVRELFQTAQDNSPSIVFIDEIDAIGTKRYDSTSSGEREIQRTMLELLNQLDGFDDRGDVKVIMATNRINDLDPALIRPGRMDRKILFETPDQNTKRKIFQIHTSKMNLGDDVLIEEFITAKDEMSGADVKVIAICTEAGLLALRERRMRVVADDFRKAKEHVLKTKQKNIQGELYI

SEQ ID NO: 18656 - protein, 1135 aa, Pichia angusta
MPGLVEAPVEPYARPVRTLVQLALDPDDGLEYVSLNSQVYELIYGDLSDNKTRFVSLQLLGSPLFVEYQLFRAELDSELPQDSIELHSPRLSSKYGSDFTLEKCIVVPVTKVLSLTSVIMSFPHDVYRLIEGISKERLLEIVASERGSDAGHILIRKTDFLKTLHGEVIHCEPVDQGFLSSDTNLVIVKQEGLKRGVNGNVNGSHPDPSEIPVSTPVDFSVSHLGLGDLTFDDTSIFSNLTLQPLELQIGFLKYSMLMDCTHILESSHEFDHEDDQLFACVCSSVLQKLGCFSGDLVQIQTCDCGAGIVCACDKSARRKITIRVFSLADPNDFDPEKLYLSPIFLNSIGNPRIVFVKRLASQRPNGDFVCEKLENHVPVAKEVVIARVASPITLDRTMQHLFLSNLKTYFESKHRVIVKDQYIPVPIDTVLAKSLFSTYNASGDETQPEIIPQGIPNELAWFKITDGTTETDDGKSLVAGKQYIIDPAKTRMIQSGVCSDKVPLSDGISYSQLRDYFELPRQFAYPCLRISNVLTFPYANQLRKIVSVAFRIRDNSYSRSRVQTTILLSSMARCVGKATLVRRIATEFGANLLELDAYDLLNQASVSKTIGTIRGKSDRVVDSCCSVILYIRHIEALAKKPDPNQQQKDSMSLRLAELIDEYTSKGAIFIGSTNDADAISELIRSKFKFDISINVPTEPERKLILTDLLDDMKTKDKTPVVLRPDVSLDTLALQSAGLTANDLVSIVDNTITIAIERLERLSEEQKVNWDQLLSFNGGRIKLTPEDFETSINDARNKFSDMIGAPRIPDVKWEDVGGLDVVKDEILDTIEMPLKHPELFSKGMKKRSGILFYGPPGTGKTLLAKAIATNFALNFFSVKGPELLNMYIGESEANVRRVFQKARDAKPCVIFFDELDSVAPKRGNQGDSGGVMDRIVSQLLAELDGMSGAEGGDGVFVVGATNRPDLLDEALLRPGRFDKMLYLGIADTHEKQAKIIQALTRKFQLDPSVDLGRIAETCPFTYTGADFYALCSDAMLNAMTRTAGAVEKKINEYNCNREEGDKISTRFWFDNIAKPEDTQVLVKSEDFAKARDELVPSVSAEELQHYLSVRENFEGGKTQDVMHTVPDGADIIISHD

SEQ ID NO: 18657 - protein, 1074 aa, Pichia angusta
MDSQEVTVVFRPLNNCLINLPAPLINPFLANNILIQNIAVELNFRPSGAKKDTKWLVGWNGYFSSDPKTIEIDSVYASSLGLRESRKIVIRLSLSLPKIQSVELEPETSSDWELTEMYAQTVEDRFLNQVRCAVVGQKLAVYPSSSPNNVIKFVVKKIKSETDEIERGILVNDSELHIIPKVHRRDKQQSDGASRRRRSVSGRRSSQFDPVPSCLLRSISLPHYTFQHVNHSSANYEIYVNLDQNFINHQFKSIKYVQVSVITGPGTPAKASSVAEQTKNHDTGSSGSSRKNSSSVVDHKSVNGSVAQTDTEQRKVVAILVHDPLAPQRSAGVSPLLAIALGIEHRCGDMVCIEAAPQKYGTDVHTVILHKIVTQTSTVNELAFKQDQDRQLKQAEANKELSAKFQEHFKRLNFTKCPITNGMKVPVIPDLLPQGGFLELRDGCQWALLGEKLPNFELGDERLKPESFVERQYEQKDLPIVGHKELIARMVRSVRHGHNCVLSGASGSGKTTLINEVAHRLVTLHGYYSKNINCETISNDNFHAIKTLLEEAVKEVNWHSPSVLVLENLDSLIPQEMEHGDSGLSRQVSEFLVNSLKVLTRERAISLLCSSKSKEALNATVFQTHLIQQEFSLKAPDKELRKELLRSFINDYNMDLEKEEILNDITVETEGYLPSDLKVLADRTFHDYISSKIDKDDFHLRASNFERALQGFVPSSLRGVKLQKSGVAWSDIGGLKDAKRVLLETLEWPTKYAPIFANCPLRLRSGILLYGYPGCGKTLLASAVVSQCGLNFISIKGPEILNKYIGASEQSIRELFDRAQSAKPCVLFFDEFDSIAPKRGHDSTGVTDRVVNQLLTQMDGAEGLDGVYVLAATSRPDLIDSALLRPGRLDKSILCDLPDYENRLDILQTVASKFHVSEECRLDHFARKLEGYSGADLQAFVYNAYLKAVHDNLDQLTHANEGTTERKIEFFSMLKNLQPSGNIAGKIDTICKNLHVTDLSSWDDAEQDSDRKPNQIVICNSHFETALEETKKSISNKELRNFARIYSQFVDGKREGHLPDGQASTDIGGRTTLM

SEQ ID NO: 18658 - protein, 434 aa, Saccharomyces cerevisiae; identical to SEQ ID NO: 464

SEQ ID NO: 18659 - protein, 645 aa, Desulfitobacterium hafniense
MILIAIMLIRFANPPATQPLDMDYTKFYEAVVTGQVEEVVISTDDNVNTYEVKTKDGQQYVVLGEAKDVDLSAQMNEHKVNVRVNPPVTTPWWAGLITTVLPFLLIGGFIFFMMQQSQGGGNRVMQFGKSRAKLVTDEKKKVTFADVAGADEVKEELEEVVEFLKFPKKFNELGAKIPKGVLLFGPPGTGKTLLARAVAGEAGVPFFSISGSDFVEMFVGVGASRVRDLFEQAKKNAPCIVFIDEIDAVGRQRGAGLGGGHDEREQTLNQLLVEMDGFNGNEGIIIIAATNRPDILDPALLRPGRFDRQVVVDVPDVKGREEILKVHVKGKPMHNDVELDVLARRTPGFTGADLANLVNEAALLSARRNEKEIKMNALEDSVERVIAGPEKKARVISDYEKKLVSYHEAGHALVGEMLTHTDPLHKVSIIPRGRAGGYTLLLPKEDRNYMTKSHLLDQVTMLLGGRVAEALVLHEISTGASNDLERATGLVRKMITELGMSEELGPLTFGQKEGQVFLGRDIARDRNYSEAVAYSIDKEARRMIDECYLKAQTIIQENMHKLNAIAQTLMEKETIEAKEFAELMARFDQPVETAQVSEPSETENNTTEHDDLLPATGETSVEGEDRTEAEGLSGSTLEEEKNKID

SEQ ID NO: 18660 - protein, 1025 aa, Yarrowia lipolytica
MPSISHKPITAKLVAAPDATKLELSSYLYQQLFSDKPAEPYVAFEAPGIKWALYPASEDRSLPQYTCKADIRHVAGSLKKFMPVVLKRVNPVTIEHAIVTVPASQYETLNTPEQVLKALEPQLDKDRPVIRQGDVLLNGCRVRLCEPVNQGKVVKGTTKLTVAKEQETIQPADEAADVAFDIAEFLDFDTSVAKTRESTNLQVAPLEGAIPTPLSDRFDDCESRGFVKSETMSKLGVFSGDIVSIKTKNGAERVLRLFAYPEPNTVKYDVVYVSPILYHNIGDKEIEVTPNGETHKSVGEALDSVLEAAEEVKLARVLGPTTTDRTFQTAYHAGLQAYFKPVKRAVRVGDLIPIPFDSILARTIGEDPEMSHIPLEALAVKPDSVAWFQVTSLNGSEDPASKQYLVDSSQTKLIEGGTTSSAVIPTSVPWREYLGLDTLPKFGSEFAYADKIRNLVQISTSALSHAKLNTSVLLHSAKRGVGKSTVLRSVAAQCGISVFEISCFGLIGDNEAQTLGTLRAKLDRAYGCSPCVVVLQHLESIAKKSDQDGKDEGIVSKLVDVLADYSGHGVLLAATSNDPDKISEAIRSRFQFEIEIGVPSEPQRRQIFSHLTKSGPGGDSIRNAPISLRSDVSVENLALQSAGLTPPDLTAIVQTTRLRAIDRLNKLTKERPIATLDDLLTLSHGTLQLTPSDFDDAIADARQKYSDSIGAPRIPNVGWDDVGGMEGVKKDILDTIETPLKYPHWFSDGVKKRSGILFYGPPGTGKTLLAKAIATTFSLNFFSVKGPELLNMYIGESEANVRRVFQKARDAKPCVVFFDELDSVAPQRRNQGDSGGVMDRIVSQLLAELDGMSTAGGEGVFVVGATNRPDLLDEALLRPGRFDKMLYLGISDTHEKQQTIMEALTRKFRLAADVSLEAISKRCPFTFTGADFYALCSDAMLNAMTRTANEVDAKIKLLNKNREEAGEEPVSIRWWFDHEATKSDIEVEVAQQDFEKAKDELSPSVSAEELQHYLKLRQQFEGGKK

SEQ ID NO: 18661 - protein, 1023 aa, Yarrowia lipolytica
MTSKSDYSGKDKIELDPVFAKSIDLLPNTQVVIDIQLNPKIAHTIHLEPVTVADWEIVELHAAYLESRMINQVRAVSPNQPVTVYPSSTTSATLKVIRIEPDLGAAGFAKLSPDSEVVVAPKQRKKEEKQVKKRSGSARSTGSQKRKGGRGPHALRRAISEDFDGHLRLEVSLDVSQLPPEFHQLKNVSIKVITPPNLASPQQAASIAVEEKSEESLSQNKPPSSEPKVEVLPDIINPASEIVATLVNDTTSPTGHAKLSYALADALGIPSSVGHVIRFESASKPLSQKPGALVIHRFITKTVGAAEQKSLRLKGEKNADDGVSADDQFSLLEELKKLQMLEGPITNFQRLPPIPELLPLGGVIGLQNSEGWIQGGYLGEEPIPFVSGSEILRSESSLSPSNIESEDKRVVGLDNMLNKINEVLSRDSIGCLDYGSRGSGKSAVLNHIKKECKVSHTHTVSIACGLIAQDRVQAVREILTKAFLEASWFSPSVLFLDDIDALMPAEVEHADSSRTRQLTQLFLELALPIMKSRHVSVVASAQAKESLHMNLVTGHVFEELFHLKSPDKEARLAILSEAVKLMDQNVSFSQNDVLEIASQVDGYLPGDLWTLSERAQHEMALRQIEIGLENPSIQLADFMKALEDFVPSSLRGVKLQKSNVKWNDIGGLKETKAVLLETLEWPTKYAPIFASCPLRLRSGLLLYGYPGCGKTYLASAVAAQCGLNFISIKGPEILNKYIGASEQSVRELFGAQAAKPCILFFDEFDSIAPKRGHDSTGVTDRVVNQMLTQMDGAEGLDGVYVLAATSRPDLIDPALLRPGRLDKMLICDLPSYEDRLDILRAIVDGKMHLDGEVELEYVASRTDGFSGADLQAVMFNAYLEAIHEVVDVADDTAADTPALEDKRLEFFQTTLGDAKKDPAAVQNEVMNARAAVAEKARVTAKLEALFKGMSVGVDNDDDKPRKKAVVVIKPQHMNKSLDETSPSISKKELLKLKGIYSQFVSGRSGDMPPGTASTDVGGRATLA

SEQ ID NO: 18662 - protein, 423 aa, Aspergillus niger
MGDVAVETPANNVTPLTKAAPLDTIPNIDSLEGTGNDGSDEYATLKRLQRHLEYIQLQEEYIKDEQRSLKRELVRAQEEIKRIQSVPLVIGQFMEAIDQNTGIVQSSTGSNYVVRILSTLDREKLKPSSSVALHRHSNALVDILPPEADSSIAMLGENEKPDVTYADVGGLDMQKQEIREAVELPLTQFDLYKQIGIDPPRGVLLYGPPGTGKTMLVKAVANSTTASFIRVNGSEFVQKYLGEGPRMVRDVFRMARENSPAIIFIDEIDAIATKRFDAQTGADREVQRILLELLNQMDGFEQSSNVKVIMATNRADTLDPALLRPGRLDRKIEFPSLRDRRERRLIFSTIASKMSLSPEVDLDSLIVRNEPLSGAVIAAIMQEAGLRAVRKNRYNIIPRSDLEDAYAAQVKTGQEADRLEFYR

SEQ ID NO: 18663 - protein, 647 aa, Escherichia coli
MSDMAKNLILWLVIAVVLMSVFQSFGPSESNGRKVDYSTFLQEVNNDQVREARINGREINVTKKDSNRYTTYIPVQDPKLLDNLLTKNVKVVGEPPEEPSLLASIFISWFPMLLLIGVWIFFMRQMQGGGGKGAMSFGKSKARMLTEDQIKTTFADVAGCDEAKEEVAELVEYLREPSRFQKLGGKIPKGVLMVGPPGTGKTLLAKAIAGEAKVPFFTISGSDFVEMFVGVGASRVRDMFEQAKKAAPCIIFIDEIDAVGRQRGAGLGGGHDEREQTLNQMLVEMDGFEGNEGIIVIAATNRPDVLDPALLRPGRFDRQVVVGLPDVRGREQILKVHMRRVPLAPDIDAAIIARGTPGFSGADLANLVNEAALFAARGNKRVVSMVEFEKAKDKIMMGAERRSMVMTEAQKESTAYHEAGHAIIGRLVPEHDPVHKVTIIPRGRALGVTFFLPEGDAISASRQKLESQISTLYGGRLAEEIIYGPEHVSTGASNDIKVATNLARNMVTQWGFSEKLGPLLYAEEEGEVFLGRSVAKAKHMSDETARIIDQEVKALIERNYNRARQLLTDNMDILHAMKDALMKYETIDAPQIDDLMARRDVRPPAGWEEPGASNNSGDNGSPKAPRPVDEPRTPNPGNTMSEQLGDK

SEQ ID NO: 18664 - protein, 257 aa, Escherichia coli
MLTEDQIKTTFADVAGCDEAKEEVAELVEYLREPSRFQKLGGKIPKGVLMVGPPGTGKTLLAKAIAGEAKVPFFTISGSDFVEMFVGVGASRVRDMFEQAKKAAPCIIFIDEIDAVGRQRGAGLGGGHDEREQTLNQMLVEMDGFEGNEGIIVIAATNRPDVLDPALLRPGRFDRQVVVGLPDVRGREQILKVHMRRVPLAPDIDAAIIARGTPGFSGADLANLVNEAALFAARGNKRVVSMVEFEKAKDKIMMGLE

SEQ ID NO: 18665 - protein, 438 aa, Leishmania major
MGQNMPKPPGAGKPEKWEPPVAPEIGKRKKKRGPDAATRIPKVYPNRACLLRKYRLERCKDYLLLEEEFLRTINAQRDAQSNLEEGAMGHYEAELKRVEDIRGTPLEVATLEEAVDDSHAIVSISGTEYYVPLMSFVDKEQLELGCSVLLHDRQHSIVGVLKDDVDPLVSVMKVDKAPEDTYADIGGLEQQIQEIKEAVEFPLSHPELYDEIGIKPPKGVILYGVPGTGKTLLAKAVANRTSATFLRVVGSELIQKYSGEGPKLVRELFRVAEEHSPAIVFIDEIDAIGTKRYDTDSSGTKEVQRTMLELLTQLDGFDSSNDVKVIMATNRIDTLDPALIRPGRIDRKIEFPFPDEKTKRRIFEIHTSRMSLAEDVDISEFIHAKDEMSGADVKAICTEAGLLALRERRMKVCQADFIKGKENVQYRKDKSTFSRFYL

SEQ ID NO: 18666 - protein, 772 aa, Entamoeba histolytica
MSQDVQVQVPMNEEEPKKIIVKKHRLIVEESKEDDMSIVYMNPQRMEELNFFEGDSILIKGKRRKSTVCIVMAEEGLTENMIRLHRMTRYNLRVKLGDVVGVETPQNVPYAIKIHVLPIDDTVEGITGDLFETYIRPYFSDVFRPIKKDDHFLCHGGMRTVEFKVVDIDPSPYALVVNDTIIHCEGEPIKREDEERPDDLGYDDIGGCRRQLGQIREMVELPLRHPQLFQAIGIKPPKGVLLYGPPGCGKTMIARAVANETGVFLILINGPEIMSKMAGESEGNLREAFAEAEKNAPALIFIDEIDSIAPKRDKAQGEVERRVVAQLLTLMDGMKSRSNVIVMAATNRPNAIDSALRRFGRFDREIDIGVPDETGRLEILNIHTKKMKIADDVDLLQIAKETHGYVGADLAQLCTEAAMLCIRENMAHVDVEADSIPVEVLNGMKVTMEHFRNVMKTCTPSALRETVVEIPNVKWEDIGGLEDVKRELKEVVQYPVEFPDKFTKFGMEPSKGVLFFGPPGCGKTLLAKAVASQCKANFISIKGPELLTMWYGESEANVRDVFDKARQAAPCVLFFDELDSIGRARGGGAGDAGGSADRILNQLLTEMDGVGKKKQVFIIGATNRPDILDPALLRPGRLDQLLFIPLPDKASRISILQAKLRNSPVAPDVDLDWIAEHTENFSGADLAEIVQRACKEAIRDTINELAVAEAEKAAQPEDQKMEIEVKPMIKVKHFNAALRDARRSVSDIEIQRYNMYAETLLQRRSIGNFSFN

SEQ ID NO: 18667 - protein, 414 aa, Naegleria fowleri
MLNTSTSGGSGVHVVLASSSSASVNGLKNYYIAKIQEKEIVLRDKIENLRRLQAQRNELNGRVRSLKEELQQLQEPGSHVGEVVKVMGKKKVLIKISQEGKYIVDIDKSIELKDLTPGVRVALRNDSYALHKILPNKIDPLVSLMKVEKVPDATYEMVGGLDEQIKEIKEVIELPIKHPELFESLGIAQPKGVIMYGPPGTGKTLLARAVAHHTDCTFIRVSGSELVQKYIGEGSKMVRELFVMAREHAPSIIFMDEIDSIGSTRTEGGKGGGDSEVQRTMLELLNQLDGFESTQNIKIIMATNRIDILDPALLRPGRIDRKIEFPNPNELARLDILKIHSRRMNLTRGINLRKIASMLGGASGAEIKATCTEAGMFALRERRVHVTQEDLEMAVAKVMKRGDESNMSFKKLFK

SEQ ID NO: 18668 - protein, 618 aa, Prochlorococcus marinus subsp. pastoris str. CCMP1378
MNKRWRNVGLYVLAVITVIFIGTSVFDKPKTENATKTLRYSDFIEAVQDKEVSRVLLSPDSGTAQVVENDGSRSEVNLAPDKDLLKILTENDVDIAVTPTKLANPWQQAISSLIFPVLLIGGLFFLFRRSQNGSGGGGGNPAMSFGKSKARLQMEPSTQVTFSDVAGVEGAKLELTEVVDFLKSPDRFTAVGAKIPKGVLLVGPPGTGKTLLAKAVAGEAGVPFFSISGSEFVEMFVGVGASRVRDLFEQAKKNAPCIVFIDEIDAVGRQRGAGMGGGNDEREQTLNQLLTEMDGFEGNSGIIIVAATNRPDVLDSALMRPGRFDRQVTVDRPDYAGRLQILNVHAKDKTLSKDVDLDKVARRTPGFTGADLANLLNEAAILAARKDLDTVSNDEVGDAIERVMAGPEKKDRVISDRKKELVAYHEAGHALVGACMPDYDAVAKVSIIPRGQAGGLTFFTPSEERMESGLYSRSYLQNQMAVALGGRVAEEIVYGEEEVTTGASNDLQQVANVARQMITKFGMSDKIGPVALGQSQGGMFLGRDMSATRDFSEDTAATIDVEVSELVDTAYKRATKVLSDNRSVLDEMASMLIERETIDTEDIQDLLNRSEVKVANYI

SEQ ID NO: 18669 - protein, 596 aa, Buchnera sp.
MSIFQNFNTNDVNNHKVDYSTFLSEVNQDQIREAYINGRMISVTKKDSSKYTTYIPINDPKLLDNLLVKRVKIIGAIPEEPSLFISILISWFPMLLLIGVWIFFMRQMQMGGGKGAMSFGKSKARMLSEDQIQTTFADVAGCDEAKEEVSELVEYLKEPSRFQKLGGKIPKGILMVGPPGTGKTLLAKAIAGEAKVPFFTISGSDFVEMFVGVGASRVRDMFEHSRKSAPCIIFIDEIDAVGRQRGAGLGGGHDEREQTLNQMLVEMDGFDGNEGIILIAATNRPDVLDPALLRPGRFDRQVIVALPDIRGREQILKVHMRKVPLSKDVDPMIIARGTPGFSGADLANLVNEAALFAARLDKRVVSMLEFERAKDKMMMGSERRSMVMSDFQKESTAYHEAGHVIIGRLVPDHDPAHKVTIIPRGRALGVTFFLPESDTLSISRQKLESQISTLYGGRLAEEIIYGAKNVSTGAYNDIKIATSLAKNMVTQWGFSEKLGPLLYAEEEGEIFLGRSVAKAKHMSDETARIIDEEVKLLIEINYSRARNILNENIDILHAMKEALIKYETIDAFQIDDLMKRREVRQPKGWIETDTNK

SEQ ID NO: 18670 - protein, 651 aa, Vibrio cholerae
MSDMAKNLILWLVIAVVLMSVFQSFGPGENNGRAVDYTTFVKEVGQGQIQEAQFNNGEITFMRRGGGSRYVTYMPVYDQKLLDDLINQDVKVQGTPPEEQSLLGTIFISWFPMILLIGVWIFFMRQMQGGGGKGAMSFGKSKARMMSEDQIKTTFSDVAGCDEAKEDVKELVDYLRDPSRFQKLGGKIPTGVLMVGPPGTGKTLLAKAIAGEAKVPFFTISGSDFVEMFVGVGASRVRDMFEQAKKASPCIIFIDEIDAVGRQRGAGVGGGHDEREQTLNQMLVEMDGFEGNEGIIVIAATNRPDVLDPALLRPGRFDRQVVVGLPDVRGREQILKVHMRKVPLANDVEPSLIARGTPGFSGADLANLVNEAALFAARGNKRNVSMVEFELAKDKIMMGAERRSMVMSEEIKESTAYHEAGHAVVGRLVPEHDPVYKVSIIPRGRALGVTMYLPEQDRVSMSKQHLESMISSLYGGRLAEELIYGKEKVSTGASNDIERATEIARKMVTQWGFSEKLGPMLYAEDEGEVFLGRSVTQTKHMSDDTAKLIDDEVRQIIDRNYERARQIIMDNMDIMHAMKDALMKYETIDAGQIDDLMARKPVIREPAGWGEQSKTPSAPEVKAEPEAKAEESTAETASSDVATASEKKDAE

SEQ ID NO: 18671 - protein, 635 aa, Haemophilus influenzae Rd
MVKNLVLWVVVAVIMMTAYQSFNSSSVENSTDYTTFVYDVSNGQVTAARFDANEITVTKTDGSKYSTVMPPLEDKKLLDDLLSKKVKVEGTPFERRGFLSQILISWFPMLFLVGVWVFFMRQMQGGGGKAMSFGKSRAKMLNQDQIKVTFADVAGCDEAKEEVGEIVDFLRDPNKFQNLGGKIPKGILMVGPPGTGKTLLARAIAGEAKVPFFTISGSDFVEMFVGVGASRVRDMFEQAKKNAPCLIFIDEIDAVGRQRGAGLGGGHDEREQTLNQMLVEMDGFSGNDGVIVIAATNRPDVLDPALTRPGRFDRQVVVGLPDVKGREQILKVHMRKVSVAQDVDAMTLARGTPGYSGADLANLVNEAALFAARVNKRTVTMLEFEKAKDKINMGPERRTMIMTDKQKESTAYHEAGHAIVGYLVPEHDPVHKVTIIPRGRALGVTFFLPEGDQISISQKQLESKLSTLYAGRLAEDLIYGEENISTGASNDIKVATNIARNMVTQWGFSEKLGPILYTEDEGEVFLGRSMAKAKHMSDETAHSIDEEVRAIVNRNYARAREILIDNMDILHAMKDALVKYETIEEEQIKQLMNREPVTPPSGWGEPKTQQAAYANSTTNDTKPESAVENTDDFNV

SEQ ID NO: 18672 - protein, 639 aa, Pasteurella multocida
MVKNLVLWIVVAVVMMTAYQGFNSSSSGNTTDYTTFITDLGNDQIRQARFDYNEIFVTKTDGSKYTTVMPLNDDKLLNDLLNKKVKVEGTLPEKRGLFSQILISWFPMLLLIGVWFFFMRQMQGGGSKAMSFGKSRARMMTQEQIKTTFADVAGCDEAKEEVGEIVDFLRDPGKFQKLGGKIPKGILMVGPPGTGKTLLAKAIAGEAKVPFFTISGSDFVEMFVGVGASRVRDMFEQAKKNAPCLIFIDEIDAVGRQRGAGLGGGHDEREQTLNQMLVEMDGFEGNEGVIVIAATNRPDVLDPALTRPGRFDRQVVVGLPDVRGREQILKVHMRRVPIAPDVDAMTLARGTPGYSGADLANLVNEAALFAARTNKRLVTMLEFEKAKDKINMGPERRTMIMTEKQKESTAYHEAGHAIVGYLVPEHDPVHKVTIIPRGRALGVTFFLPEGDQVSISQKQLESKLSTLYAGRLAEDLIYGEENISTGASNDIKVATNIARNMVTQWGFSEKLGPILYSEDDGEVFLGRSMAKAKHMSDETAHLIDEEVRTIVTRNYERARQILIDNMDILHAMKDALVKYETIEEEQIEQLMKRQPVTPPSGWDENEPTTQNNAGTKASPEPKSAVETEQDSDHQSPSDK

SEQ ID NO: 18673 - protein, 440 aa, Danio rerio
MGQSQSGGQGPGGGKKDDKDKKKKYEPPIPTRVGKKKKKVKGPDAASKLPLVTPHTQCRLKLLKQERIKDYLLMEEEFIRDQEQMKPLEEKQEEERSKVDDLRGTPMSVGTLEEIIDDNHAIVSTSVGSEHYVSILSFVDKDLLEPGCSVLLNHKVHAVIGVLMDDTDPLVTVMKVEKAPQETYADIGGLDSQIQEIKESVELPLTHPEYYEEMGIKPPKGVILYGAPGTGKTLLAKAVANQTSATFLRVVGSELIQKYLGDGPKLVRELFRVAEEHAPSIVFIDEIDAIGTKRYDSNSGGEREIQRTMLELLNQLDGFDSRGDVKVIMATNRIETLDPALIRPGRIDRKIEFPLPDEKTKRRIFQIHTSRMTVADDVTLDDLILAKDDLSGADIKAICTEAGLMALRERRMKVTNEDFKKSKENVLYKKQEGTPEGLYL

SEQ ID NO: 18674 - protein, 913 aa, Chlamydia trachomatis
MAKDKKTNPESKKSFPTAFFFLLFGVIFGVVTVQNFFSAKKASVGFSHQLEHLVNLKLLIPEESRKTALNDNLVSFSGRFREVVPAEGQVRYQYLDLIERKHQIDFELEEASKSLTVLSKEVRNAITWFSAISGMPIPEAGYTISPRTDVGLSVLEPLVVYGPVDAQIVNLAALENRVRSLPKSTESLRVFGSDLYALIGKYLSPALGIGSESLKKEIKDLHQQVENSLTQVIEGDQAVALYKTVLETLHRISLALVSPEEGTRFHQLRSVRLYREDFNRCVKLLGESDETQVQLDKLRGELVQAVWYFNNQELSSRALEKQDPEVFSRWFEGAKQEWAAFSSNKSLSFRAPDQPRNLVLEKTFRSEEPTPHYSGYLFTFMPIILVLLFIYFIFSRQVKGMNGSAMSFGKSPARLLAKGQNKVTFADVAGIEEAKEELVEIVDFLKNPTKFTSLGGRIPKGILLIGAPGTGKTLIAKAVAGEADRPFFSIAGSDFVEMFVGVGASRIRDMFEQAKRNAPCIIFIDEIDAVGRHRGAGIGGGHDEREQTLNQLLVEMDGFGTNEGVILMAATNRPDVLDKALLRPGRFDRRVVVNLPDIKGRFEILAVHAKRIKLDPTVDLMAVARSTPGASGADLENLLNEAALLAARKDRTAVTAVEVAEARDKVLYGKERRSLEMDAQEKKTTAYHESGHAIVGLCVEHSDPVDKVTIIPRGLSLGATHFLPEKNKLSYWKKELYDQLAVLMGGRAAEQIFLGDVSSGAQQDIAQATKIVRSMICEWGMSDHLGTVAYDERSEAAPTGYGSCHEKNYSEETAKAIDNELKTLLDAAYQRALDIINSHKEELELMTQMLIEFETLDSKDVKEIMDHSWDADKKQARMKEEGMLYKKISEDLPPPPPQENVQDGTSLKFNTST

SEQ ID NO: 18675 - protein, 760 aa, Mycobacterium tuberculosis CDC1551
MNRKNVTRTITAIAVVVLLGWSFFYFSDDTRGYKPVDTSVAITQINGDNVKSAQIDDREQQLRLILKKGNNETDGSEKVITKYPTGYAVDLFNALSAKNAKVSTVVNQGSILGELLVYVLPLLLLVGLFVMFSRMQGGARMGFGFGKSRAKQLSKDMPKTTFADVAGVDEAVEELYEIKDFLQNPSRYQALGAKIPKGVLLYGPPGTGKTLLARAVAGEAGVPFFTISGSDFVEMFVGVGASRVRDLFEQAKQNSPCIIFVDEIDAVGRQRGAGLGGGHDEREQTLNQLLVEMDGFGDRAGVILIAATNRPDILDPALLRPGRFDRQIPVSNPDLAGRRAVLRVHSKGKPMAADADLDGLAKRTVGMTGADLANVINEAALLTARENGTIITGPALEEAVDRVIGGPRRKGRIISEQEKKITAYHEGGHTLAAWAMPDIEPIYKVTILARGRTGGHAVAVPEEDKGLRTRSEMIAQLVFAMGGRAAEELVFREPTTGAVSDIEQATKIARSMVTEFGMSSKLGAVKYGSEHGDPFLGRTMGTQPDYSHEVAREIDEEVRKLIEAAHTEAWEILTEYRDVLDTLAGELLEKETLHRPELESIFADVEKRPRLTMFDDFGGRIPSDKPPIKTPGELAIERGEPWPQPVPEPAFKAAIAQATQAAEAARSDAGQTGHGANGSPAGTHRSGDRQYGSTQPDYGAPAGWHAPGWPPRSSHRPSYSGEPAPTYPGQPYPTGQADPGSDESSAEQDDEVSRTKPAHG

SEQ ID NO: 18676 - protein, 760 aa, Mycobacterium tuberculosis H37Rv
MNRKNVTRTITAIAVVVLLGWSFFYFSDDTRGYKPVDTSVAITQINGDNVKSAQIDDREQQLRLILKKGNNETDGSEKVITKYPTGYAVDLFNALSAKNAKVSTVVNQGSILGELLVYVLPLLLLVGLFVMFSRMQGGARMGFGFGKSRAKQLSKDMPKTTFADVAGVDEAVEELYEIKDFLQNPSRYQALGAKIPKGVLLYGPPGTGKTLLARAVAGEAGVPFFTISGSDFVEMFVGVGASRVRDLFEQAKQNSPCIIFVDEIDAVGRQRGAGLGGGHDEREQTLNQLLVEMDGFGDRAGVILIAATNRPDILDPALLRPGRFDRQIPVSNPDLAGRRAVLRVHSKGKPMAADADLDGLAKRTVGMTGADLANVINEAALLTARENGTVITGPALEEAVDRVIGGPRRKGRIISEQEKKITAYHEGGHTLAAWAMPDIEPIYKVTILARGRTGGHAVAVPEEDKGLRTRSEMIAQLVFAMGGRAAEELVFREPTTGAVSDIEQATKIARSMVTEFGMSSKLGAVKYGSEHGDPFLGRTMGTQPDYSHEVAREIDEEVRKLIEAAHTEAWEILTEYRDVLDTLAGELLEKETLHRPELESIFADVEKRPRLTMFDDFGGRIPSDKPPIKTPGELAIERGEPWPQPVPEPAFKAAIAQATQAAEAARSDAGQTGHGANGSPAGTHRSGDRQYGSTQPDYGAPAGWHAPGWPPRSSHRPSYSGEPAPTYPGQPYPTGQADPGSDESSAEQDDEVSRTKPAHG

SEQ ID NO: 18677 - protein, 728 aa, Mycobacterium tuberculosis H37Rv
MTHPDPARQLTLTARLNTSAVDSRRGVVRLHPNAIAALGIREWDAVSLTGSRTTAAVAGLAAADTAVGTVLLDDVTLSNAGLREGTEVIVSPVTVYGARSVTLSGSTLATQSVPPVTLRQALLGKVMTVGDAVSLLPRDLGPGTSTSAASRALAAAVGISWTSELLTVTGVDPDGPVSVQPNSLVTWGAGVPAAMGTSTAGQVSISSPEIQIEELKGAQPQAAKLTEWLKLALDEPHLLQTLGAGTNLGVLVSGPAGVGKATLVRAVCDGRRLVTLDGPEIGALAAGDRVKAVASAVQAVRHEGGVLLITDADALLPAAAEPVASLILSELRTAVATAGVVLIATSARPDQLDARLRSPELCDRELGLPLPDAATRKSLLEALLNPVPTGDLNLDEIASRTPGFVVADLAALVREAALRAASRASADGRPPMLHQDDLLGALTVIRPLSRSASDEVTVGDVTLDDVGDMAAAKQALTEAVLWPLQHPDTFARLGVEPPRGVLLYGPPGCGKTFVVRALASTGQLSVHAVKGSELMDKWVGSSEKAVRELFRRARDSAPSLVFLDELDALAPRRGQSFDSGVSDRVVAALLTELDGIDPLRDVVMLGATNRPDLIDPALLRPGRLERLVFVEPPDAAARREILRTAGKSIPLSSDVDLDEVAAGLDGYSAADCVALLREAALTAMRRSIDAANVTAADLATARETVRASLDPLQVASLRKFGTKGDLRS

SEQ ID NO: 18678 - protein, 644 aa, Escherichia coli K12
MAKNLILWLVIAVVLMSVFQSFGPSESNGRKVDYSTFLQEVNNDQVREARINGREINVTKKDSNRYTTYIPVQDPKLLDNLLTKNVKVVGEPPEEPSLLASIFISWFPMLLLIGVWIFFMRQMQGGGGKGAMSFGKSKARMLTEDQIKTTFADVAGCDEAKEEVAELVEYLREPSRFQKLGGKIPKGVLMVGPPGTGKTLLAKAIAGEAKVPFFTISGSDFVEMFVGVGASRVRDMFEQAKKAAPCIIFIDEIDAVGRQRGAGLGGGHDEREQTLNQMLVEMDGFEGNEGIIVIAATNRPDVLDPALLRPGRFDRQVVVGLPDVRGREQILKVHMRRVPLAPDIDAAIIARGTPGFSGADLANLVNEAALFAARGNKRVVSMVEFEKAKDKIMMGAERRSMVMTEAQKESTAYHEAGHAIIGRLVPEHDPVHKVTIIPRGRALGVTFFLPEGDAISASRQKLESQISTLYGGRLAEEIIYGPEHVSTGASNDIKVATNLARNMVTQWGFSEKLGPLLYAEEEGEVFLGRSVAKAKHMSDETARIIDQEVKALIERNYNRARQLLTDNMDILHAMKDALMKYETIDAPQIDDLMARRDVRPPAGWEEPGASNNSGDNGSPKAPRPVDEPRTPNPGNTMSEQLGDK

SEQ ID NO: 18679 - protein, 920 aa, Chlamydia muridarum
MISIVVSFMAKDKKTNPESKKSFPTAFFFLLFGVIFGVVTVQNFFSAKKASVGFSHQLEHLVNLKLLIPEESRKIALNDNLVSFSGRFRESVPAEGQVRYQYLNLIDRKHQIDFELEETTTSLSVLSKEVRNAVTWFSAISGMPIPESGYTISPRTDVGLSVLEPLVIHGPVSVQIVNLATLEDRVRSLPRSAESLRVFGSDLYALIGKYLSPALGIGSESLKKEIKDLYQQVESSLTQVVEGEQAITLYKTVLETLHRISLSLVSPEDGARFNQLRSVRLYREDFNRCMKLLGESDEIQAQLDKIRGELVQAVWYFNNQELSSRALEKQDPEVFSRWFEGAKQEWAAFSGNKSLSFRAPDQPRNLVLEKTFRSEEPTPHYSSYLFTFMPIILVLLFIYFIFSRQVKGMNGSAMSFGKSPARLLTKGQNKVTFADVAGIEEAKEELVEIVDFLKNPTKFTSLGGRIPKGILLIGAPGTGKTLIAKAVAGEADRPFFSIAGSDFVEMFVGVGASRIRDMFEQAKRNAPCIIFIDEIDAVGRHRGAGIGGGHDEREQTLNQLLVEMDGFGTNEGVILMAATNRPDVLDKALLRPGRFDRRVVVNLPDIKGRFEILSVHAKRIKLDPTVDLMAVARSTPGASGADLENLLNEAALLAARKDRTAVTAVEVAEARDKVLYGKERRSLEMDVQEKKTTAYHESGHAIVGLCVEHSDPVDKVTIIPRGLSLGATHFLPEKNKLSYWKKELYDQLAVLMGGRAAEQIFLGDVSSGAQQDIAQATKIVRSMICEWGMSDQLGTVAYDERSDAAPTGYGSYHEKNYSEETAKSIDNELKTLLDAAYQRALDIINSHKEELELMTQMLIEFETLDSKDVKEIMDHSWDAEKKRARMKEEGMLYKKVSEDLPPPPPQEDVQDGTLKFNIGT

SEQ ID NO: 18680 - protein, 632 aa, Helicobacter pylori 26695
MKPTNEPKKPFFQSPIILAVLGGILLIFFLRSFNSDGSFSDNFLASSTKNVSYHEIKQLISNNEVENVSIGQTLIKASHKEGNNRVIYIAKRVPDLTLVPLLDEKKINYSGFSESNFFTDMLGWLMPILVILGLWMFMANRMQKNMGGGIFGMGSAKKLINAEKPNVRFNDMAGNEEAKEEVVEIVDFLKYPERYANLGAKIPKGVLLVGPPGTGKTLLAKAVAGEAHVPFFSMGGSSFIEMFVGLGASRVRDLFETAKKQAPSIIFIDEIDAIGKSRAAGGVVSGNDEREQTLNQLLAEMDGFGSENAPVIVLAATNRPEILDPALMRPGRFDRQVLVDKPDFNGRVEILKVHIKGVKLANDVNLQEVAKLTAGLAGADLANIINEAALLAGRNNQKEVRQQHLKEAVERGIAGLEKKSRRISPKEKKIVAYHESGHAVISEMTKGSARVNKVSIIPRGMAALGYTLNTPEENKYLMQKHELIAEIDVLLGGRAAEDVFLEEISTGASNDLERATDIIKGMVSYYGMSSVSGLMVLEKQRNAFLGGGYGSSREFSEKTAEEMDLFIKNLLEERYKHVKQTLSDYREAIEIMVKELFDKEVITGERVREIISEYEVANNLESRLIPLEEQAS

SEQ ID NO: 18681 - protein, 550 aa, Helicobacter pylori 26695
MPFSKNLENLTAPFKRIKNRSLVLALGFLILTFCLLLFLILSDVSRLISGKDFFYVIQSHPKQTLIEDENYFYANKGLYKTNKEAFLRVYKIPESMPIERRENLSKVSKIFLALLFFISSMLFGIFWRLPKRLDTKMSLESAHKNELENAFQRYDALGVRFEDIAGVDEVKEELLEVIDYLKNPKKYQDLGIFLPKGVLLIGPPGVGKTMIAKALASEARVPFFYESGSAFSQIYVGAGAKKVHELFMHAKRHAPSIIFIDEIDALGKARGGHRSDEREATLNQLLTEMDGFLQNDEVVVIGATNQMEVMDEALLRSKRFDRRIFISLPDLLERQSILEKLLENKKHALNYLKIAKICVGFSGAMLATLINESALNALKHQRTEIAESDILEVKDKIAYGKKKPQTLDENQKELVALYQSAKALSAYWLEIEFDKAPILGEFIAFNENKIHSESEIKNYIKVYLSGTIILELLYKERYSLSKQDLQKAKFLNEFMASELLLAPTKESLSVLYEEQLEFLKPQIAACKRLSVLLLEQEYLEHSNLYDLLNG

SEQ ID NO: 18682 - protein, 632 aa, Helicobacter pylori J99
MKPTNEPKKPFFQSPIVLAVLGGILLIFFLRSFNSDGSFSDNFLASSTKNVSYHEIKQLISNNEVENVSIGQTLIKASHKEGNNRVIYIAKRVPDLTLVPLLDEKKINYSGFSESNFFTDMLGWLMPILVILGLWMFMANRMQKNMGGGIFGMGSAKKLINAEKPNVRFNDMAGNEEAKEEVVEIVDFLKYPERYANLGAKIPKGVLLVGPPGTGKTLLAKAVAGEAHVPFFSMGGSSFIEMFVGLGASRVRDLFETAKKQAPSIIFIDEIDAIGKSRAAGGMISGNDEREQTLNQLLAEMDGFGSENAPVIVLAATNRPEILDPALMRPGRFDRQVLVDKPDFNGRVEILKVHIKGVKLANDVNLQEVAKLTAGLAGADLANIINEAALLAGRNNQKEVKQQHLKEAVERGIAGLEKKSRRISPKEKKIVAYHESGHAVISEMTKGSTRVNKVSIIPRGMAALGYTLNTPEENKYLMQKHELIAEIDVLLGGRAAEEVFLEEISTGASNDLERATDIIKGMVSYYGMSSVSGLMVLEKQRNAFLGGGYGSSREFSEKTAEEMDLFIKNLLEERYQHVKQTLSDYREAIEIMVKELFDKEVITGERVREIISEYEAANNLESRLIPLEEQAS

SEQ ID NO: 18683 - protein, 550 aa, Helicobacter pylori J99
MPFSKFLENLTAPFKRIKNRSLVLALGFLILTFCLLLFLILSDVSRLISSKDFLYVIQSHPKQTLIEDENYFYANKGLYKTNKEAFLRVYKIPESMPIEKRESLSKVSKIFLALLFFISSMLFGIFWRLPKRLDTKMSLESAHKNELENAFQRYDALGVRFEDIAGVNEVKEELLEVIDYLKNPKKYQDLGIFLPKGVLLVGPPGVGKTMIAKALASEARVPFFYESGSAFSQIYVGAGAKKVHELFMHAKKHAPSIIFIDEIDALGKARGGHRSDEREATLNQLLTEMDGFLQNDEVVVIGATNQMEVMDEALLRSKRFDRRIFISLPDLLERQSILEKLLENKKHALDYLKIAKICVGFSGAMLATLINESALNALKHQRKEITHGDILEVKDKIAYGKKKPQTLDENQKELVALYQSAKALSAYWLEIEFDKASLLGEFIAFNENKIHSESEIKNYIKVYLSGTIILELLYKERYSLSKQDLQKAKFLNEFMASELLLAPTKESLSVLYEEQLEFLKPQIAACKRLSALLLEQECLEHANFYDLLNG

SEQ ID NO: 18684 - protein, 440 aa, Gallus gallus
MGQSQSGGHGPGGGKKDDKDKKKKYEPPVPTRVGKKKKKTKGPDAASKPPLVTPHTQCRLKLLKLERIKDYLLMEEEFIRNQEQMKPLEEKQEEERSKVDDLRGTPMSVGTLEEIIDDNHAIVSTSVGSEHYVSILSFVDKDLLEPGCSVLLNHKVHAVIGVLMDDTDPLVTVMKLEKAPQETYADIGGLDNQIQEIKESVELPLTHPEYYEEMGIKPPKGVILYGPPGTGKTLLAKAVANQTSATFLRVVGSELIQKYLGDGPKLVRELFRVAEEHGPSIVFIDEIDAIGTKRYDSNSGGEREIQRTMLELLNQLDGFDSRGDVKVIMATNRIETLDPALIRPGRIDRKIEFPLPDEKTKKRIFQIHTSRMTLADDVTLDELIMAKDDLSGADIKAICTEAGLMALRERRMKVTNEDFKKSKENFLYKKTEGTPEGLYL

SEQ ID NO: 18685 - protein, 644 aa, Salmonella enterica subsp. enterica serovar Typhi
MAKNLILWLVIAVVLMSVFQSFGPSESNGRKVDYSTFLQEVNQDQVREARINGREINVTKKDSNRYTTYIPINDPKLLDNLLTKNVKVVGEPPEEPSLLASIFISWFPMLLLIGVWIFFMRQMQGGGGKGAMSFGKSKARMLTEDQIKTTFADVAGCDEAKEEVAELVEYLREPSRFQKLGGKIPKGVLMVGPPGTGKTLLAKAIAGEAKVPFFTISGSDFVEMFVGVGASRVRDMFEQAKKAAPCIIFIDEIDAVGRQRGAGLGGGHDEREQTLNQMLVEMDGFEGNEGIIVIAATNRPDVLDPALLRPGRFDRQVVVGLPDVRGREQILKVHMRRVPLATDIDAAIIARGTPGFSGADLANLVNEAALFAARGNKRVVSMVEFEKAKDKIMMGAERRSMVMTEAQKESTAYHEAGHAIIGRLVPEHDPVHKVTIIPRGRALGVTFFLPEGDAISASRQKLESQISTLYGGRLAEEIIYGVEHVSTGASNDIKVATNLARNMVTQWGFSEKLGPLLYAEEEGEVFLGRSVAKAKHMSDETARIIDQEVKALIERNYNRARQILTDNMDILHAMKDALMKYETIDAPQIDDLMARREVRPPAGWEDPNGTNNSDSNGTPQAPRPVDEPRTPNPGNTMSEQLGDK

SEQ ID NO: 18686 - protein, 643 aa, Nitrosomonas europaea
MNNLIKNMAIWLVIALVLMTVFNQFSTRQPSQPPMEYSQFISEMHQGRIAKVVIDGRTLRGSKTDGRQFIVHSPSDPWLVSDLLKAGVSVEAKPEEEPSMLMSILVSWFPMLLLIAVWIFFMRQMQGGGRNGGAFSFGKSKARMLDHKNNNVTFADVAGCEEAKEEVAELVEFLRDPSRFQKLGGRIPRGVLMCGSPGTGKTLLARAIAGEAKVPFFSISGSDFVEMFVGVGASRVRDMFEQAKKHAPCIIFIDEIDAVGRQRGAGLGGGNDEREQTLNQLLVEMDGFEGNMGVIVIAATNRPDVLDPALLRPGRFDRQVVVPLPDIRGREQILQVHMRKVPVSPDVKAGILARGTPGMSGADLANLVNEAALFAARAGKRLVDMDDFERAKDKILMGAERRSVVMPENERRNTAYHESGHAVVAYLLPKTDPVHKVSIIPRGRALGVTMQLPSEDRYSMDRDQILQTIAVMFGGRIAEEVFMSQMTTGASNDFERATDTARKMVMQWGMSETLGPMVYGENEGEVFLGRSVTTHKNLSEATMQKVDAEIRRIIDEQYALARKLIEENKDKIEAMTQALLEWETIDSDQIKDIMEGRPPRPPQAPTSSARQDKGSAGSAASEVKQPAGEPATTEAPAAQKVEI

SEQ ID NO: 18687 - protein, 619 aa, Nitrosomonas europaea
MNNQSPMDKKAQINFWYVLIAVLSILFIQNLYNQYTRIEPIPYSRFQSLLEQDKVSEVAITDQQIFGKLKESTSEKFTEFVTTRVESDLAEMLDKHNVTYTGVVQSTWLRDLLSWIVPMAVFVGIWLFIIRRMNKGMMGSGLMSIGKSRAKVYVEKETKVTFANVAGVDEAKEELVEIVNFLKNPKEYSRLGGRAPKGILLVGPPGTGKTLLARAVAGEAGVPFFSISGSEFVEMFVGVGAARVRDLFEQARQMAPAIIFIDELDSLGRARGAGGFGGHDEKEQTLNQLLAELDGFDPSSGIVLLAATNRPEILDAALLRAGRFDRQVLVDRPDKKGRQQILGVHIGKITLAPDVDTEQIAALTPGFTGADLANLINEAALLATRRGGQAVSMDDFNNAIERIVAGLEKKNRLLNPEERRTVAYHELGHTMVALALPGSDEVHKVSIIPRGIGALGYTIQRPTEDRFLMTRKELENKMAVLLGGRAAERLVFDEISTGASDDLARATDIARAMVLRYGMSEAIGNVVYDREQMAFLQPGFPMPQSRDYSEETANKIDQTVRSLLDLALERAIKILDKNRELLDRTAQQLLETETLNQPELLELKRNLRAEETNPSTQQN

SEQ ID NO: 18688 - protein, 398 aa, Sus scrofa
MELEEGKAGSGLRQYYLSKIEELQLIVNDKSQNLRRLQAQRNELNAKVRLLREELQLLQEQGSYVGEVVRAMDKKKVLVKVHPEGKFVVDVDKNIDINDVTPNCRVALRNDSYTLHKILPNKVDPLVSLMMVEKVPDSTYEMIGGLDKQIKEIKEVIELPVKHPELFEALGIAQPKGVLLYGPPGTGKTLLARAVAHHTDCTFIRVSGSELVQKFIGEGARMVRELFVMAREHAPSIIFMDEIDSIGSSRLEGGSGGDSEVQRTMLELLNQLDGFEATKNIKVIMATNRIDILDSALLRPGRIDRKIEFPPPNEEARLDILKIHSRKMNLTRGINLRKIAELMPGASGAEVKGVCTEAGMYALRERRVHVTQEDFEMAVAKVMQKDSEKNMSIKKLWK

SEQ ID NO: 18689 - protein, 806 aa, Sus scrofa domestica
MASGADSKGDDLSTAILKQKNRPNRLIVDEAINEDNSVVSLSQPKMDELQLFRGDTVLLKGKKRREAVCIVLSDDTCSDEKIRMNRVVRNNLRVHLGDVISIQPCPDVKYGKRIHVLPIDDTVEGITGNLFEVYLKPYFLEAYRPIRKGDIFLVRGGMRAVEFKVVETDPSPYCIVAPDTVIHCEGEPIKREDEEESLNEVGYDDIGGCRKQLAQIKEMVELPLRHPALFKAIGVKPPRGILLYGPPGTGKTLIARAVANETGAFFFLINGPEIMSKLAGESESNLRKAFEEAEKNAPAIIFIDELDAIAPKREKTHGEVERRIVSQLLTLMDGLKQRAHVIVMAATNRPNSIDPALRRFGRFDREVDIGIPDATGRLEILQIHTKNMKLADDVDLEQVANETHGHVGADLAALCSEAALQAIRKKMDLIDLEDETIDAEVMNSLAVTMDDFRWALSQSNPSALRETVVEVPQVTWEDIGGLEDVKRELQELVQYPVEHPDKFLKFGMTPSKGVLFYGPPGCGKTLLAKAIANECQANFISIKGPELLTMWFGESEANVREIFDKARQAAPCVLFFDELDSIAKARGGNIGDGGGAADRVINQILTEMDGMSTKKNVFIIGATNRPDIIDPAILRPGRLDQLIYIPLPDEKSRVAILKANLRKSPVAKDVDLEFLAKMTNGFSGADLTEICQRACKLAIRESIESEIRRERERQTNPSAMEVEEDDPVPEIRRDHFEEAMRFARRSVSDNDIRKYEMFAQTLQQSRGFGSFRFPSGNQGGAGPSQGSGGGTGGSVYTEDNDDDLYG

SEQ ID NO: 18690 - protein, 414 aa, Matricaria chamomilla
MKPASSSADSGTESCSSKGVAKTGEGLRQYYLQHIHDAQLQVRQKTHNLNRLEAQRNELNSRVGMLKEELQLLQEPGSYVGEVVKVMGKSKVLVKVHPEGKYVVDIDKSIDITKITPSTRVALRNDSYVLHLVLPSKVDPLVNLMKVEKVPDSTYDMIGGLDQQIKEIKEVIELPIKHPELFESLGIAQPKGVLLYGPPGTGKTLLARAVAHHTDCAFIRVSGSELVQKYIGEGSRMVRELFVMAREHAPSIIFMDEIDSIGSARMESGSGNGDSEVQRTMLELLNQLDGFESSTKIKVLMATNRIDILDPALLRPGRIDREIEFPNPNEDSRFDILKIHSRKMNLMRGIDLKKIAEKMNGASGAELKAVCTEAGMFALRERRVHVTQEDFEMAVAKVMKKETEKNMSLRKLWK

SEQ ID NO: 18691 - protein, 70 aa, Oryza sativa
RAFIEDASGKDVLVLNVQDPFQRLLLHGVCEVNIFSTILENLNLHPNILSSSHNLSVCSSITYHLQPRLP

SEQ ID NO: 18692 - protein, 431 aa, Arabidopsis thaliana
MSLHVKGPVCQTCGDIGFEEALVFCDSCMFESIHRYCLGITPIPFTEYITWICEDCDNSESDSDCNEVDQTVKKKKKSRNQPLVVLAEDNVLQEPLEGSKREESSCSRKPHELTCLDGNGESVLEAADSSSVPDHSSCTSKRKEVDQTANLGHILERSEKKKKKKKKKKSINHSPPVLAVEDHELQGTTNVVEPVEVSSSSPTKETMESKRQESSDSRKPHELTCLVGDSETANSSSVPEHNSCAVKKRKLSSGNKQIQLADGSSSCRVAESNMPLTLTSRNYRAQPIKIPIWRGLMSVKGGNSCTMDGIVAHVSSLACPKVHETASSLKGRLSAEILPRLEVWPKTFLKNGGPKDESVALFFFPSSESNDEKVFDSLVDKMKKNDSAMRCVLNDAELLLFTSYMLPKDSWTFNSKYYLWGVFKPRQTSRY

SEQ ID NO: 18693 - protein, 168 aa, Glycine max
  unsure (1)..(168): unsure at all Xaa locations
XKTLPIFTTXSNVYAQPTINPIWRGSMYFCNETNGTVNGLLAHMSDLACSKVVEETGHFPEVLHAELLPRDKVWPESFKSRRPTDQDIALFIFPDGEGRSEKDFDKVVEDIMIHEHAIKIVAKKAELLIFHSIELPIKYWRFEAKYYLWGVFRRKQISEETNDAVCRD

SEQ ID NO: 18694 - protein, 171 aa, Glycine max
VQQSLGCHLLLTNLHLSQVDGHVYAQPTNEPIWRGSMYFCNGTIRTVSGLLAHISNLACSQVAEETGHFPEVLHAEFLPRDKVWAESFKRGDPTDQDIALFFFPDSEGSEKDFDVLVEDIMICKHVIRFVGKNAELLIFPSTELPVQNWRYEAKYYLWGVFRKKANLRRDK

SEQ ID NO: 18695 - protein, 948 aa, Oryza sativa (japonica cultivar-group)
SLDKRSQSSEVLLKRKKLRVATDMESPLSNDGVRSPPKSCKRYAENTLSSTPRLLKADSPRNHDVFSRENSFKSSNKGSIKSPDNAPMRSQAVNSSVTLPRSYSLGNLANVKTPGPSPRGLLSKQPSFNNSSNEPKVKQLAEPVLSKLKPSKHSPRDPRESIRKVMKSGPLKHEASICKGSSSSKQKQSVHSSQNEQPRILKPVKPTILLERGASFNLQKPNISSSPRPDSSIKSGDPRNDQDSPRPGPSILKSSKKPGIVENKHSSILSKSDEQGITSTGVVCSKDTCVVKASDPLIPMDKIKNDSTDGACESPLILVNNDNEMSTKPEVLSIPRASKTCGSDFQDIAPTSSSEDLPPEEVQYEQKVVESDGNISCKSAAAIQASEDLLPESPQGCLVAQNPYSPDTKSNDLNLKQQALVDQSSTVGSSLGALVIPEQSYIWQGTFEVSRPGSSPEMYDGFQAHLSTCASLKVLEIVKQLPQRIQLVEVPRHSSWPLQFKEVKPNEDNIALYFFAKDVESYERAYGKLLENMLAGDLSLTANICGIELLIFTSDKLPERTQRWNGLLFFWGVLYARKASSSTELLVKGMNHSPLEQINGPVNQLVCSPKMPQSLGIDLNECPVDELYDPAVSVQTEMENRGASVNHETLLRSNHEAERLNLCEIHFPETAGTGKILLGTPTAVPYGVHVHTSSKRECLNIKPEYPSDIIGSEGTAGRDNMEEEESFTKNGVPCFTKQHTGATTRSVSDEILANTQARVSFQEVSPQHSVRPKLSDDPSDSVLKDFVLPDSSSIYKRQKTSEGKYSTCSFGDGQLTSKCLSKIPLPADQHTSLDDVQYIGRVPADPCSPTKPILDHVIHVLSSDDEDSPEPRNNLNKTSLKEEEGPSPLLSLSLSMASKKHNLTGSDTGDDGPLSLSLGLPGVVTSNQALEMKQFLPEKPGMNTSLLL

SEQ ID NO: 18696 - protein, 460 aa, Lycopersicon esculentum
MAAKPIDDTIWRGSFMISRPEMRLNLTAHLSSKACAKVWLAAKEMAEVIYPEFLPKRDVWPKSFKSAKLIDDNIAIYFFSVKGRDDQVFENLLYNLRHYDIALRALVGDSELLIFTSAHLPEKHHIAGFEGKVYLWGVFSGRQAPPQESPDDCFIHNTRVTQASIPNSANDGKDRSCKEFSNRKDPSTASKSARKGRPLDDAWQHATPVDGKKQRTVCNYCGFISSSGGITYLKTHLGGGDPTGSLKGCPNVPPEVKRVMKEWLLGTIRGGKAPQLQEIRTDFEVPASKKSVRRGRPLDAAWDYATPVDAKRQRAVCKYCGFISSSGGITHLKAHLAGGDPKGPSKGCPNVPPEVKRAMAESLNRTVKGAKSMQPDEIRRYMKAENDWSPPRSDDYSLNQHRIVKNAQYSHFANGNSVNDMTLSKQSETAHVDSYMEVMSSHNACKSSFLSKPSTRVGFI

SEQ ID NO: 18697 - protein, 168 aa, Oryza sativa
FLNTKIGTNYIPVGAHFSNKACKKVCELSMSLPQIMKVTELPKLKAWPKSWEKASVPSAESIGLFFFSQNTRSNKEFDDLVKHVIDYDIVLETDVSFAKLLVFPSVVLPAEYRVFQGKHYLWGVFKRSKDMAERDALVEQNCTTCLADEDVPEQNALILCHVKPWIKK

SEQ ID NO: 18698 - protein, 171 aa, Triticum aestivum
MAFDSEFANQQSSMYSQPTDEPIWSGILKINNEVYISLTAHLSTTACGFVREFSRSLQPVVKVIKLPRLEAWPESWRTSRPTDGDIALYFFPPSASPNEESDGPVEEIIDSGAVLQAVIGVAELLIFPSTMLPAQYHLCQGKRYLWGMFKRREDESDNHETSAVKHVVHVE

SEQ ID NO: 18699 - protein, 214 aa, Triticum aestivum
RHEVSMSLPQIMKVTELPKLKAWPKSWEKASVPSAESIGLFFFSQNTRSNKEFDDLVKHVIDYDIVLETDVSFAKLLVFPSVVLPAEYRVFQGKHYLWGVFKRSKDMAERDALVEQNCTTCLADEDVPEQNALDIVPCKALDQEMALVVSDIHHDNQPSLTTSQVVESEASSDKGPSHPVINSPERPMYLILDTSCKVLKKWSCERMDTKLSML

SEQ ID NO: 18700 - protein, 232 aa, Triticum aestivum
PRVRYDEEEDAEALQAEDLNSRSCDDDEHVMKQRKCMENAAENQRRSIVEGKEALGSGNLNQYSKNHKQVKKQRSIEAEEDENASVRNPNAGCSRMPVISECIGGQPLDIPYWTGIMKINNNYIPLAAHLSTKAGKKVQELSRSLPPIMKVAKLSTSKSCPHFEASIPTADSIGLYFFSGDIRPNKELDELVKHLADSGSVLEAVVGLRKAVSLSFWCTTSATSDVPRETLS

SEQ ID NO: 18701 - protein, 116 aa, Triticum aestivum
SAHASGKTNNKSRFVVLDDEDDDDGDQNLIGSKSGAAGLKTQNYGSEPSKPHHYCSLPIDEPIWSGIIRIGSGKFVSLAAHLSTKYCEKVWKLSRSLEPVVEVSKLFRLEGWSKSF

SEQ ID NO: 18702 - protein, 217 aa, Hordeum vulgare subsp. vulgare
MDVGALSSDYSSGTPSPVGADGGNSEGFSTYMTVSSAPPKRRAGRTKFKETRHPVYKGVRRRNPGRWVCEVREPHSKQRIWLGTFETAEMAARAHDVAALALRGRAACLNFADSPRRLRVPAVGASPDEIRRAAVEAAEAFLPAPDQSNAPAEEVAAAPTMQFAGDPYYGMDDGMDFGMQGYLDMAQGMLIAPPPLVGPSATAGDGDDDGEVSLWSY

SEQ ID NO: 18703 - protein, 214 aa, Brassica napus
  unsure (1)..(214): unsure at all Xaa locations
MTSFSAFSEMMGSENESPALSGEYCPTLAASCPKKPAGRKKFRETRHPIYRGVRQRHSGKWVCEVREPNKKSRIWLGTFLTAEIAARAHDVAAIALRGKSACLNFADSAWRLRIPETTCPKDIQKAAAEAAVAFQAEINDTTTDHGLDVEETIVEAIFTEENNDGFYMDEEESMFGMPSLLASMAEGMLLPPPSVRFEHXYDFDGDAXVSLWSY

SEQ ID NO: 18704 - protein, 251 aa, Brassica napus
MNSVSTFSELLRSENESPVNTEGGDYILAASCPKKPAGRKKFQETRHPIYRGVRLRKSGKWVCEVREPNKKSRIWLGTFKTAEIAARAHDVAALALRGRGACLNFADSAWRLRIPETTCAKDIQKAAAEAALAFEAEKSDTTTNDHGMNMASQVEVNDTTDHDLDMEETIVEAVFREEQREGFYMAEETTVVGVVPEEQMSKGFYMDEEWMFGMPTLLADMAAGMLLPLPSVQWGHNDDFEGDADMNLWNY

SEQ ID NO: 18705 - protein, 250 aa, Brassica napus
MNSVSTFSELLGSENESPVGGDYCPMLAASCPKKPAGRKKFRETRHPIYRGVRLRKSGKWVCEVREPNKKSRIWLGTFKTAEIAARAHDVAALALRGRGACLNFADSAWRLRIPETTCAKDIQKAAAEAALAFEAEKSDTTTNDHGMNMASQAEVNDTTDHGLDMEETMVEAVFTEEQRDGFYMAEETTVEGVVPEEQMSKGFYMDEEWMFGMPTLLADMAAGMLLPPPSVQWGHNDDFEGDVDMNLWNY

SEQ ID NO: 18706 - protein, 250 aa, Brassica napus
MNSVSTFSELLGSENESPVGSDYCPMLAASCPKKPAGRKKFRETRHPIYRGVRLRKSGKWVCEVREPNKKSRIWLGTFKTAEIAARAHDVAALALRGRGACLNFADSAWRLRIPETTCAKDIQKAAAEAALAFEAEKSDTTTNDHGMNMASQVEVNDTTDHDLDMEETIVEAVFREEQREGFYMAEETTVVGVVPEEQMSKGFYMDEEWMFGMPTLLADMAAGMLLPLPSVQWGHNDDFEGVADINLWSY

SEQ ID NO: 18707 - protein, 214 aa, Brassica napus
MTSFSTFSEMLGSEYESPVTLGGEYCPKLAASCPKKPAGRKKFRETRHPVYRGVRLRNSGKWVCEVREPNKKSRIWLGTFLTAEIAARAHDVAAIALRGKSACLNFADSAWRLRIPETTCPKEIQKAAAEAALAFQAEINNTTTDHGLDMEETIVEAIFTEENNDVFYMDEESMLEMPALLASMAEGMLLPPPSVHFGHNYDFDGDADVSLWSY

SEQ ID NO: 18708 - protein, 215 aa, Brassica napus
  unsure (1)..(215): unsure at all Xaa locations
MTSFSTFSELLGSEHESPVTLGEEYCPKLAASCPKKPAGRKKFRETRHPVYRGVRLRNSGKWVCEVREPNKKSRIWLGTFLTAEIAARAHDVAAIALRGKSACLNFADSAWRLRIPETTCPKEIQKAAAEAAVAFKAEINNTTADHGIDVEETIVEAIFTEENNDGFYMDEEESMFGMPALLASXAEGMLLPPPSVQFGHTYDFDGDADVSLWSY

SEQ ID NO: 18709 - protein, 214 aa, Brassica napus
  unsure (1)..(214): unsure at all Xaa locations
MTSFSTFSEMLGSEYESPVTLGGEYCPKLAASCPKKPAGRKKFRETRHPVYRGXRLRNSGKWVCEVREPNKKSRIWLGTFLTAEIAARAHDVAAIALRGKSACLNFADSAWRLRIPETTCPKEIQKAAAEAALAFQAEINNTTTDHGLDMEETIVEAIFTEENNDVFYMDEESMLEMPALLASMAEGMLLPPPSVHFGHNYDFDGDADVSLWSY

SEQ ID NO: 18710 - protein, 268 aa, Secale cereale
MDVADIASRSGQQQQGHRTVSSEPPKRPAGRTKFHETRHPLYRGVRRRGRVGQWVCEVRVPGIKGSRLWLGTFNTAEMAARAHDAAVLALSGRAACLNFADSAWRMLPVLAAGSFGFDSAREVKAAVAVAVVAFQRKQIIPVAVAVVALQKQQVPVAVAVVALQQRQVPVTVAVVALQKLQVPVAVAVVALQKKQIILPAACLAPEFYMSSGDLLELDEEQWFGGMDAGSYYASLAQGMLVAPPDDRARPENGEQSGVQTPLWSCLFD

SEQ ID NO: 18711 - protein, 47 aa, Triticum aestivum
STSTTGSPPETMEDERIALQMIEELLSRSSPASPSHGLLHGEEGSLV

SEQ ID NO: 18712 - protein, 579 aa, Brassica napus
MNNNWLGFSLSPYEQNHHRKDVCSSTTTTAVDVAGEYCYDPTAASDESSAIQTSFPSPFGVVLDAFTRDNNSHSRDWDINGSACNNIHNDEQDGPKLENFLGRTTTIYNTNENVGDIDGSGCYGGGDGGGGSLGLSMIKTWLRNQPVDNVDNQENGNGAKGLSLSMNSSTSCDNNNYSSNNLVAQGKTIDDSVEATPKKTIESFGQRTSIYRGVTRHRWTGRYEAHLWDNSCKREGQTRKGRQVYLGGYDKEEKAARAYDLAALKYWGTTTTTNFPMSEYEKEIEEMKHMTRQEYVASLRRKSSGFSRGASIYRGVTRHHQHGRWQARIGRVAGNKDLYLGTFGTQEEAAEAYDIAAIKFRGLTAVTNFDMNRYNVKAILESPSLPIGSAAKRLKEANRPVPSMMMISNNVSESENNASGWQNAAVQHHQGVDLSLLQQHQERYNGYYYNGGNLSSESARACFKQEDDQHHFLSNTQSLMTNIDHQSSVSDDSVTVCGNVVGYGGYQGFAAPVNCDAYAASEFDYNARNHYYFAQQQQTQHSPGGDFPAAMTNNVGSNMYYHGEGGGEVAPTFTVWNDN

SEQ ID NO: 18713 - protein, 579 aa, Brassica napus
MNNNWLGFSLSPYEQNHHRKDVYSSTTTTVVDVAGEYCYDPTAASDESSAIQTSFPSPFGVVVDAFTRDNNSHSRDWDINGCACNNIHNDEQDGPKLENFLGRTTTIYNTNENVGDGSGSGCYGGGDGGGGSLGLSMIKTWLRNQPVDNVDNQENGNAAKGLSLSMNSSTSCDNNNDSNNNVVAQGKTIDDSVEATPKKTIESFGQRTSIYRGVTRHRWTGRYEAHLWDNSCKREGQTRKGRQVYLGGYDKEEKAARAYDLAALKYWGTTTTTNFPMSEYEKEVEEMKHMTRQEYVASLRRKSSGFSRGASIYRGVTRHHQHGRWQARIGRVAGNKDLYLGTFGTQEEAAEAYDIAAIKFRGLTAVTNFDMNRYNVKAILESPSLPIGSAAKRLKEANRPVPSMMMISNNVSESENSASGWQNAAVQHHQGVDLSLLHQHQERYNGYYYNGGNLSSESARACFKQEDDQHHFLSNTQSLMTNIDHQSSVSDDSVTVCGNVVGYGGYQGFAAPVNCDAYAASEFDYNARNHYYFAQQQQTQQSPGGDFPAAMTNNVGSNMYYHGEGGGEVAPTFTVWNDN

SEQ ID NO: 18714 - protein, 367 aa, Hyacinthus orientalis
MGDPVTFQFFPVGEPEEEESPGGESTVAAGGAPRGHWAEVKFVEKEADVSPAIKKSRRGPRSRSSQYRGVTFYRRTGRWESHIWDCGKQVYLGGFDTAHAAARAYDRAAIKFRGVDADINFNLSDYNEDLKQMMNLAKEEFVHILRRQSTGFSRGSSKYRGVTLHKCGHWEARMGQFLGKKAYDKAAIKSSGREAVTNFEPSSYEREVLTEADSDAIGHDIDLNLRISQPNVSSPKRRDNPVGVQFHLGSFESSDAKKAMIDTHSSILVGQPHTAAMTSEASRVWSALYPGFYPPIELRAKDKMSMVGSAALPNWTWQLHGPMPSPMFTSAASSGFATTHATSSITPPASHHLQFPPPPNTNYYSRS

SEQ ID NO: 18715 - protein, 546 aa, Giardia lamblia ATCC 50803
MAGWSWLHAAEYAWDWAADGINYRVIPELQSSPLVLCCLCVTTVLLITVAYMRAAAADARALYLLDFAVFQPDEEIYKTTNEQLLNLALESFHYPAESMKFMRRICEGTGLGPSTHIPRSLRDFNCTIKTAREEAELVIFGAIDALLEKTGIDPKAISGVVTNCSLFCPTPSFSAMIVNKYGLNKNVRSFSLGGMGCSASIIGVDLIRAIMHDSPGLILLVSTENMTQNFYRGEERSMLMQNVLFRMGCSAVLFSNNPSYRIKGSRSDARDPKTIYAKYKLLGLVRTHHGGSDDSYRCVYQTADQKGNIGVIINKSVPRCAGKALHDNMKIVFKKFMPVTEICRFLWHQMLSNVRKTSRKDAAPFMPNVGKIFNHLCFHTGGRAVLDEMERLLHLSEQQMAASRATLYRYGNTSSSSVWYELAYHECQSGVKPGHKVWQIAFGSGFKCNSVVWQATDAYHMTVPTTFDKTNPDFSWDLAKQTSHLLSDYEKARDYDKECAINTQKDDDKDYKGFCSRFKDRLERDFGTKGCDVKEILAKTCTEMVN

SEQ ID NO: 18716 - protein, 505 aa, Limnanthes douglasii
MSETKPEKPLIATVKNTLPDLKLSINLKHVKLGYHYLITHGMYLCLPPLALVLFAQISTLSLKDFNDIWEQLQFNLISVVVSSTLLVSLLILYFMTRPRPVYLMDFACYKPDETRKSTREHFMKCGESLGSFTEDNIDFQRKLVARSGLGDATYLPEAIGTIPAHPSMKAARREAELVMFGAIDQLLEKTKVNPKDIGILVVNCSLFSPTPSLSSMIVNHYKLRGNIISYNLGGMGCSAGLISVDLAKRLLETNPNTYALVMSTENITLNWYMGNDRSKLVSNCLFRMGGAAVLLSNKTSDKKRSKYQLVTTVRSHKGADDNCYGCIFQEEDSNGKIGVSLSKNLMAVAGDALKTNITTLGPLVLPMSEQLLFFATLVARKVFKKKIKPYIPDFKLAFDHFCIHAGGRAVLDELEKNLQLSSWHLEPSRMTLYRFGNTSSSSLWYELAYSEAKGRIRKGERVWQIGFGSGFKCNSAVWKALKSVDPKKEKNPWMDEIHQFPVAVV

SEQ ID NO: 18717 - protein, 621 aa, Dunaliella salina
MSYHSIDGIGNSRHPLMQLRSVLVGGVKIASLDVWKTQLLLFSHTVSQPSHNTNPVLTDGPGAMGEPAKADEHRDSNGENGNGKPAPGQLFPDYRRTVALKYVSRGLQVAFSYISLTMLATPFVVFGSLELFNLYRQGELQKLVEVAKQTEMTFDMITVMGCIAMMVVGLLLYFFLRKNPVYLVDFSVFRANDSSWNATYKRFMNGSFMTRRFTEDSLNFQKKILERSGLGQDTMLPPAMQTMCSLDWKTLELSHDPAQTLASVAPRPGMKLAREEFEVVIFSTVQDLLNKTGVRAKDIGILVVNCSLFNPTPSLCAMVINHFKMRSNIISYNLSGMGCSASPIAIDLANQMLQLYSGTYALVISTENITQNWYFGNDRSMLLPNCLFRVGGAAMLLSNRRRDGLRAKYELQHVVRTHLGAKDQAYGCIFQTEDDEDNVGVRLTKELMAVAGEALKVNVTTLGPLVLPISEQALFIFNLIVRKTFNKKLKPYIPDFKLAFDKICIHTGGRAVIDEIEKQLRLTPEMVEPSRAVLFRYGNVSSSSIWYVLAYMESIEGVKRGDRIWQLGFGSGFKCNSAVWRSKRRIKNMHYAWEGFNLQEMRDHLASLAIHKARHLEQKPK

SEQ ID NO: 18718 - protein, 261 aa, Persea americana
QVHPNSYALVVSTENMTLNWYSGNNRAMLVTNCLFRMGGAAILLSNRWSDRRRSKYQLVHTVRTHIGADDRAFNCVSQEEDEAGKVGVSLSKDLMVIAGEALKSNITTLGPMVLPMSEQLLFFATLAARKVFKMKIKPYIPDFKLAFEHFCIHAGGRAVLDELQKNLELSDWQMEPSRMTLYRFGNTSSSSLWYELGYSEAKGRVMKGDRMWQIAFGSGFKCNSAVWRALRSVNPAKEKSPWMDDIDSFPVHVPKVTTIQS

SEQ ID NO: 18719 - protein, 497 aa, Arabidopsis thaliana
MPQAPMPEFSSSVKLKYVKLGYQYLVNHFLSFLLIPIMAIVAVELLRMGPEEILNVWNSLQFDLVQVLCSSFLVIFISTVYFMSKPRTIYLVDYSCYKPPVTCRVPFATFMEHSRLILKDKPKSVEFQMRILERSGLGEETCLPPAIHYIPPTPTMDAARSEAQMVIFEAMDDLFKKTGLKPKDVDILIVNCSLFSPTPSLSAMVINKYKLRSNIKSFNLSGMGCSAGLISVDLARDLLQVHPNSNAIIVSTEIITPNYYQGNERAMLLPNCLFRMGAAAIHMSNRRSDRWRAKYKLSHLVRTHRGADDKSFYCVYEQEDKEGHVGINLSKDLMAIAGEALKANITTIGPLVLPASEQLLFLTSLIGRKIFNPKWKPYIPDFKLAFEHFCIHAGGRAVIDELQKNLQLSGEHVEASRMTLHRFGNTSSSSLWYELSYIESKGRMRRGDRVWQIAFGSGFKCNSAVWKCNRTIKTPKDGPWSDCIDRYPVFIPEVVKL

SEQ ID NO: 18720 - protein, 497 aa, Arabidopsis thaliana
MPQAPMPEFSSSVKLKYVKLGYQYLVNHFLSFLLIPIMAIVAVELLRMGPEEILNVWNSLQFDLVQVLCSSFFVIFISTVYFMSKPRTIYLVDYSCYKPPVTCRVPFATFMEHSRLILKDKPKSVEFQMRILERSGLGEETCLPPAIHYIPPTPTMDAARSEAQMVIFEAMDDLFKKTGLKPKDVDILIVNCSLFSPTPSLSAMVINKYKLRSNIKSFNLSGMGCSAGLISVDLARDLLQVHPNSNAIIVSTEIITPNYYQGNERAMLLPNCLFRMGAAAIHMSNRRSDRWRAKYKLSHLVRTHRGADDKSFYCVYEQEDKEGHVGINLSKDLMAIAGEALKANITTIGPLVLPASEQLLFLTSLIGRKIFNPKWKPYIPDFKLAFEHFCIHAGGRAVIDELQKNLQLSGEHVEASRMTLHRFGNTSSSSLWYELSYIESKGRMRRGDRVWQIAFGSGFKCNSAVWKCNRTIKTPKDGPWSDCIDRYPVFIPEVVKL

SEQ ID NO: 18721 - protein, 492 aa, Arabidopsis thaliana
MPEFSSSVKLKYVKLGYQYLVNHFLSFLLIPIMAIVAVELLRMGPEEILNVWNSLQFDLVQVLCSSFFVIFISTVYFMSKPRTIYLVDYSCYKPPVTCRVPFATFMEHSRLILKDKPKSVEFQMRILERSGLGEETCLPPAIHYIPPTPTMDAARSEAQMVIFEAMDDLFKKTGLKPKDVDILIVNCSLFSPTPSLSAMVINKYKLRSNIKSFNLSGMGCSAGLISVDLARDLLQVHPNSNAIIVSTEIITPNYYQGNERAMLLPNCLFRMGAAAIHMSNRRSDRWRAKYKLSHLVRTHRGADDKSFYCVYEQEDKEGHVGINLSKDLMAIAGEALKANITTIGPLVLPASEQLLFLTSLIGRKIFNPKWKPYIPDFKLAFEHFCIHAGGRAVIDELQKNLQLSGEHVEASRMTLHRFGNTSSSSLWYELSYIESKGRMRRGDRVWQIAFGSGFKCNSAVWKCNRTIKTPKDGPWSDCIDRYPVFIPEVVKL

SEQ ID NO: 18722 - protein, 492 aa, Arabidopsis thaliana
MSDFSSSVKLKYVKLGYQYLINNFLTLLLIPVIATVAIELLRMGPEEILSVLNSLHFELLHILCSSFLIIFVSTVYFMSKPRTVYLVDYSCYKPPVTCRVPFSSFMEHSRLILKDNPKSVEFQMRILERSGLGEETCLPPAIHYIPPTPTMESARNEAQMVIFTAMEDLFKNTGLKPKDIDILIVNCSLFSPTPSLSAMIINKYKLRSNIKSYNLSGMGCSASLISVDVARDLLQVHPNSNAIIISTEIITPNYYKGNERAMLLPNCLFRMGGAAILLSNRRSDRWRAKYKLCHLVRTHRGADDKSYNCVMEQEDKNGNVGINLSKDLMTIAGEALKANITTIGPLVLPASEQLLFLSSLIGRKIFNPKWKPYIPDFKQAFEHFCIHAGGRAVIDELQKNLQLSGEHVEASRMTLHRFGNTSSSSLWYELSYIEAQGRMKRNDRVWQIAFGSGFKCNSAVWKCNRTIKTPTDGAWSDCIERYPVFIPEVVKL

SEQ ID NO: 18723 - protein, 492 aa, Arabidopsis thaliana
MSDFSSSVKLKYVKLGYQYLINNFLTLLLIPVIATVAIELLRMGPEEILSVLNSLHFELLHILCSSFLIIFVSTVYFMSKPRTVYLVDYSCYKPPVTCRVPFSSFMEHSRLILKDNPKSVEFQMRILERSGLGEETCLPPAIHYIPPTPTMESARNEAQMVIFTAMEDLFKNTGLKPKDIDILIVNCSLFSPTPSLSAMIINKYKLRSNIKSYNLSGMGCSASLISVDVARNLLQVHPNSNAIIISTEIITPNYYKGNERAMLLPNCLFRMGGAAILLSNRRSDRWRAKYKLCHLVRTHRGADDKSYNCVMEQEDKNGNVGINLSKDLMTIAGEALKANITTIGPLVLPASEQLLFLSSLIGRKIFNPKWKPYIPDFKQAFEHFCIHAGGRAVIDELQKNLQLSGEHVEASRMTLHRFGNTSSSSLWYELSYIEAQGRMKRNDRVWQIAFGSGFKCNSAVWKCNRTIKTPTDGAWSDCIERYPVFIPEVVKL

SEQ ID NO: 18724 - protein, 492 aa, Arabidopsis thaliana
MSDFSSSVKLKYVKLGYQYLINNFLTLLLIPVIATVAIELLRMGPEEILSVLNSLHFELLHILCSSFLIIFVSTVYFMSKPRTVYLVDYSCYKPPVTCRVPFSSFMEHSRLILKDNPKSVEFQMRILERSGLGEETCLPPAIHYIPPTPTMESARNEAQMVIFTAMEDLFKNTGLKPKDIDILIVNCSLFSPTPSLSAMIINKYKLRSNIKSYNLSGMGCSASLISVDVARDLLQVHPNSNAIIISTEIITPNYYKGNERAMLLPNCLFRMGGAAILLSNRRSDRWRAKYKLCHLVRTHRGADDKSYNCVMEQEDKNGNVGINLSKDLMTIAGEALKANITTIGPLVLPASEQLLSLSSLIGRKIFNPKWKPYIPDFKQAFEHFCIHAGGRAVIDELQKNLQLSGEHVEASRMTLHRFGNTSSSSLWYELSYIEAQGRMKRNDRVWQIAFGSGFKCNSAVWKCNRTIKTPTDGAWSDCIERYPVFIPEVVKL

SEQ ID NO: 18725 - protein, 509 aa, Brassica juncea
MTSVNVKLLYHYVITNLFNLCFFPLTAIVAGKAYRLTIDDLHHLYYSYLQHNLITIASLFAFTVSGFGLYIATLPKPLTLVEYSCYLPPRHLKVSVSKIMDIFYQIRKADTSSRNVACDDPSSLDFLRKIQERSGLGDETYSPEGLIHVPPRKSFAASREETEKVIIGGIENLFENTKVKPKDIGILVVNSSKFNPTPSLSAMVVNTFKLRSNIKSFNLGGMGCSAGVIAIAIDLAKDLLHVHKNTYALVVSTENITQGIYAEENRSMMFSNCLFRVGGAAILLSNKSGDRRRSKYELVHTVRTHTGADDKSFRCVQQGDDEDGKIGVCLSKDITNVAGTTLTKNIAICRPLILPLSEKFLFFATSVAMKLLKDKIKHYYVPDFKLAVDHFCIQPGGRAVIDELEKNLGLSPIDVEASRSTLHRFGNTSSSSIWYELAYIEPKERLKKGNKGWQIALGLGFKCNSAVWVALNNVKASANSPWEHCIDRYPVKNDSDLSKSKTHVQNGRS

SEQ ID NO: 18726 - protein, 509 aa, Brassica juncea
MTSVNVKLLYHYVITNLFNLCFFPLTAIVAGKAYRFTIDDLHHLYYSYLQHNLITIASLFAFTVSGFGLYIATLPKPLYLVEYSCYLPPRHLKVSVSKIMDIFYQIKADTSSRNVACDDPSSLDFLRKIQERSGLGDETYSPEGLIHVPPRKSFAGSREETEKVIIGGIENLFENTKVKPKDIGILVVNSSKFNPTPSLSAMVVNTFKLRSNIKSFNLGGMGCSAGVIAIAIDLAKDLLHVHKNTYALVVSTEGITQGIYAEENRSMMFSNCLFRVGGAAILLSNKSGDRRRSKYELVHTVRTHTGADDKSFRCVQQGDDEDGKTGVCLSKDITNVAGTTLTKHIAICRPLILPLSEKFLFFATSVAMKLLKDKIKHYYVPDFKLAVDHFCIQPGGRAVIDELEKNLGLSPIDVEASRSTLHRFGNTSSSSIWYELAYIEPKERLKKGNKKGWQIALGLGFKGNSAVWVALNNVKASANSPWEHCIDRYPVKNDSDLSKSKTQVQNGRS

SEQ ID NO: 18727 - protein, 506 aa, Brassica napus
MTSINVKLLYHYVITNLFNLCFFPLTAIVAGKAYRLTIDDLHHLYYSYLQHNLITIAPLFAFTVFGSVLYIATRPKPVYLVEYSCYLPPTHCRSSISKVMDIFYQVRKADPSRNGTCNDSSWLDFLRKIQERSGLGDETHGPEGLLQVPPRKTFAAAREETEQVIIGALENLFKNTNVNPKDIGILVVNSSMFNPTPSLSAMVVNTFKLRSNVRSFNLGGMGCSAGVIAIDLAKDLLHVHKNTYALVVSTENITYNIYAGDNRSMMVSNCLFRVGGAAILLSNKPRDRRRSKYELVHTVRTHTGADDKSFRCVQQGDDENGKTGVSLSKDITDVAGRTVKKNIATLGPLILPLSEKLLFFVTFMGKKLFKDKIKHYYVPDFKLAIDHFCIHAGGKAVIDVLEKNLGLAPIDVEASRSTLHRFGNTSSSSIWYELAYIEAKGRMKKGNKVWQIALGSGFKCNSAVWVALNNVKASTNSPWEHCIERYPVKIDSDSGKSETRAQNGRS

SEQ ID NO: 18728 - protein, 506 aa, Brassica napus
MTSVNVKLLYHYVITNLFNLCFFPLTAIVAGKAYRLTIDDLHHLYYSYLQHNLITIAPLFAFTVFGSVLYIATRPKPVYLVEYSCYLPPTHCRSSISKVMDIFYQVRKADPSRNGTCDDSSWLDFLRKIQERSGLGDETHGPEGLLQVPPRKTFAAAREETEQVIIGALENLFKNTNVNPKDIGILVVNSSMFNPTPSLSAMVVNTFKLRSNVRSFNLGGMGCSAGVIAIDLAKDLLHVHKNTYALVVSTENITYNIYAGDNRSMMVSNCLFRVGGAAILLSNKPGDRRRSKYELVHTVRTHTGADDKSFRCVQQGDDENGKIGVSLSKDITDVAGRTVKKNIATLGPLILPLSEKLLFFVTFMGKKLFKDKIKHYYVPDFKLAIDHFCIHAGGRAVIDVLEKNLALAPIDVEASRSTLHRFGNTSSSSIWYELAYIEAKGRMKKGNKVWQIALGSGFKCNSAVWVALNNVKASTNSPWEHCIDRYPVKIDSDSGKSETRVQNGRS

SEQ ID NO: 18729 - protein, 506 aa, Brassica napus
MTSINVKLLYHYVITNLFNLCFFPLTAIVAGKAYRLTIDDLHHLYYSYLQHNLITIAPLFAFTVFGSVLYIATRPKPVYLVEYSCYLPPTHCRSSISKVMDIFYQVRKADPSRNGTCDDSSWLDFLRKIQERSGLGDETHGPEGLLQVPPRKTFAAAREETEQVIIGALENLFKNTNVNPKDIGILVVNSSMFNPTPSLSAMVVNTFKLRSNVRSFNLGGMGCSAGVIAIDLAKDLLHVHKNTYALVVSTENITYNIYAGDNRSMMVSNCLFRVGGAAILLFNKPGDRRRSKYELVHTVRTHAGADDKSFRCVQQGDDENGKIGVSLSKDITDVAGRTVKKNIATLGPLILPLSEKLLFFVTFMGKKLFKDKIKHYYVPDFKLAIDHFCIHAGGRAVIDVLEKNLALAPIDVEASRSTLHRFGNTSSSSIWYELAYIEAKGRMKKGNKVWQIALGSGFKCNSAVWVALNNVKASTNSPWEHCIDRYPVKIDSDSGKSETRAQNGRS

SEQ ID NO: 18730 - protein, 506 aa, Brassica napus
MTSINVKLLYHYVITNLFNLCFFPLTAIVAGKAYRLTIDDLHHLYYSYLQHNLITIAPLFAFTVFGSVLYIATRPKPVYLVEYSCYLPPTHCRSSISKVMDIFYQVRKADPSRNGTCDDSSWLDFLRKIQERSGLGDETHGPEGLLQVPPRKTFAAAREETEQVIIGALENLFKNTNVNPKDIGILVVNSSMFNPTPSLSAMVVNTFKLRSNVRSFNLGGMGCSAGVIAIDLAKDLLHVHKNTYALVVSTENITYNIYAGDNRSMMVSNCLFRVGGAAILLSNKPGDRRRSKYELVHTVRTHTGADGKSFRCVQQGDDENGKIGVSLSKDITDVAGRTVKKNIATLGPLILPLSEKLLFFVTFMGKKLFKDKIKHYYVPDFKLAIDHFCIHAGGRAVIDVLEKNLALAPIDVEASRSTLHRFGNTSSSSIWYELAYIEAKGRMKKGNKVWQIALGSGFKCNSAVWVALNNVKASTNSPWEHCIDRYPVKIDSDSGKSETRVQNGRS

SEQ ID NO: 18731 - protein, 505 aa, Brassica napus
MTSINVKLLYHYVITNLFNLCFFPLTAIVAGKAYLTIDDLHHLYYSYLQHNLITIAPLLAFTVFGSVLYIATRPKPVYLVEYSCYLPPTHCRSSISKVMDIFFQVRKADPSRNGTCDDSSWLDFLRKIQERSGLGDETHGPEGLLQVPPRKTFARAREETEQVIIGALENLFKNTNVNPKDIGILVVNSSMFNPTPSLSAMVVNTFKLRSNVRSFNLGGMGCSAGVIAIDLAKDLLHVHKNTYALVVSTENITYNIYAGDNRSMMVSNCLFRVGGAAILLSNKPRDRRRSKYELVHTVRTHTGADDKSFRCVQQGDDENGQTGVSLSKDITDVAGRTVKKNIATLGPLILPLSEKLLFFVTFMGKKLFKDEIKHYYVPDFKLAIDHFCIHAGGKAVIDVLEKNLGLAPIDVEASRSTLHRFGNTSSSSIWYELAYIEPKGRMKKGNKVWQIALGSGFKCNSAVWVALNNVKASTNSPWEHCIDRYPVKIDSDSGKSETRVPNGRS

SEQ ID NO: 18732 - protein, 168 aa, Brassica napus
FRCVQQGDDENGKTGVSLSKDITDVAGRTVKKNIATLGPLILPLSEKLLFFVTFMGKKLFKDKIKHYYVPDFKLAIDHFCIHAGGRAVIDVLEKNLALAPIDVEASRSTLHRFGNTSSSSIWYELAYIEAKGRMKKGNKVWQIALGSGFKCNSAVWVALNNVKASTNS

SEQ ID NO: 18733 - protein, 168 aa, Brassica napus
FRCVQQGDDENGKTGVSLSKDITDVAGRTVKKNIATLGPLILPLSEKLLFFVTFMGKKLFKDKIKHYYVPDFKLAIDHFCIHAGGKAVIDVLEKNLGLAPIDVEASRSTLHRFGNTSSSSIWYELAYIEAKGRMKKGNKVWQIALGSGFKCNSAVWVALNNVKASTNS

SEQ ID NO: 18734 - protein, 506 aa, Brassica rapa
MTSINVKLLYHYVITNLFNLCFFPLTAIVAGKAYRLTIDDLHHLYYSYLQHNLITIAPLFAFTVFGSVLYIATRPKPVYLVEYSCYLPPTHCRSSISKVMDIFYQVRKADPSRNGTCDDSSWLDFLRKIQERSGLGDETHGPEGLLQVPPRKTFAAAREETEQVIIGALENLFKNTNVSPKDIGILVVNSSMFNPTPSLSAMVVNTFKLRSNVRSFNLGGMGCSAGVIAIDLAKDLLHVHKNTYALVVSTENITYNIYAGDNRSMMVSNCLFRVGGAAILLSNKPGDRRRSKYELVHTVRTHTGADDKSFRCVQQGDDENGKTGVSLSKDITDVAGRTVKKNIATLGPLILPLSEKLLFFVTFMGKKLFKDKIKHYYVPDFKLAIDHFCIHAGGRAVIDVLEKNLALAPIDVEASRSTLHRFGNTSSSSIWYELAYIEAKGRMKKGNKVWQIALGSGFKCNSAVWVALNNVKASTNSPWEHCIDRYPVKIDSDSGKSETRVQNGRS

SEQ ID NO: 18735 - protein, 459 aa, Brassica rapa
MTSINVKLLYHYVITNLFNLCFFPLTAIVAGKAYRLTIDDLHHLYYSYLQHNLITIAPLFAFTVFGSVLYIATRPKPVYLVEYSCYLPPTHCRSSISKVMDIFYQVKKSCPSRNGTCDDSSWLDFLRKIQERSGLGDETHGPEGLLQVPPRKTFAAAREETEQVIIGALENLFKNTNVNPKDIGILVVKSSMFNPTPSLSAMVKNNFKLRSNVRSFNLGGMGCSAGVIAIDLAKDLLHVHKNTYAFVVSTENITYNIYAGDNRSMMVSNCLFRVGGAAILLSNKPGDRRRSKYELVHTVRTHTGADDKSFRCVQQGDDENGKIGVSLSKDITDVAGRTVKKNIATLGPLILPLSEKLLFFVTFMGKKLFKDKIKHYYVPDFKLAIDHFCIHAGGRAVIDVLEKNLALAPIDVEASRSTLHRFGNTSSSSIWYELAYIEAKGRMKKGNKVWQIALGSGFK

SEQ ID NO: 18736 - protein, 458 aa, Brassica rapa
MTSINVKLLYHYVITNLFNLCFFPLTAIVAGKAYRLTIDDLHHLYYAYLQHNLITIAPLFAFTVFGSVLYIATRPKPVYLVEYSCYLPPTHCRSSISKVMDIFYQVRKADPSRIGTCDDSSWLDFLRKIQERSGLGDENHGPEGLLQVPPRKTFAAAREETEQVIIGALENLFKNTNVSPKDIGILVVHSSMFNPTPSLSAMVNNFKLRSNVRSFNLGGMGCSAGVIAIDLAKDLLHVHKNTYALVVSTENITYNIYAGDNRSMMVSNCLFRVGGAAILLSNKPGDRRRSKYELVHTVRTHTGADDYSFRCVQQGDDENGKTGVSLSKDITDVAGRTVKKNIATLGPLILPLSEKLLFFVTFMGKKLFKDKIKHYYVPDFKLAIDHFCIHAGGRAVIDVLEKNLALAPIDVEASRSTLHRFGNTSSSSIWYELAYIEAKGRMKKGNKVWQIALGSGFK

SEQ ID NO: 18737 - protein, 509 aa, Brassica rapa
MTSVNVKLLYHYVITNLFNLCFFPLTAIVAGKAYRFTIDDLHHLYYSYLQHNLITIASLFAFTVSGFGLYIARLPKPLYLVEYSCYLPPRHLKVSVSKIMDIFYQIKADTSSRNVACDDPSSLDFLRKIQERSGLGDETYSPEGLIHVPPRKSFAGSREETEKVIIGGIENLFENTKVKPKDIGILVVNSSKFNPTPSLSAMVVNTFKLRSNIKSFNLGGMGGSAGVIAIAIDLAKDLLHVHKNTYALVVSTEGITQGIYAEENRSMMFSNCLFRVGGAAILLSNKSGDRRRSKYELVHTVRTHTGADDKSFRCVQQGDDEDGKTGVCLSKDITNVAGTTLTKHIAICRPLILPLSEKFLFFATSVAMKLLKDKIKHYYVPDFKLAVDHFCIQPGGRAVIDELEKNLGLSPIDVEASRSTLHRFGNTSSSSIWYELAYIEPKERLKKGNKKGWQIALGLGFKGNSAVWVALNNVKASANSPWEHCIDRYPVKNDSDLSKSKHQVQNGRS

SEQ ID NO: 18738 - protein, 168 aa, Brassica rapa
FRCVQQGDDENGKTGVSLSKDITDVAGRTVKKHIATLGPLILPLSEKLLFFVTFMGKKLFKDKIKHYYVPDFKLAIDHFCIHAGGRAVIDVLEKNLALAPIDVEASRSTLHRFGNTSSSSIWYELAYIEAKGRMKKGNKVWQIALGSGFKCNSAVWVALNNVKASTNS

SEQ ID NO: 18739 - protein, 506 aa, Brassica oleracea
MTSINVKLLYHYVITNLFNLCFFPLTAIVAGKAYRLTIDDLHHLYYSYLQHNLITIAPLFAFTVFGSVLYIATRPKPVYLVEYSCYLPPTHCRSSISKVMDIFYQVRKADPSRNGTCDDSSWLDFLRKIQERSGLGDETHGPEGLLQVPPRKTFAAAREETEQVIIGALENLFKNTNVNPKDIGILVVNSSMFNPTPSLSAMVVNTFKLRSNVRSFNLGGMGCSAGVIAIDLAKDLLHVHKNTYALVVSTENITYNIYAGDNRSMMVSNCLFRVGGAAILLSNKPRDRRRSKYELVHTVRTHTGADDKSFRCVQQGDDENGKTGVSLSKDITDVAGRTVKKNIATLGPLILPLSEKLLFFVTFMGKKLFKDKIKHYYVPDFKLAIDHFCIHAGGKAVIDVLEKNLGLAPIDVEASRSTLHRFGNTSSSSIWYELAYIEAKGRMKKGNKVWQIALGSGFKCNSAVWVALNNVKASTNSPWEHCIDRYPVKIDSDSGKSETRAQNGRS

SEQ ID NO: 18740 - protein, 459 aa, Brassica oleracea
MTSINVKLLYHYVITNLFNLCFFPLTAIVAGKAYRLTIDDLHHLYYSYLQHNLITIAPLFAFTVFGSVLYIATRPKPVYLVEYSCYLPPTHCRSSISKVMDIFYQVRKADPSRNGTCDDSSWLDFLRKIQERSGLGDETHGPEGLLQVPPRKTFAAAREETEQVIIGALGNLFKNTNVSPKDIGILVVNSSMFNPIPSLSAMVVNTFKLRSNVRSFNLGGMGCSAGVIAIDLAKDLLHVHKNTYALVVSTENITYNIYAGDNRSMMVSNCLFRVGGAAILLSIKPGDRRRSKYELVHTVRTHTGADDFSFRCVQQGDDENGKTGVSLSKDITDVAGRTVKKNIATWGPLILPLSEKLLFFVTFMGKKLFKDKIKHYYVPDFKLAIDHFCIHAGGRAVIDVLEKNLALAPIDVEASRSTLHRFGNTSSSSIWYELAYIEAKGRMKKGNKVWQIALGSGFK

SEQ ID NO: 18741 - protein, 168 aa, Brassica oleracea
FRCVQQGDDENGKTGVSLSKDITDVAGRTVKKHIATLGPLILPLSEKLLFSVTFMGKKLFKDKIKHYYVPDFKLAIDHFCIHAGGKAVIDVLEKNLGLAPIDVEASRSTLHRFGNTSSSSIWYELAYIEAKGRMKKGNKVWQIALGSGFKCNSAVWVALNNVKASTNS

SEQ ID NO: 18742 - protein, 496 aa, Glycine max
MPPILPDFSNSVKLKYVKLGYQYLVNHILTLTLIPMMIAIFMEILRLGPEEILNLWHSLHLDLVQILCSAFLIIFIATVYFMSKPRTIYLVDYACFKPPVTCRVPFATFMEHSRLILKDNPKSVEFQMRILERSGLGEETCLPPAIHYIPPKPTMEAARGEAELVIFSAMDSLFNKTGLKPKDIDILIVNCSLFSPTPSLSAMVINKYKLRSNIKSFNLSGMGCSAGLISVDLARDLLQVHPNSNAVVVSTEIITPNYYQGKERAMLLPNCLFRMGGAAILLSNRTSERRRAKYRLVHVVRTHKGADDKAYRCVFEEEDREGKVGISLQKDLMAIAGEALKSNITTMGPLVLPASEQLLFLLTLIGRKIFNPKWKPYIPDFKQAFEHFCIHAGGRAVIDELQKNLQLSTEHVEASRMTLHRFGNTSSSSLWYELNYIESKGRMKKGDRVWQIAFGSGFKCNSAVWKCNRSIKTPVDGPWADCIDRYPVDIPEIVKL

SEQ ID NO: 18743 - protein, 595 aa, Oryza sativa (japonica cultivar-group)
MADRVFNQSSATIGAAGGYWSSYYCYKVSDQLSQSCGHEFAMLAKVKVKEEAAMAREQALLLTEIVNRGVEPSGPDAGSPTFSVRVRRRLPDFLQSVNLKYVRLGYHYLISHGVYLATIPVIVLVCGAEVGSLSRDELWRKVWGEATYDLATVLAFLAVLAFTISVYIMSRPRPVYLIDFACYKPADELKVSKAEFIDLARKSGKFDEDSLAFQSRLLAKSGIGDESYMPRCVFEPGTNCATMKEGRAEASAAMFAALDELFDKCRVRPKDVGVLVVNCSLFNPTPSLSAMIVNHYKMRGNILSYNLGGMGCSAGVIAVDLARDMLQASGAGLAVVVSTEAVSFTWYAGKRRSMLIPNAFFRAGCAAVLLSNRRRDFHRAKYQLEHIVRTHKGADDRSFRSVYQEEDEQRIKGLSISRDLVEVGGHALKTNITTLGPLVLPFSEQILFFAGVLFRHLFPSKTSAPPPPSADGDASAAAPYIPDFKRAFEHFCMHAASRDVLEHLQGNLGLRDGDLEASRAALHRFGNTSSSSIWYELAYLEAKGRVRRGDRVWQLAFGSGFKCNSAVWRAVRRVRRPARSPWLDCVEQYPARMNA

SEQ ID NO: 18744 - protein, 478 aa, Oryza sativa (japonica cultivar-group)
MLLLKAVYRVVVNNFLALAAAAVAAVLLRRPDELAARLRAVSSPLHAATAAVLAAGVARLVRARRARGVYLVEYGCFRPRPCYRAPFATCLEHAHLMPYLVDEESVAFAIRLLERSGLGDETCVPDAYHYMPPDRSLRASRDESELVIFSAVDDVFARSALTPADIDVLIVNCSIFTPTPVFADMVVNRYKLRAEVQNVNLSGMGCSAGLVSVGLAKNLLQVSPPGTNVLIVSTEILSSQYYVGTERAMLLPNCLFRMGAAAMILSNSPDHARFRLGRVVRTVTAARDSDYRCVFQEEDEQGNTGIRLSKDLATTAGHALKSNIAAFGPLVLPASEQLLVAISFLKRKLKQLSGHAGKVRLYRPDFRTAFEHFCIHAGGRGVIDEVQHGLGLSDDDVEASRMTLHRFGNTSSSSVLYELAYLEAKGRMKRGDRVWMISFGAGFDCNSVAWECVKPAPDADGPWVDCIHRYPVQLPEIA

SEQ ID NO: 18745 - protein, 521 aa, Simmondsia chinensis
MKAKTITNPEIQVSTTMTTTTTTATLPNFKSSINLHHVKLGYHYLISNALFLVFIPLLGLASAHLSSFSAHDLSLLFDLLRRNLLPVVVCSFLFVLLATLHFLTRPRNVYLVDFACYKPHPNLITSHEMFMDRTSRAGSFSKENIEFQRKILERAGMGRETYVPKSVTKVPPEPSIAAARAEAEEVMYGAIDEVLEKTGVKPKQIGILVVNCSLFNPTPSLSSMIVNHYKLRGNILSYNLGGMGCSAGLISIDLAKDLLQVYRNTYVLVVSTENMTLNWYWGNDRSMLITNCLFRMGGAAIILSNRWRDRRRSKYQLLHTVRTHKGADDKSYRCVLQQEDENNKVGVALSKDLMAVAGEALKANITTLGPLVLPMSEQLLFFATLVARKVFKMTNVKPYIPDFKLAAKHFCIHAGGKAVLDELETNLELTPWHLEPSRMTLYRFGNTSSSSLWYELAYAEAKGRIRKGDRTWMIGFGSGFKCNSVVWRALRSVNPAREKNPWMDEIENFPVHVPKIAPIAS

SEQ ID NO: 18746 - protein, 503 aa, Tropaeolum majus
MSGTKATSVSVPLPDFKQSVNLKYVKLGYHYSITHAMYLFLTPLLLIMSAQISTFSIQDFHHLYNHLILHNLSSLILCIALLLFVLTLYFLTRPTPVYLLNFSCYKPDAIHKCDRRRFMDTIRGMGTYTEENIEFQRKVLERSGIGESSYLPPTVFKIPPRVYDAEERAEAEMLMFGAVDGLFEKISVKPNQIGVLVVNCGLFNPIPSLSSMIVNRYKMRGNVFSYNLGGMGCSAGVISIDLAKDLLQVRPNSYALVVSLECISKNLYLGEQRSMLVSNCLFRMGGAAILLSNKMSDRWRSKYRLVHTVRTHKGTEDNCFSCVTRKEDSDGKIGISLSKNLMAVAGDALKTNITTLGPLVLPMSEQLLFFATLVGKKVFKMKLQPYIPDFKLAFEHFCIHAGGRAVLDELEKNLKLSSWHMEPSRMSLYRFGNTSSSSLWYELAYSEAKGRIKKGDRVWQIAFGSGFKCNSAVWKALRNVNPAEEKNPWMDEIHLFPVEVPLN

SEQ ID NO: 18747 - protein, 532 aa, Sorghum bicolor
MSIKSETNERSSTIQSAGHRICSIVKLCYQHLMLAVSYALYLFLAPIILATLVLHLSRHTSADDDLIVSARSTLTANLPFTVVVVAAAATAVYLMRRPRAVYLLDLACYKPGAEHAVTRETFMRLVVGYGTFSDDSLAFQRKILERSGLGQGTYLPKALTSSPPNPCMAEARREAEAVMFGAVDQLLAKTGVRAGDIGIVVVNSGLFSPTPSLSAMIVHHYKLRRDVSSYNLAGMGCSASLISVDLAKQLLQVQRNTYALVVSLEIMAASAYVGNTRSMLVPNCIFRMGGAAVLLTNHGTERRRAKYQLLHTVRTHQGADDRAYRCVYQEEDESGHVGVALSKDLMSVAAEALKTNITTLGPRVLPMSEKMKMMLVGGKAAVVQVLGVQQQGQGGSRSRPYIPDLTTAFEHFCIHAGGRAVLDTVERSLDLSAWHMEPSRMTLYRWGNTSSSSLWYELAYTEAKGRVRRGHRVCQIAFGSGFKCNSAVWRALRTIDPAKESAAAGNPWVEEIHRFPVEVPQVERVDVAAMAS

SEQ ID NO: 18748 - protein, 555 aa, Triticum aestivum
  unsure (1)..(555): unsure at all Xaa locations
MSMEDSTPPAGAGASAGEGASSPSPSRXGCXDFLQSVRLKYVKLGYHYLITHGMYLLLTPLIVLIAVHLSTLSPGDVADLWTHLRFNLLSVIACSTLLVFLSTVYFLTRPRSVYLVDFGCYKPGPERRCSRETFMRCSKLTGNFTEANLDFQRKIXLAPARAAEDTYIPPALVTVPPNPSMELARQEAQVCMFGAIDNMLAKTGVKPKDIGILVVNCSLFNPTPSLSAMVVNHYKLRGNIVSYNLGGMGCSAGLLSIDLAKDLLQVHPNSYAMVVSTENITLNWYFGNNRSMLVSNCLFRMGCAAILLSNKRSDRRRSKYELIHTVRTHKGCNDKCFSCVTQEEDEAGKVGVALSKDLMAVAGDALKTNITTLGPLVLPFSEQLLFMVTLVGKKLFKMKIKPYIPDFKLAFEHFCIHAGGRAVLDEIEKNMDLTDWHMEPSRMTLFRFGNTSSSSLWYELAYSEAKGRIRRRDRIWQIAFGSGFKCNSAVWKALRSVNPAKEQNNPWMDEIDTFPVVVPKVSKVVEXLCLFSNIPPGTASEQILPLNSTVCNLFG

SEQ ID NO: 18749 - protein, 276 aa, Triticum aestivum
  unsure (1)..(276): unsure at all Xaa locations
XHASGAGLISIDLARDMLQVHPNSNALVISTEIITPNFYHGSRRDMLLPNCLFRMGAAAILLSNRRREARRAKYRLVHVVRTHKGADDRAYRCVYEEEDDEGHSGISLSKELMAIAGEALKSNITTMGPLVLPMSEQLLFFFRLVGRKVINNKWKPYIPDFKLAFEHFCIHAGGRAVIDELHKNLELSPRHVEASRMTLHRFGNTSSSSLWYELAYIEAKGRMRKGDRVWQIGFGSGFKCNSAVWKCLRTVKTPTDGPWDDCIQRYPVHIPEVVKL

SEQ ID NO: 18750 - protein, 291 aa, Triticum aestivum
  unsure (1)..(291): unsure at all Xaa locations
XRADIAAHGRSRXGHPSGAGLLSIHLARDMRQLHPNSNALVISTEIVTPRLYHGSRRHLLLPNCLFRMGAAAVLLSNRRREGGRAKYRLVHVVRTHKGADDRAYRCVYEXEEDDEGHSGISRSNALMAIPGEALRSSITTMSPLVLAMSEPQLLVFRLVGRKVFNNKWKPYIPDIKLAXFEHFCIHAGRRPVIEELHHGLKMSPAYVXPSRMTLHRFGNTSSSSLWYELAYIEAKGRMRKGDRVWQIGFGSGFKCNSAVWKCLRTVKTPTDGPWDDCIQRYPVHIPEVVKL

SEQ ID NO: 18751 - protein, 449 aa, Triticum aestivum
  unsure (1)..(449): unsure at all Xaa locations
FLPGQPLPTPAHPSHHARTPARTRSPGPTALRPHQPRHPRNPAXIHPGQTLPNPDQPHPPRTQASCRPGHLKLGYHIVVSNAVYVLLAPFAAALALRASRLTPSDLAAARAYLLANLHLAVSLVSVATALATVYLARRPRAVYLLDFACYKPGPDHVVTRETFMEQSNKAGVFTDDNLAFQRKILERSGLGQGTYFPAAVLNSPPNPCMAEARREAEAVMFGAIDSLLAKTGVRARDIGVVVVNCSLFNPTPSLSAMVVNHYKLRGNVASYNLGGMGCSAGLISIDLAKQLLQVHRNSYALVVSMENITLNWYWGNDRSMLMSNCLFRMGGAAILLSNRAADKRRSKYQLMHTVRTHHGADDRAYRCVFQEEDXXAGRVGVALSKDLMAVAGEALKTNITTLGPLVLPMSEQILFLSSLIGKKIFGLKXXKPYIPDFKMAFEHFCIHAX

SEQ ID NO: 18752 - protein, 297 aa, Triticum aestivum
  unsure (1)..(297): unsure at all Xaa locations
XNHYGLRGNVVSYNLGGMGCSAGLLSVDLAKDLLQVHPSSYALVVSMENITLNWYFGNDRSMLVSNCLFRMGGAAILLSNKRADRRRSKYELVHTVRTHKGADDKCFGCVTQQEDGAGKVGVSLSKDLMAVAGDALKTNITTLGPLVLPLSEQLLFMATLVAKKAFKVKIKPYIPDFKLAFEHFCIHAGGRAVLDELEKNLGLTEWHMEPSRMTLYRFGNTSSSSLWYELAYSEAKGRIGRRDRVWQIAFGSGFKCNSAVWRALRTVAPEAEASNPWADEIDRFPVEVPRVSRVGNA

SEQ ID NO: 18753 - protein, 507 aa, Zea mays
AGRAGGKQQQAGDMPSGSAFSGSVNLKHVKLGYQYLVNHFLTLLLVPVMAATALELARLGPGELLSLWRSLELDLVHILCSAFLVVFVGTVYVMSRPRPVYLVDYACYKPPASCRVPFATFMEHTRLISDDDKSVRFQTRILERSGLGEDTCLPPANHYIPPNPSMEASRAEAQLVIFSAIDDLVRRTGLKPKDIDILVVNCSLFSPTPSLSAMIINKYKLRSNIRSFNLSGMGCSAGLISIDLARDMLQVHPNSNALVVSTEIITPNFYQGSRRDMLLPNCLFRMGAAAILLSNRRREARRAKYRLVHVVRTHKGSDDRAYRCVYEEEDEQGFSGISLSKELMAIAGDALKSNITTIGPLVLPMSEQLLFFFRLVGRKLVNKGWRPYIPDFKLAFEHFCIHAGGRAVIDELQKNLQLSPRHVEASRMTLHRFGNTSSSSLWYELAYIEAKGRMRRGDRVWQIGFGSGFKCNSAVWKCLRSIKTPTNGPWDDCIHRYPVDVPEVVKL

SEQ ID NO: 18754 - protein, 504 aa, Zea mays
AGGKQQQAGDMPSGSAFSGSVNLKHVKLGYQYLVNHFLTLLLVPVMAATALELARLGPGELLSLWRSLELDLVHILCSAFLVVFVGTVYVMSRPRPVYLVDYACYKPPASCRVPFATFMEHTRLISDDDKSVRFQTRILERSGLGEDTCLPPANHYIPPNPSMEASRAEAQLVIFSAIDDLVRRTGLKPKDIDILVVNCSLFSPTPSLSAMIINKYKLRSNIRSFNLSGMGCSAGLISIDLARDMLQVHPNSNALVVSTEIITPNFYQGSRRDMLLPNCLFRMGAAAILLSNRRREARRAKYRLVHVVRTHKGSDDRAYRCVYEEEDEQGFSGISLSKELMAIAGDALKSNITTIGPLVLPMSEQLLFFFRLVGRKLVNKGWRPYIPDFKLAFEHFCIHAGGRAVIDELQKNLQLSPRHVEASRMTLHRFGNTSSSSLWYELAYIEAKGRMRRGDRVWQIGFGSGFKCNSAVWKCLRSIKTPTNGPWDDCIHRYPVDVPEVVKL

SEQ ID NO: 18755 - protein, 504 aa, Zea mays; identical to SEQ ID NO: 18754

SEQ ID NO: 18756 - protein, 558 aa, Zea mays
  unsure (1)..(558): unsure at all Xaa locations
YPPGRPGQTNTSTNTAPQEQDSRSSRRARAGTLVWLQRQDAAESRIAAAAGERGPAVRHHADRRXVFSGSVNLKHVKLGYRSAGPPPXTLLLVPVMAATALELARLGPVLSLWRSLELDLVHILCSAFVAVFAGTVYAMSRPRPVYLVDYACYKPPGSCRVPFATFMEHTRLISXXDDRSVRFQTRILERSGLGEDTCLPPANHFIPPNPSMEASRAEAQLVVFSAIDDLLRRTGTKPKDVDILVVNCSLFSPTPSLSAMVVNRYKLRSNVRSFNLXSGMGCSAGLISIDLARDMLQVHPNSNALVVSTEIITPNFYRGSRRDMLLPNCLXFRMGAAAILLSNRRREAPRAKYVLRHVVRTHKGADDRAFNCVYQEQDGEGKTGVSLSKDLMAIAGGALKTNITTLGPLVLPVSEQLLFFATLVAKKLLVSAKTKPYIPDFKLAFEHFCIHAGGRAVIDELEKNLQLSPAHVEASRMTLHRFGNTSSSSIWYELAYMEAKGRVRRGHRVWQIAFGSGFKCNSAVWHALRNVKPSPDSPWEDCIDRYPVELVDGFPAHQ

SEQ ID NO: 18757 - protein, 440 aa, Zea mays
  unsure (1)..(440): unsure at all Xaa locations
PQQQASASRHAGLVAAPRRCREQDSSSSRRARAGSPAPCRPAAXFSGSVNLKHVKLGYRYLLDHLLTLLLVPVMAATALELARLGPGELLSLWRSLELDLVHILCSAFVAVFAGTVYAMSRPRPVYLVDYACYKPPGSCRVPFATFMEHTRLISDDDRSVRFQTRILERSGLGEDTCLPPANHFIPPNPSMEASRAEAQLVVFSAIDDLLRRTGTKPKDVDILVVNCSLFSPTPSLSAMVVNRYKLRSNVRSFNLXSGMGCSAGLISIDLARDMLQVHPNSNALVVSTEIITPNFYRGSRRDMLLPNCLXFRMGAAAILLSNRRREAPRAKYRLVHVVRTHKGADDRAYRCVYQEEDQQGFSGISLSKXLLAIAGDALKSNITTIGPLVLPMSEQLLFFFRLVGRKLLNGGWKPYIPDFKLAFDHFCIHAGGRAVIDELX

SEQ ID NO: 18758 - protein, 496 aa, Lesquerella fendleri
MTSLNIKLLYHYILTNLFNLCLFPLTAFLAGKASHLTKSDLLMFLSHLQDNLITVIVLFTFTIFCLVLYIVTKPKQIYLVDYSCYLPPDHLKVSISSVMDIFYELRKVDPLCEVGCDDSSLEFMRKVLERSGLGDETYVPLGLHQVPPQKTFAAIKDETEQVIKGALENLFENTKVNPREIGILVINSSMFNPTPSLSAMVINTFKLRSNIKSFNLGGMGCSAGVIAIDLAKDLLHVHKNTYALVISTENITITAYAGENRSMNVSNCLFRIGGAAILLSNKPRDKRRSKYKLAHTVRTHTGADDMSYRCVQQEEDEMGKVGVRLSKDITTVAGTAVKKNISTLGPLILPLSEKLLYFVSFIAKKLLKEKIKNYYVPDLKLAINHFCIHAGGRGVLDVLEKNLRLSPIDVEASRSTLHRFGNTSSSSIWYELAYIEAKGRMKKGDKAWQIALGSGFKCNSAVWVALRNVKASANSPWEHCIDRYPVPDTCVENGKS

SEQ ID NO: 18759 - protein, 469 aa, Mus musculus
MAEACEPTRPSEDEDEEREPLLPRVAWAQPRRVAPGSAVRMQADEGADVLREPATDEPPAVSGEGSISASLSTELDRTRTTSSETNTFLEDPEFADIVLKAEQAIEIGVFPERISQGSSGSYFVKDSKRNIIGVFKPKSEEPYGQLNPKWTKYVHKVCCPCCFGRGCLLPNQGYLSEAGAYLVDVKLNLGIVPKTKVVLLVSETFNYSAIDRAKSRGKKYALEKVPKVGRKFHRIGLPPKVGSFQLFVKDYKEAEYWLRRFEAEPLPENIRKQFQSQFEKLVILDYIIRNTDRGNDNWLVKYDEMKYAKKIESEESNWIDNKQLLIKIAAIDNGLAFPFKHPDEWRAYPFHWAWLPQAKVPFSEETRNLILPYISDMNFVQDLCEDLYELFKTDKGFDRAAFENQMSVMRGQILNLTQALRDGKSPMQLAQMPCVIVECSKSGSQGRVVHLGSSFTQTVHCRKPFFSSW

SEQ ID NO: 18760 - protein, 469 aa, Mus musculus
MAEACEPTRPSEDEDEEREPLLPRVAWAQPRRVAPGSAVRMQADEGADVLREPATDEPPAVSGEGSISASLSTELDRTRTTSSETNTFLEDPEFADIVLKAEQAIEIGVFPERISQGSSGSYFVKDSKRNIIGVFKPKSEEPYGQLNPKWTKYVHKVCCPCCFGRGCLLPNQGYLSEAGAYLVDVKLNLGIVPKTKVVWLVSETFNYSAIDRAKSRGKKYALEKVPKVGRKFHRIGLPPKVGSFQLFVKDYKEAEYWLRRFEAEPLPENIRKQFQSQFEKLVILDYIIRNTDRGNDNWLVKYDEMKYAKKIESEESNWIDNKQLLIKIAAIDNGLAFPFKHPDEWRAYPFHWAWLPQAKVPFSEETRNLILPYISDMNFVQDLCEDLYELFKTDKGFDRAAFENQMSVMRGQILNLTQALRDGKSPMQLAQMPCVIVECSKSGSQGRVVHLGSSFTQTVHCRKPFFSSW

SEQ ID NO: 18761 - protein, 953 aa, Plasmodium falciparum 3D7
MGSSSLPMSQQMYFSTHNALRINEENDVINTLFYEINGSRHISLLIFPFYDVQMLKRLLIKKLNLPGGVKVNDIIIFYKGIKLPNYRIISTYIDNNNNRNDKKKKKKKINKLYWAIKDTNPNASIRVIDSTKNYPEFFEDILNEIKLSFKKNIAPKLTMDGTGGTYLLYNAKKKICSVFKPLDEEAFAPFNPRGYEGKMYQEGFRAGVLSGEGASREIAAYLLDNCYNNFSNVPCTIMVEACNPHFNNKSKLKYVDKETNLKWKCGSLQEFIDSRESVGNYDYKQFSIRDIHKIAILDIRVMNLDRNDGNILVSPLKTLKDSCNQFVYRNNKFTSSNNEDMLKRIITIDKKPSRYTLIPIDHGLILPHIMDVAEIDLVWFEWPQIKIPLDDEELEVVFSFDPDKDAEKVRNKLLIREDCIRTMRVCTRLLQIGAKMHLTLYEIAKISTRKNIDEESILEHLVKDSITQAYQMMDYTSLMSTNRLGYILDLAEIKMNKKKKNSKIKTVEINDDKIINQLYEKNQGNLFFNEKGETTGGEGSLKSPPSIKKDNDIIKSNIYNKNVSNNNLIKDVDDMISINSSSNTTNSIKNVSLINESYKNIYSNNVIKNNNSDFFNKNIENNIDLMNITNQVNNINLCLNIKKEDNETNGEENDMSLKQNNLKHTHLNSRSDFSKECENTTESKNITMKLKKENFSNNSPDNLLDKPLDTLLNEPLDHFLGKPLNKFVDKPLDNMLENISGEVSDMSNISNNLSNVSDKIKVDTSEYKDEALFCNSPNDDTKVKKKKKKKDSDLDGYPKDQKNYTNCDDGDKINSDDNGINKENEMINQVKNNLNDDEEEEEEEEEEEEEENDDYDVTFKKPSGTIKRISENTGTAYRSMEMNKINSIWMIRDKNNKIINVKWENKIFEKLFFETFENYIKKYINDYHRDWRNYPYNGSKITTTKHAYLNNIK

SEQ ID NO: 18762 - protein, 650 aa, Arabidopsis thaliana
MSRNLDSPVQTQMAVAVFKTPLTGASKMEGKQHHKHQHLQRQSSGRRVFVQTETGCVLGMELDRSDNVHTVKRRLQIALNFPTEESSLTYGDMVLTNDLSAVRNDSPLLLKRNFMHRSSSTPCLSPTGRDLQQKDRSGPIEILGHSDCFSIVKHMVKDIVKAMKMGVEPLPVHSGLGGAYYFRNKRGESVAIVKPTDEEPFAPNNPKGFVGKALGQPGLKSSVRVGETGFREVAAYLLDYGRFANVPPTALVKITHSVFNVNDGVKGNKPREKKLVSKIASFQKFVAHDFDASDHGTSSFPVTSVHRIGILDIRIFNTDRHGGNLLVKKLDGVGMFGQVELIPIDHGLCLPETLEDPYFEWIHWPQASLPFSDEEVDYIQSLDPVKDCDMLRRELPMIREACLRVLVLCTIFLKEASAYGLCLAEIGEMMTREFRPGEEEPSELEVVCIEAKRSVTERDVFSPRSDVVGEAEFQFDLDCDDLESVYSSKIQLTDDYFTKNPFSNGRSSLGKLEESIKEEEEDEEEEEDKTENTVPMIIMKDSFFSSAAFHDKAPSLSKLSTSMKNTHLSDTTRKNPKPLTRGKSENTSSGHKSANEQLPVSASFVKVADMKEDEWVLFLERFQELLGPAFAKRKTATLSKRQRLGTSCQF

SEQ ID NO: 18763 - protein, 638 aa, Arabidopsis thaliana
MAVAVFKTPLTGASKMEGKQHHKHQHLQRQSSGRRVFVQTETGCVLGMELDRSDNVHTVKRRLQIALNFPTEESSLTYGDMVLTNDLSAVRNDSPLLLKRNFMHRSSSTPCLSPTGRDLQQKDRSGPIEILGHSDCFSIVKHMVKDIVKAMKMGVEPLPVHSGLGGAYYFRNKRGESVAIVKPTDEEPFAPNNPKGFVGKALGQPGLKSSVRVGETGFREVAAYLLDYGRFANVPPTALVKITHSVFNVNDGVKGNKPREKKLVSKIASFQKFVAHDFDASDHGTSSFPVTSVHRIGILDIRIFNTDRHGGNLLVKKLDGVGMFGQVELIPIDHGLCLPETLEDPYFEWIHWPQASLPFSDEEVDYIQSLDPVKDCDMLRRELPMIREACLRVLVLCTIFLKEASAYGLCLAEIGEMMTREFRPGEEEPSELEVVCIEAKRSVTERDVFSPRSDVVGEAEFQFDLDCDDLESVYSSKIQLTDDYFTKNPFSNGRSSLGKLEESIKEEEEDEEEEEDKTENTVPMIIMKDSFFSSAAFHDKAPSLSKLSTSMKNTHLSDTTRKNPKPLTRGKSENTSSGHKSANEQLPVSASFVKVADMKEDEWVLFLERFQELLGPAFAKRKTATLSKRQRLGTSCQF

SEQ ID NO: 18764 - protein, 630 aa, Arabidopsis thaliana
MSRKLDSPIKTQMAVALVKSPLNGEFREFNKVGMKTPVGRRRVFVQTETGCVLGLELDRSDNAHTVKRKLQVALNFPIEESSLTFGDLVLKNDLTAVRSDSPLLLTRNNFHRSSSTPCLSPMRADLQQRRDESSPIEILGNSVSFSFVRQMAKDITKAVKKGIDPVAVNSGLGGAYYFKNSRGESVAIVKPTDEEPYAPNNPKGFVGKALGQPGLKRSVRVGETGYREVAAYLLDKEHFANVPPTALVKITHSIFNVNDGVKASKPMEKMLVSKIASLQQFIPHDYDASEHGTSNFPVSAVHRIGILDIRILNTDRHSGNLLVKKLDGDGMFGQVELVPIDHGLCLPETLEDPYFEWIHWPQASIPFSEDELKYIANLDPLGDCEMLRRELPMVREASLRVLVLCTIFLKEAAANGLCLAEIGEMMTREVRPGDEEPSEIEVVCLEAMSLIGEKDAESPRSDLGNDIEFQFDIDCEEVTDCTKKLALPLGLTFGNARGQLSKVEETTEDGEEEEEEDREEEENDRADLEKMPTIKLSMSLKSTLLGEKSQKYQKHPGARVESAYASSAHRSADEQIPSSTSFVKLSDMSEEEWTIFLEKYQELLYPAIEKRKSITLGQKQRQRLGTSCQF

SEQ ID NO: 18765 - protein, 622 aa, Arabidopsis thaliana
MAMAVFKAPLKGEFHGARKMEGKQYKHHLLQQQSTGRRRVFVQTDTGCVLGVELDRNDNVHTVKKRLQIAFNFPTEESSLTFGDMVLKNDLSAVRNDSPLLLKRNLMHRSSSTPCLSPTGNDLQRKDRSGPIEILSHSPCFLSLKQTANDIVKAMKMGVEPIPVNGGLGGAYYFRDEKGQSVAIVKPTDEEPFAPNNPKGFVGKALGQPGLKPSVRVGETGFREVAAYLLDYDHFANVPPTALVKITHSVFNVNDGMDGNKSREKKKLVSSKIASFQKFVPHDFDASDHGTSSFPVASVHRIGILDIRILNTDRHGGNLLVKKLDDGGVGRFGQVELIPIDHGLCLPETLEDPYFEWIHWPQASIPFSEEELDYIQSLDPVKDCEMLRRELPMIREACLRVLVLCTVFLKEAAVFGLCLAEIGEMMTREFRAGEEEPSELEMLCIEAKRLTTEQDVLSPKSDGEGETEFQFDIDYNELDSVYGSETETDEFFAKNPFSNGRSSLGELKESIAEEEEDDEEEAKLTLSLSKLSTSMKNNLSNTMGSGYLKPPKDNQTDKALVSHKSANVQLPLSVNFVKLADMKEVEWVVFLERFQELLYSAFAERKTMTLRNTQRLGTSCKF

SEQ ID NO: 18766 - protein, 620 aa, Arabidopsis thaliana
MAVFKAPLKGEFHGARKMEGKQYKHHLLQQQSTGRRRVFVQTDTGCVLGVELDRNDNVHTVKKRLQIAFNFPTEESSLTFGDMVLKNDLSAVRNDSPLLLKRNLMHRSSSTPCLSPTGNDLQRKDRSGPIEILSHSPCFLSLKQTANDIVKAMKMGVEPIPVNGGLGGAYYFRDEKGQSVAIVKPTDEEPFAPNNPKGFVGKALGQPGLKPSVRVGETGFREVAAYLLDYDHFANVPPTALVKITHSVFNVNDGMDGNKSREKKKLVSSKIASFQKFVPHDFDASDHGTSSFPVASVHRIGILDIRILNTDRHGGNLLVKKLDDGGVGRFGQVELIPIDHGLCLPETLEDPYFEWIHWPQASIPFSEEELDYIQSLDPVKDCEMLRRELPMIREACLRVLVLCTVFLKEAAVFGLCLAEIGEMMTREFRAGEEEPSELEMLCIEAKRLTTEQDVLSPKSDGEGETEFQFDIDYNELDSVYGSETETDEFFAKNPFSNGRSSLGELKESIAEEEEDDEEEAKLTLSLSKLSTSMKNNLSNTMGSGYLKPPKDNQTDKALVSHKSANVQLPLSVNFVKLADMKEVEWVVFLERFQELLYSAFAERKTMTLRNTQRLGTSCKF

SEQ ID NO: 18767 - protein, 561 aa, Arabidopsis thaliana
MNCLATTIIITCKPTLISDMAVAIDPFSDKFPYFNRSSQRCRLQSLTNLDFNFLAQSFNHTFEDDNIHRSVSSPCFSIAASANMEEDLKATTAPRIEILGGQRVPTVRALVAEVTMAMVSGAQPLLLPSGMGGAYLLQTGKGHNIAVAKPVDEEPLAFNNPKKSGNLMLGQPGMKHSIPVGETGIRELAAYLLDYQGFSGVPPTALVSISHVPFHVSDAFSFSSMPYKVASLQRFVGHDFDAGELGPGSFTATSVHRIGILDVRLLNLDRHAGNMLVKRCDKKEAYNRLGTAELVPIDHGLCLPECLDDPYFEWLNWPQALVPFSDTELDYISNLDPFKDAELLRTELHSLPESAIRVLVVCTVFLKQAAAAGLCLAEIGEKMTRDFSKGEESFSLLETLCTKAKASVFGKTSEDSDYSHEGNEVNTELQCGMFKFDGGDTPCEAEISEVFHVSKPPLVPRGPRANTIPNDVTASMSSSQNQRITHQEKSAKEKKRGGKQERCTVRSKSPPISPNHDESKGVSFVDMTTVEWDTFLQSFQTLLQDALSKGSTPRLGCSCEI

SEQ ID NO: 18768 - protein, 560 aa, Arabidopsis thaliana
MNCLATTIIITCKPTLISDMAVAIDPFSDKFPYFNRSSQRCRLQSLTNLDFNFLAQSFNHTFEDDNIHRSVSSPCFSIAASANMEEDLKATTAPRIEILGGQRVPTVRALVAEVTMAMVSGAQPLLLPSGMGGAYLLQTGKGHNIAVAKPVDEEPLAFNNPKKSGNLMLGQPGMKHSIPVGETGIRELAAYLLDYQGFSGVPPTALVSISHVPFHVSDAFSFSSMPYKVASSQRFVGHDFDAGELGPGSFTATSVHRIGILDVRLLNLDRHAGNMLVKRCDKKEAYNRLGTAELVPIDHGLCLPECLDDPYFEWLNWPQALVPFSDTELDYISNLDPFKDAELLRTELHSLPESAIKVLVVCTVFLKQAAAAGLCLAEIGEKMTRDFSKGEESFSLLETLCTKAKASVFGKTSEDSDYSHEGNEVNTELQCGMFKFDGGDTPCEAEISEVFHVSKPPLVPRGPRANTIPNDVTASMSSSQNQRITHQEKSAKEKKRGGKQERCTVRSKSPPISPNHESKGVSFVDMTTVEWDTFLQSFQTLLQDALSKGSTPRLGCSCEI

SEQ ID NO: 18769 - protein, 533 aa, Arabidopsis thaliana
MAVALDPLTDRFSQFSRSSQRCRLQSLTNLDFNFLGFNTKQTNLSASSHSLNNRSVSTPCFSISGSNLDGSATPHIEILGGQRVPTVRSLVAEVTIAIVSGAQPLLLPSGLGGAYLLQTEKGNNIAVAKPVDEEPLAFNNPKGSGGLTLGQPGMKRSIRVGESGIRELAAYLLDHQGFSSVPPTALVRISHVPFHDRGSDHAAYKVASLQRFVGHDFDAGELGPGSFTVVSVHRIGILDVRVLNLDRHAGNMLVKKIHDQDETTCSNGVGAAELVPIDHGLCLPECLDDPYFEWLNWPQASVPFTDIELQYISNLDPFKDAELLRTELDSIQESSLRVLIVCTIFLKEAAAAGLSLAEIGEKMTRDICRGEESSSVLEILCNKAKASAVSGSDDDDDYSSEWNEVEAELECGIFQFDDEVECKELPDMLQVPIFTRVPSIAANLSALMRCPPNQWISTYDTNIEEERRDRSIVRSKSHPICVNYDEKEGVYFGDMSGDEWEMFLHSFQMLLPEALEGSTSKGPKPRFGSSCKF

SEQ ID NO: 18770 - protein, 639 aa, Glycine max
  unsure (1)..(639): unsure at all Xaa locations
MSRKLDSPVQTQMAVAVIRSSPLGREYHGKQPAGRRRVFVQTEKGCVLGMDLDRGDNVHTVKRRLQLALNVPVDESYLTFGDMVFKNDLSAVRNDTPLLLTRGKNNLMPRSSSTPCLSPKGRDIDKSGPIEILGQSNRLDGIKHMIKDIMKAIKMGIEPIPVHSGLGGAYYFRNSKGESVAIVKPTDEEPFAPNNPKGFVGKALGQPGLKRSVRVGETGFREVAAYLLDYDHFANVPPTALVKITHSVFNVNDGVNGNNLWRKRLFSKIASFQQFIPHDFDASDHGTSSFPVASVHRIGILDIRILNTDRHAGNLLVRKLDGIGSFGQVELIPIDHGLCLPETLEDPYFEWIHWPQASIPFSEDELAYIEDLDPYQDCEMLRRELPMIREACLRVLVLCTIFLKEAAAYGLCLAEIGEMMTREFRRGEEEPSELEVVCLEARKIVVERDREEPPGAEMRDDEFLFDIDYYDEFGSDFTPKMAIDDPLTRATFQPALGNGHARNPLSKLDECIEEEEEEAEGESPXXGFVTSSTEEKIPSVSELSVSLKNTMLDGKNQNQQKYGGKVDNGHFANTSSGHKSANEQLPPSISFVDVTEMTEDEWSNFLEKFQELLYPAFAKRKSITLGQRQRQRLGTSCQF

SEQ ID NO: 18771 - protein, 640 aa, Glycine max
  unsure (1)..(640): unsure at all Xaa locations
MSRKLDSPVQTQMAVAVIRSSPLGREYHGKQPAGRRRVFVQTEKGCVLGMDLDRGDNVHTVKRRLQLALNVPVDESYLTFGDMVFKNDLSAVRNDTPLLLTRGKNTHMPRSSSTPCLSPKGRDIDKSGPIEILGQSNRLDGIKHMIKDIMKAIKMGIEPIPVHSGLGGAYYFRNSKGDSVAIVKPTDEEPFAPNNPKGFVGKALGQPGLKRSVRVGETGFREVAAYLLDYDHFANVPPTALVKITHSVFNVNDGVNGNNLWRKRLFSKIASFQQFIPHDFDASDHGTSSFPVASVHRIGILDIRILNTDRHAGNLLVRKLDGIGSFGQVELIPIDHGLCLPETLEDPYFEWIHWPQASIPFSEDELAYIEDLDPYHDCEMLRRELPMIREACLRVLVLCTIFLKEAAAYGLCLAEIGEMMTREFRRGEEEPSELEVVCLEARKIVVERDREELSPRSEMXXDDEFLFDIDYYDEFGSDFTPKMAIDDPLTRATFLPALGNGQSRNPLSKLDECIEEEEEEEEEAEGESPQGFVTSAAEEKIPSVSELSVSLKNTMLDGKNQNQQKYLENGHFANTSSGHKSANEQLPPSISFVDVTEMTEDEWPLFLEKFQELLYPAFAKRKSITLGQRQRQRLGTSCQF

SEQ ID NO: 18772 - protein, 641 aa, Glycine max
  unsure (1)..(641): unsure at all Xaa locations
MYPDLDTCLHDEMAVTTFKVPXXSECCGNKKMERKPSGRRRVFVQTETGCVLGMELDRRDNAHTVKRKLQVAFNVPTEASSLICGDMVLKNDLSVVRNDSPLLLTRTFLHRSSSTPCLSPTGRDLQQRDQSGPIEVIGCSDMFSGTKQLVEDIMKAIKVGIEPIPIQSGLGGAYYFRNSNGENAAIVKPTDEEPYAPNNPKGFVGKALGQPGLKRSVRVGETGLREVAAYLLDHDHFANVPSTALVKVTHSIFNINDRVNGSMHHNKKQISKIASLQQFIPHDFDASDHGTSSFPVAAVHRIGILDVRILNTDRHAGNLLVRKLEGFGRFDQVELFPIDHGLCLPETLEDPYFEWIYWPQASIPFSDDELDYIYHLDPFRDSEMLRMELPMIREACLRVLVLCTIFLKEAAAFGLCLAEIGDMMSREFQGLHEEPSELELICIEAKKLLDQEELVSLGSXEVGDKDVTQFQLDCEDQDLDFTTNIEEKLTVMPPFQVGATNGIIRNTLSRLEESVMEDEAESEGELPXXVVTNXNGPVGNGVPNVSRLSVSLQNTRTGEKSRQQMGVKQKSGFLAGTSSGNTTVNELPASSSFVKLTDMDEERWNQFLENFQRLLIPDFVNYKRGNVSKKQRQRLGTSCQF

SEQ ID NO: 18773 - protein, 632 aa, Glycine max
  unsure (1)..(632): unsure at all Xaa locations
MYPDLDTCLHDEMAAATFKGPXXSECCGNGKMERKXXSGRRRVFVQTETGCVLGMELDRRDNAHTVKRKLQVAFNVPTEASSLICGDMVLKNDLSVVRNDSPLLLTRTFLHRSSSTPCLSPTGRDLLQRDQSGPIEVIGCSDMFSGTKQLVKDIMKAIKVGIEPIPIQSGLGGAYYFRNSNGENVAIVKPTDEEPYAPNNPKGFVGKALGQPGLKRSVRVGETGFREVAAYLLDHDHFANVPFTALVKVTHSIFNVNDRVNGSMHHNKKQISKIASLQQFIPHDFDASDHGTSSFPVAAVHRIGILDVRILNTDRHAGNLLVRKLEGFGRFDQVELFPIDHGLCLPETLEDPYFEWIYWPQASIPFSDDELDYIYHLDPFRDSEMLRMELPMIREACLRVLVLCTIFLKEAAAFGLCLAEIGDMMSREFQGLHEEPSELELICIEAKKLLDQEELFSYEAEVEDKDVIQFQLDCEDRDLDFTTNIEEKLTVMPPFQVGARNGNIRNTLSRLEESMMEDEAESEGELPVGGGEYNGPVLNGVPNVSKLSVSLQNTRTSEKSWQQMGVKQKSDXLAGTSSGNTTVNELPASSSFVKLTDMDEERWNQFLEXFPKLLIQIXYYNEECGAEQRQRX

SEQ ID NO: 18774 - protein, 630 aa, Glycine max
  unsure (1)..(630): unsure at all Xaa locations
MSRKLDSPVQTQMAVAVIRSSPLGREYHGKQPAGRRRVFVQTEKGCVLGMDLDRGESXGRISKGIXLLLPLKKKSHLFQNXXRVTEKYHVRWEKPXXISRNMEERWIMAILXNTSSGHKSANEQLPPSISFVDVTEMTEDEWSNFLEKFQELLYPAFAKRKSITLGQRQRQSLGTSCTVLKLSDMLVSXERTIGMKKNKGCGVKGMGEFWLKXSGCMRLGGVRGGKAYCLDYDHFANVPPTALVKITHSVFNVNDGVNGNNLWRKRLFSKIASFQQFIPHDFDASDHGTSSFPVASVHRIGILDIRILNTDRHAGNLLVRKLDGIGSFGQVELIPIDHGLCLPETLEDPYFEWIHWPQASIPFSEDELAYIEDLDPYHDCEMLRRELPMIREACLRVLVLCTIFLKEAAAYGLCLAEIGEMMTREFRRGEEEPSELEVVCLEARKIVVERDREELSPRSEMRDDEFLFDIDYYDEFGSDFTPKMAIDDPLTSGQSRNPLSKLDECIEEEEEEEEEAEGESPHTSAAEEKIPSVSELSVSLKNTMLDGKNQNQQKYSGGKVENGHSSSGHKSANEQLPPSISFVDVTEMTEDEWPLFLEKFQELLYPAFAKRKSITLGQRQRQRLGTSCQF

SEQ ID NO: 18775 - protein, 415 aa, Glycine max
KSRTSCVLEYARDAAAQVSGPAIATKCVPDVVDHDNGRMHHNKKQISKIASLQQFIPHDFDASDHGTSSFPVAAVHRIGILDVRILNTDRHAGNLLVRKLEGLGRFDQVELFPIDHGLCLPETLEDPYFEWIYWPQASIPFSDDELDYIYHLDPFRDSEMLRMELPMIREACLRVLVLCTIFLKEAAAFGLCLAEIGDMMSREFQGLDEEPSELELICIEAKKLLDHEELFSFEAEVGDKDVTQFQLDCEDQDLDFTTNIEEKLTVMPPFQVGARNGNIRNTLSRLEESMMEDEAESEGELPVGGGEYNGPVLNGVPNVSKLSVSLPNTRTSEKSRQQMGVTQKSDFLAGTSSGNTTVNELPASSSFVKLTDMDEERWNQFLENFQRLLIPDFVNYKRGNVSKKQRQRLGTSCQF

SEQ ID NO: 18776 - protein, 341 aa, Glycine max
  unsure (1)..(341): unsure at all Xaa locations
XSIFFLNSFGFSFQASNIHRSFSTPCLPLTTMLGGEDFTSSSHPRVEIVGGSEAPPVHALVVEVAIAMASGVHPIPLPSGLGGAYVFPNQNGNNIAVAKPVDEEPLALNNPKGLGGQMLGQPGLKKSIRIGETGIRELAAYLLDHGGXLAGVPPPALVKFSHAAFFGAASSCSSNHMTKIAYPLRFVIHGFDAALLGPSFFPVSSVHQIGILDIRIMNLDRHAGNMLVMKHDHNNSGYVDGVADLVPIDHGFCLPEWLDDPYFEWLHWPQASIPFSEYEIDYISKLDPFRDAEALRNELPSSLRESSIRVLIVCTILLKQAAAAGLCLAEIGQMMTRKFCX

SEQ ID NO: 18777 - protein, 492 aa, Oryza sativa (japonica cultivar-group)
MAIAVGHCRELSPPGGGVRGRHCRLRSVTQLDCPVFDDHDLDLDRRERNGHAGLSPRRSLSSPCFSTVVPPAADRAEPARDDGEKMMPRVEIVAGGHARGVHELIAEAAGAIATGTRLVPAQGGIGGALLLEDGRSVDHVAVIKPLLDDASSPSHGGGGGYASKAVLREVAAFLLDHDGFARVEPTALIKISRPAMPTTTASIQRFAAHECDAGELGPSRFSVASVHRIGSLDVRLLNIDRHAGNILVKKSPESECASGGSTLTPLDLVPIDHGLCLPEQLDDPYFEWLHWPQSSLPFSGAELEYVASLDPFRDAAMLRAELPSLTEAAIRILTLCTIFLQRAAAAGLCLADIGDMMTREFSAMEEGLSALESLCKNAYDSSTTTAGSSPRKHHHSDDSDDESTQFGMDDVPAGLPPHLFLLGGGGIAKSVSFSAAEQGAAGRGAARKRMSFKALSGDEWAAFLDRFEQLLPAALDAKKRAGLKLTRLGTSF

SEQ ID NO: 18778 - protein, 592 aa, Oryza sativa
  unsure (1)..(592): unsure at all Xaa locations
MSRDLDCPVQTQMAVAVLDRSFSSEYPASSRTEXXRSCSWKRVFVQTENGYVLGIELERGENAHTVKKKLQVALKVPTEESSLTFGDLVLNNDLSSIRNDSPLLLRKNQMHRSSSTPCLSPTAHDVQEQDHSEPIEILGCLSPSSRMKQLAKDVVEAIRNGVDPVPVNSGMGGAYYFKNIYGERVAIVKPTDEEPFAPNNPKGFVGKTLGLPGLKRSVPVGETGLREVAAYLLDHDNFANVPPTMLVKITHSVFNVNDTVSCNKVFHNKLQAVSKLASLQQFIAHDYDASDHGTSSFPVSAVHRIGILDIRIFNTDRHAGNLLVRKLGPGPDNFGVQTELIPIDHGLCLPESLEDPYFEWIHWPQASIPFTEEELEYIANLDPVKDAEMLRLELPFIRGACLRVLVLSTIFLKEAAAFGLCLSEIGEMMSRQFTGKEEEPSELELLCMEARKWVKKRELFLPEAGVEDDNDGITQFSIDSEDGSDASELPSFSKFGLMNASHRNPLSKLDECDEEDGEEEEDDDGDEEDDDEDMFKDDAGNLKNPXSKHIPSVSKLSASFKGASFSLGTRAYHKGVPQDKVTAKTNYRGKGX

SEQ ID NO: 18779 - protein, 640 aa, Triticum aestivum
  unsure (1)..(640): unsure at all Xaa locations
MSRDLDCPVQTQMAVAVLDRSFSSDYPASSKTEXXRPLSWKRVFVQTDNGSVLGIELERGENAHSVKKKLQIALNVSTEESSLTFGDLVLNNDLSNVRNDSPLLLTRNQMHRSSSTPCLSPTGNGVQQRDRSGPIAILGMFKPFPSVKQLAKDIVKAIRNDVDPVAXVTSGMGGAYYFKNIWGDHVAIVKPTDEEPFAPNNPKGFVGKTLGQPGLKRSVRVGETGFREVAAYLLDHGNFANVPPTMLVKITHSVFNVNATVGCNHKMFHNKSQAVSKIASLQQFIPHDFDASDHGTSSFPVSCGHRIXGILDIRIFNTDRHSGNLLVRKVGPGSDNFGVQTELIPIDHGLCLPECLEDPYFEWIHWPQASIPFSEEELEYIAKLDPLKDAEMLRMELPMIRKACLRVLVLSTIFLKEGAAFGLCLSEIGEMMSRQFTGRQERERDAPSQRHGPRSSTSSRSSSRAPSEHGSTRLAPARVHCRGWELLASFEGNVDATQVCRCFLRGRRNGSSPTRLXVCVWTTDRGEEKIRGGXDKNKDRPRWHLIFPALSPTTXAFRRRXSKVAAKTNYSGEGSMYQSGSRSANEMLPPSASFVKLSDMGSEEWTAFLDKFQELLPSAFQARKHAAARPLQRLGTSCQF

SEQ ID NO: 18780 - protein, 357 aa, Triticum aestivum
  unsure (1)..(357): unsure at all Xaa locations
XGTSSFPVSAVHRIGILDIRIFNTDRHSGNLLVRKVGPGSDNFGVQTELIPIDHGLCLPECLEDPYFEWIHWPQASIPFSEEELEYIANLDPVKDADMLRMELPMIRKACLRVLVLSTIFLKEGAAFGLCLSEIGEMMSRQFTGKEEEPSELELLCMEARKWVEDRELFLPEAGVEDDDDDFTQFSLDGEDDSDAFESXLIQQVWSHEXASHRNPLSKLAECDEEEDDDKEMVKDDSDPLNGMFPKLVPPVSKLSASLKGFGFHGKAKPYRGGIPKTKSKVAAKTNYSGEGSMYQSGSRSANEMLPPSASFVKLSDMGSEEWTAFLDKFQELLPSAFRARKHAAARPLQRLGTSCQF

SEQ ID NO: 18781 - protein, 354 aa, Plasmodium falciparum
MGSSSLPMSQQMYFSTHNALRINEENDVINTLFYEINGSRHISLLIFPFYDVQMLKRLLIKKLNLPGGVKVNDIIIFYKGIKLPNYRIISTYIDNNNNRNDKKKKKKKINKLYWAIKDTNPNASIRVIDSTKNYPEFFEDILNEIKLSFKKNIAPKLTMDGTGGTYLLYNAKKKICSVFKPLDEEAFAPFNPRGYEGKMYQEGFRAGVLSGEGASREIAAYLLDNCYNNFSNVPCTIMVEACNPHFNNKSKLKYVDKETNLKWKCGSLQEFIDSRESVGNYDYKQFSIRDIHKIAILDIRVMNLDRNDGNILVSPLKTLKDSCNQFVYRNNKFTSSNNEDMLKRIITIDKKPSR

SEQ ID NO: 18782 - protein, 380 aa, Caenorhabditis elegans
MSSLEHRKKVDDEFQLVFQKAQEAINKGIQPSLIPEGSSGSYFVYGLEGEIVGVFKPKDEEPFASLNPKWPKFFQRMLCFCCFGRACLIPNTGYLSEAAASIVSEMLQLDVVPTTRIVKLASPSFFYSRFFGHYDVRPKEGSFQLYVNGYESGNTVFARWNYDKNLLSDEEGAKFQLLFQKMCIVDYVIRNTDRHMDNLLVRHVPGEEINLAAIDNGLAFPVRHPECTSRFRSFPFRWSNLPWAQGEFDPVLRRHVLSLLTPQFVHRLCVDLKKLFRHGIASSNYMLVNSQLRVVRGQIWNLRQAILANESPGEMACRDPIIVSRSSDIVMSNPPPPRGMIGLLSSHLATPNNNSSDVTMKTAIEHEKENSTVPENLITL

SEQ ID NO: 18783 - protein, 973 aa, Plasmodium yoelii yoelii
  unsure (1)..(973): unsure at all Xaa locations
SFQSMGSNSIAISQQMYFSTHNALRINEENDVISTLFYEINGHRHISLLIFPFYDVQMLKRLLIKKLDLPDIKVNDILIFYKGIKLPNYRIISTYLDNSNRVDNVKKKKKKKVNKLYWAIKDPNPNASIRVIDNKSYPPFFENILNDIKLAFKKNIAPKLTMDGTGGTYLLFNSKKKVCSVFKPADEEAFSPFNPRGYEGKIYQEGFRAGVLSGEGASREIAAYILDNTYNNFSNVPCTIMVEACNPHFNNKSNLKYIYNENTLKWKCGSLQEFIDSRESVGNYDHKQFSIRDVHKIGILDIRVMNLDRNDGNILVSPIKSLKDCCNQFLYRNNKRFSTNDEDILKRIITIDQKPSRYSLIPIDHGLIMPHIMDVAEIDLVWFGWPQTKIPFDNEVLEVIFSFDPDKDADKIRNKLLIREDCIRTMRVCTRLLQIGAWMHLNLHEIAKISTRKNIDEESILERLVRDSIIQAYQMMDYTSLMSTNRLGYILDLAEIKINKKKKNSKNKTIELIDSNKTKDENSNDIKKNTISQKEEENYETNNNTTYAKSKSLDIKKIENSFTIVSFKDIRDNKSSSSFTLVNNNTNQNGNNSYDDKLETYNINMNDQKGGECNSTYKTLIQHRSGSKESGNKFIHTKINNISNREHARGYYSLSKDNNIEVRNDNIEVRNDNIEVRNDNIEVRNDNIEMRNDSINDQNKEKNISETNSFSNKSEYTFVTATSNSKKDDNINKSSNDVEQNSDGSKNLGGSSENFVGNVDEENGAKVEKKMKKKKKKKKKXXSDEKVESYQSDKKESSFNISDDNDQNVENVENSNNSKNERNVENEKNEKNTIEHNQQNLNSYQDKEEEEEEEEEEEEEEEEEEEEEEEDDENYVRFKKTTGTMKRISENTGTAYRNIEMNKINSVWMIKDKNNKTINVKWENKIFEKLFFETFENYVKKYINDYHPNWREYQYNGSKVVNTKHSYLSSVKQ

SEQ ID NO: 18784 - protein, 481 aa, Homo sapiens
MEDPSEPDRLASADGGSPEEEEDGEREPLLPRIAWAHPRRGAPGSAVRLLDAAGEEGEAGDEELPLPPGDVGVSRSSPAELDRSRPAVSVTIGTSEMNAFLDDPEFADIMLRAEQAIEVGIFPERISQGSSGSYFVKDPKRKIIGVFKPKSEEPYGQLNPKWTKYVHKVCCPCCFGRGCLIPNQGYLSEAGAYLVDNKLHLSIVPKTKVVWLVSETFNYNAIDRAKSRGKKYALEKVPKVGRKFHRIGLPPKIGSFQLFVEGYKEAEYWLRKFEADPLPENIRKQFQSQFERLVILDYIIRNTDRGNDNWLVRYEKQKCEKEIDHKESKWIDDEEFLIKIAAIDNGLAFPFKHPDEWRAYPFHWAWLPQAKVPFSEEIRNLILPYISDMNFVQDLCEDLYELFKTDKGFDKATFESQMSVMRGQILNLTQALRDGKSPFQLVQIPCVIVERSQGGSQGRIVHLSNSFTQTVNCRKPFFSSW

SEQ ID NO: 18785 - protein, 481 aa, Homo sapiens
MEDPSEPDRLASADGGSPEEEEDGEREPLLPRIAWAHPRRGAPGSAVRLLDAAGEEGEAGDEELPLPPGDVGVSRSSSAELDRSRPAVSVTIGTSEMNAFLDDPEFADIMLRAEQAIEVGIFPERISQGSSGSYFVKDPKRKIIGVFKPKSEEPYGQLNPKWTKYVHKVCCPCCFGRGCLIPNQGYLSEAGAYLVDNKLHLSIVPKTKVVWLVSETFNYNAIDRAKSRGKKYALEKVPKVGRKFHRIGLPPKIGSFQLFVEGYKEAEYWLRKFEADPLPENIRKQFQSQFERLVILDYIIRNTDRGNDNWLVRYEKQKCEKEIDHKESKWIDDEEFLIKIAAIDNGLAFPFKHPDEWRAYPFHWAWLPQAKVPFSEEIRNLILPYISDMNFVQDLCEDLYELFKTDKGFDKATFESQMSVMRGQILNLTQALRDGKSPFQLVQIPCVIVERSQGGSQGRIVHLSNSFTQTVNCRKPFFSSW

SEQ ID NO: 18786 - protein, 530 aa, Arabidopsis thaliana
MDLGVRVSGHETVSSPGQTELGSGFSNKQERSGFDGEDCWRSSKLSRTSTDGFSSSPASAKTLSFHQGIPLLRSTTINDPRKGQEHMLSFSSASGKSDVSPYLQYCRNSGYGLGGMMNTSNMHGNLLTGVKGPFSLTQWAELEQQALIYKYITANVPVPSSLLLSLKKSFFPYGSLPPNSFGWGSFHLGFSGGNMDPEPGRCRRTDGKKWRCSRDAVPDQKYCERHINRGRHRSRKPVEGQNGHNTNAAAAASAAAASTAAAVSKAAAGTSAVAMRGSDNNNSLAAAVGTQHHTNNQSTDSLANRVQNSRGASVFPATMNLQSKETHPKQSNNPFEFGLISSDSLLNPSHKQASYATSSKGFGSYLDFGNQAKHAGNHNNVDSWPEELKSDWTQLSMSIPMAPSSPVQDKLALSPLRLSREFDPAIHMGLGVNTEFLDPGKKTNNWIPISWGNNNSMGGPLGEVLNSTTNSPKFGSSPTGVLQKSTFGSLSNSSSASSTIIGDNNNKNGDGKDPLGPTTLMNTSATAPSL

SEQ ID NO: 18787 - protein, 535 aa, Arabidopsis thaliana
MDIGVHVLGSVTSNENESLGLKELIGTKQDRSGFIGEDCLQRSLKLARTTTRAEEEENLSSSVAAAYCKTMSFHQGIPLMRSASPLSSDSRRQEQMLSFSDKPDALDFSKYVGLDNSSNNKNSLSPFLHQIPPPSYFRSSGGYGSGGMMMNMSMQGNFTGVKGPFTLTQWAELEQQALIYKYITANVPVPSSLLISIKKSFYPYGSLPPSSFGWGTFHLGFAGGNMDPEPGRCRRTDGKKWRCSRDAVPDQKYCERHINRGRHRSRKPVEVQSGQNQTAAAASKAVTTPQQPVVAGNTNRSNARASSNRSLAIGSQYINPSTESLPNNRGVSIYPSTVNLQPKESPVIHQKHRNNNNPFEFGHISSDSLLNPNTAKTYGSSFLDFSSNQEKHSGNHNHNSWPEELTSDWTQLSMSIPIASSSPSSTHNNNNAQEKTTLSPLRLSRELDLSIQTDETTIEPTVKKVNTWIPISWGNSLGGPLGEVLNSTTNSPTFGSSPTGVLQKSTFCSLSNNSSVSSPIAENNRHNGDYFHYTT

SEQ ID NO: 18788 - protein, 524 aa, Arabidopsis thaliana
MDIGVHVLGSVTSNENESLGLKELIGTKQDRSGFIGEDCLQRSLKLARTTTRAEEEENLSSSVAAAYCKTMSFHQGIPLMRSASPLSSDSRRQEQMLSFSDKPDALDFSKYVGLDNSSNNKNSLSPFLHQIPPPSYFRSSGGYGSGGMMMNMSMQGNFTGVKGPFTLTQWAELEQQALIYKYITANVPVPSSLLISIKKSFYPYGSLPPSSCGNMDPEPGRCRRTDGKKWRCSRDAVPDQKYCERHINRGRHRSRKPVEVQSGQNQTAAAASKAVTTPQQPVVAGNTNRSNARASSNRSLAIGSQYINPSTESLPNNRGVSIYPSTVNLQPKESPVIHQKHRNNNNPFEFGHISSDSLLNPNTAKTYGSSFLDFSSNQEKHSGNHNHNSWPEELTSDWTQLSMSIPIASSSPSSTHNNNNAQEKTTLSPLRLSRELDLSIQTDETTIEPTVKKVNTWIPISWGNSLGGPLGEVLNSTTNSPTFGSSPTGVLQKSTFCSLSNNSSVSSPIAENNRHNGDYFHYTT

SEQ ID NO: 18789 - protein, 576 aa, Glycine max
  unsure (1)..(576): unsure at all Xaa locations
MDLGVVGLEGVVGSESGCVFGSSLASDPGQSTSGTDLVCXKQERSAIASEDDEWGTYKVAKIDHDMSSAPKAMIFQQRNNSLLRSNNATLFSDGHHQSQMLSFSSPKSETLLHQLSSYSRNTGYSSGSXXSMHGALAGVRGPFTPSQWMELEHQALIYKYITANMPVPTHLLIPIRKALDSVGFCNFSTGLLRSNSLGWGGFHLGFSNSTDPDPGRCRRTDXKKWRCSRDAVVDQKYCERHMNRGRHRSRKPVEGQSGHALTTTNTPNASSNSTVXARQPQQQHLCTHQCAPPSSSXXSSPANTINRMFMSNNKENNNTSERTKDGLALPMLPPTLEPKPKEPYDESSRNKNEFGLVTSDSLLNPSQKRSFDSSSSSQKDDSSESQQQSHHNHNHRSSSSIWPELDNMQSDRTQLSISIPIATSSPSNEKLTLSPLRLSREFDPIQMGLGVGSASNEANTRQANWIPITWXXSSMGGPLGEVLNLSNNPPPIGSSPTGVLQKTAFGSLSNSSAGSSPRGAPENNNXRIEISDDSLFSRLNCFLLLLFFFFLKKLFGNGLAFVECVDHNNSTRVVAG

SEQ ID NO: 18790 - protein, 391 aa, Glycine max
  unsure (1)..(391): unsure at all Xaa locations
XGFHLGFSNNTDPEPGRCRRTDGKKWRCSRDAVVDQKYCERHMNRGRHRSRKPVEGQSGHALTTTTSNTPNASSNSVVPGNNNNTFAHNNVHHPIPPHSSPVNTITRMFTSNKENNNSTSERMQDPALPMLSANLELKPKENNPYSSRNNNEFGLVTSDSLLNPSEKRSFTSSQKNDSSDFIDDSPKPQSNHHHRSSSIWPELDNMQSDRTQLSISIPISSSDPSNEKLTLSPLRLSRELDPIQMGLGVGXSAPNEANTRQANWIPITWXXSSMGGPLGEVLNGWDNNPPSGSSPTGVLQKSAFGSLSNSSAGSSPRGAENNKEGATLCNALXSTSXQEEEAPCPLKYDEAMLEEEEDEKDFVLLTSIISEVYIYMVMLEFGKMCSCSCSC

SEQ ID NO: 18791 - protein, 293 aa, Glycine max
  unsure (1)..(293): unsure at all Xaa locations
MDLGVVGLEGVVGSESCCVFGSSLASDPEIKQYGSGVLKQERSAIASEDDEWRTSKVAKTDHDMSSASKAMLFQQRNNSLLRSNATLFSDGHHHQSQMLSFSSPKSESLLVDKASYTRNAGYSSGSXXSMHGALAGVRGPFTPSQWMELEHQALIYKYITSNVPVPTHLIPIRKALDSLGFCNFSTGLLRPNALGWGGFHLGFSNNTDPEPGRCRRTDGKKWRCSRDAVVDQKYCERHMNRGRHRSRKPVEGQLGHALTTTTTTNTPNASSNSTVVPRNTTTTTTFAHNNVHX

SEQ ID NO: 18792 - protein, 296 aa, Glycine max
  unsure (1)..(296): unsure at all Xaa locations
MDLGVVGLEGVVGSESGCVFGSSLASDPGQSTSGTDLVCXKQERSAIASEDDEWGTYKVAKIDHDMSSAPKAMIFQQRNNSLLRSNNATLFSDGHHHQSQMLSFSSPKSETLLHQLSSYTRNTGYSSGSXXSMHGALAGVRGPFTPSQWMELEHQALIYKYITSNVPVPTHLIPIRKALDSLGFCNFSTGLLRPNALGWGGFHLGFSNNTDPEPGRCRRTDGKKWRCSRDAVVDQKYCERHMNRGRHRSRKPVEGQLGHALTTTTTTNTPNASSNSTVVPRNTTTTTTFAHNNVHX

SEQ ID NO: 18793 - protein, 365 aa, Glycine max
  unsure (1)..(365): unsure at all Xaa locations
YGCEKTTEXGKKWRCSRDAVVDQKYCERHMNRGRHRSRKPVEGQSGHALTTTNTPNASSNSTVXARQPQQQHLCTHQCAPPSSSXXSSPANTINRMFMSNNKENNNTSERTKDGLALPMLPPTLELKPKEPYDESSRNNNEFGLVTSDSLLNPSQKRSFDSSSSSQKGHFIDDSPKPQSHHNHHRSSSYXWPELDNMQSDRTQLSISIPISSSSPSNEKLTLSPLRLSRALDPIQMGLGVGSGAYEANPRQANWIPITWXXSSMGGPLGEVLNLSNNPPPIGSSPTGVLQKTAFGSLSNSSAGSSPRGAPENNNXRIEISDDSLFSRLNCFLLLLFFFFLKKLFGNGLAFVECVDHNNSTRVVAG

SEQ ID NO: 18794 - protein, 483 aa, Oryza sativa
MAAVDGEGAMARWIELEHQALIYKYLAANSPVPHSLLIPIRRSLTSPYSLGSSTLGWGSFQLGYSGSADPEPGRCRRTDGKKWRCSRDAVADQKYCERHMNRGRHRSRKHVEGQPGHAAKAMPAAVAAAAASATQPSAPAAHSGGAANTANPCSLQYSRDLANKHNESEQVQDSDSLSMLTSISTRNTGSLFPFSKQHNPFEVSNSRPDFGLVSPDSLMSSPHRRTSICSLRRGMNNRVQFPFNTLWTGQGHLHKDAWPDAEDMQAQRSQLSISAPMASSDLSSASTSPIHEKLMLSPLKLSREYSPIGLGFAANRDEVNQGEANWMPMFRDSLMGGPLGEVLTKNNNMEGFDSSPVGVLQKTTFGSVSSSTGSSPRLENHSDDGNSNLRDDLGSVVVNHPSIRLLVFGQKSRACNTLLKSNALVCTSSTENAVLVLRMSHSAAAFHGRSCVHETDCKRHSENDLNRRRNRRADHATQRMPKQ

SEQ ID NO: 18795 - protein, 370 aa, Oryza sativa
  unsure (1)..(370): unsure at all Xaa locations
AGWPACTEPGLTGWTDPRGPFQLGYSGSADPEPGRCRRTDGKKWRRSRDAVADQKYCERHMNRGRHRSRKHVEGQPGHAAKAMPAAVAAAAASATQPSAPAAHSGGAANTANPCSLQYSRDLANKHNESEQVQDSDSLSMLTSISTRNTGSLFPFSKQHNPFEVSNSRPDFGLVSPDSLMSSPHRRTSICSLRRGMNNRVQFPFNTLWTGQGHLHKDAWPDAEDMQAQRSQLSISAPMASSDLSSASTSPIHEKLMLSPLKLSREYSPIGLGFAANRDEVNQGEANWMPMFRDSLMGGPLGEVLTKNNNMEGFDSSPVGVLQKTTFGSVSSSTGSSPRLENHSDDGNSNLRDDLGSVVVNHPSIRLVXAF

SEQ ID NO: 18796 - protein, 841 aa, Oryza sativa
  unsure (1)..(841): unsure at all Xaa locations
XWSLVVQVVQXCSCKYHCIISSFATDTSPAAGALVMKFCSIKLSIADWCNSTDGTIKTMANAMQTKYDKYWEKSNMALVVACFLDPRYKTSSIEYYSMKIYGLEAAEKFDEFNGVIKKLFDVYATSACATSKKKGAEMHVHLNENDSSHDHEQHLQRFLLERSQPICSDKTELQIYMEQPLLLWTSKDPFDILSWWKLKQAEFPILCKLARDFLCIQVSTVASESAFSAGGRVVDPFRTRLDPEAVQALVCTKDWIKAANNGYKTQAIINELDIESVESLANLLIVINIXXGAFVSTSSLSGLCIPRNIRFRIRVRSYSILIRIRDNSYSFPYPSYSYSFPYPPNNMKTDTPRIREPASHFCSRTVQPDAAAAAAGLLRWMAMATPTTNGSFLLGSGGYPGAQILSFSSSGHSGNEMCPLSPKMQSLLNPLEMALTLFTLPSSSERGLDCGSSDVARMQGVLARVRGPFTPTQWMELEHQALIYKHIVANAPVPAGLLLPIRRSLHPPVFPHFSSGGILGSSSLGWGSFQLGYSGSADSEPGRCRRTDGKKWRCSRDAVVDQKYCERHINRGRHRSRKHVEGQSSHAAKATVPAIAQPPIGASNGKLSGSHGVSNELTKTLATNRMMLDKANLIERSQDYTNQQHNILQNNTKGDNWSEEMSSQADYAVIPAGSLMNTPQSANLNPIPQQQRCKQSLFGKGIQHDDIQLSISIPVDNSDLPTNYNKAQMDHVVGGSSNGGNNTRASWIPGSWEASIGGPLGEFFTNTSSASDDKGKSRHPPSLNLLADGHTTSPQLQSPTGVLQMTSFSSVPSSTVSSPAGSLCNGLLTSGLVNAQTVQTL

SEQ ID NO: 18797 - protein, 215 aa, Triticum aestivum
  unsure (1)..(215): unsure at all Xaa locations
GRAAALLRHARLLSSVRGPFTPSQWMELEHQALIYKYLAANIAVPHNLVVPIRRSVTSLYPSAYFGSSTLGWGLFQLGYSGSADLEPGRCRRTDGKKWRCSRDAVADQKYCERHMNRGRHRSRKHVEGQPGHAAKAMPATAAAAAQPGALATGGGGGAPAGAAICHEQQPLKNYAASTIDPCSLQYNRGNGEQAATRVRASAGLRHPLDADLHEX

SEQ ID NO: 18798 - protein, 397 aa, Arabidopsis thaliana
MMSLSGSSGRTIGRPPFTPTQWEELEHQALIYKYMVSGVPVPPELIFSIRRSLDTSLVSRLLPHQSLGWGCYQMGFGRKPDPEPGRCRRTDGKKWRCSREAYPDSKYCEKHMHRGRNRARKSLDQNQTTTTPLTSPSLSFTNNNNPSPTLSSSSSSNSSSTTYSASSSSMDAYSNSNRFGLGGSSSNTRGYFNSHSLDYPYPSTSPKQQQQTLHHASALSLHQNTNSTSQFNVLASATDHKDFRYFQGIGERVGGVGERTFFPEASRSFQDSPYHHHQQPLATVMNDPYHHCSTDHNKIDHHHTYSSSSSSQHLHHDHDHRQQQCFVLGADMFNKPTRSVLANSSRQDQNQEEDEKDSSESSKKSLHHFFGEDWAQNKNSSDSWLDLSSHSRLDTGS

SEQ ID NO: 18799 - protein, 397 aa, Arabidopsis thaliana
MMSLSGSSGRTIGRPPFTPTQWEELEHQALIYKYMVSGVPVPPELIFSIRRSLDTSLVSRLLPHQSLGWGCYQMGFGRKPDPEPGRCRRTDGKKWRCSREAYPDSKYCEKHMHRGRNRARKSLDQNQTTTTPLTSPSLSFTNNNNPSPTLSSSSSSNSSSTTYSASSSSMDAYSNSNRFGLGGSSSNTRGYFNSHSLDYPYPSTSPKQQQQTLHHASALSLHQNTNSTSQFNVLASATDHKDFRYFQGIGERVGGVGERTFFPEASRSFQDSPYHHHQQPLATVMNDPYHHCSTDHNKIDHHHTYSSSSSSQHLHHDHDHRQQQCFVLGADMFNKPTRSVLANSSRQDQNQEEDEKDSSESSKKSLHHFFGEDWAQNKNSSDSWLDLSSHSRLDTGN

SEQ ID NO: 18800 - protein, 396 aa, Arabidopsis thaliana
MSLSGSSGRTIGRPPFTPTQWEELEHQALIYKYMVSGVPVPPELIFSIRRSLDTSLVSRLLPHQSLGWGCYQMGFGRKPDPEPGRCRRTDGKKWRCSREAYPDSKYCEKHMHRGRNRARKSLDQNQTTTTPLTSPSLSFTNNNNPSPTLSSSSSSNSSSTTYSASSSSMDAYSNSNRFGLGGSSSNTRGYFNSHSLDYPYPSTSPKQQQQTLHHASALSLHQNTNSTSQFNVLASATDHKDFRYFQGIGERVGGVGERTFFPEASRSFQDSPYHHHQQPLATVMNDPYHHCSTDHNKIDHHHTYSSSSSSQHLHHDHDHRQQQCFVLGADMFNKPTRSVLANSSRQDQNQEEDEKDSSESSKKSLHHFFGEDWAQNKNSSDSWLDLSSHSRLDTGN

SEQ ID NO: 18801 - protein, 375 aa, Glycine max
  unsure (1)..(375): unsure at all Xaa locations
PVAFIFSSSTSLLTLMMNGTNRFPFTPSHWREXASGISIPPDLLFTIKRSYXXDSPLSSXXLLPNQPQLGWNYLQMGLGKKIEDPEPGRCRRTDGKKWRCSKEAYPDSKYCERHMHRGKNRSRKPVEVLKSTTTPSSSTTNSNVSSTQQAISSITKINSTLSPLASSETPNTTTILNTMAPFSIIITLLQGPLALACLLKTTVLPCFLTLAHALSPTQTAGVXXYVYGEKEEVDEHAFFTDCGVMKSFSASSMDDSWQLTPLTMSSSSSSSKQRSSFGXXSSDYSXXLQLQSHSKQQQQEHHQDQGCYMFGAGQVVKEEXXQKTVHRFFDEWPHKGREGSWLDLDDKSSTTQLSISIPTSSHDFSTFSSRTHHDG

SEQ ID NO: 18802 - protein, 396 aa, Glycine max
  unsure (1)..(396): unsure at all Xaa locations
QITITPSSEFISLFQILYLLVLHFPTILERDTHTLPSFCCLKMMSASARNRSPFTQTQWQELEHQALVFKYMVTGTPIPPDLIYSIKRSLDTSISSRLFPHHPIGWGCFEMGFGRKVDPEPGRCRRTDGKKWRCSKEAYPDSKYCERHMHRGRNRSRKPVDSSAISTATNTSQTIPSSYTRNRSPTIPPPPPPSSFPFSPLPSSMPIDQSQPFSQSYQNSSLNPFFYSQSTSSRPPDADFPPQDATTHHLFMDSAGSYSHDEKNYSRHVHGIREDVDERAFFPEASGSARSYTDSYQQLSMSSYKSYSNSNFQNINNDATTNPRQQEQQLQXXQQHCFVLGTDXXKSTRPSKEKEAXXTTTGQRPLHRFFGEWPPKNTTTDSWLDLASNSRIQTDE

SEQ ID NO: 18803 - protein, 205 aa, Oryza sativa (japonica cultivar-group)
MESQRRRWFSCVAASAAIPTSSRTPVCTPYQALYGGPYAVATAHTPAAAAAYHAQVSPFHLHLDTTHPHPPAAAVLLLHGPQGVRVRARHQGGAHGEHAFFSDGTEREHHHAAAGHGQWQFKQLGMEPKQSTTPLFPGAGYGNTAVSPYAIDLSKENDDEKERRQQQHCFLLGADLRLENSAGHDHAAATQKPQTSRPLLRRVAA

SEQ ID NO: 18804 - protein, 225 aa, Triticum aestivum
AAATHDTTPYHALYGGPYSSAGRQQHASAYHHAAQVSPFHLHLDTTHPHPPPSYYSSMDHSKDSYAYGHSVKEVHGGGEHAFFSSDHQHQHHASAGGNGQWQFKQLGGMEPKQHTTSLFPGCGGYGNNAAYAIDLSSKEEDEEKERRQQQQHCFLLGADLRLDKPSSGHGDSADQKPLRPFFDEWPHEKTGSKGSWMGLEGETQLSISIANELPITTTSRYHHGE

SEQ ID NO: 18805 - protein, 111 aa, Triticum aestivum
  unsure (1)..(111): unsure at all Xaa locations
MMLGGHGGGGGGGRCLFTASQWRELEHQALIYKYMAAGSQVPHELVLPLRHRDAAFAAIDTAPSLACYPPPQPSLGWGLYGAGSQYARKPEDPEPGRCRRTDGKKWRCSRX

SEQ ID NO: 18806 - protein, 389 aa, Zea mays
  unsure (1)..(389): unsure at all Xaa locations
MMMMSSGRAGGGATAGRYPFTASQWQELEHQALIYKCLASGKPIPSYLMPPLRRILDSALATSPSLAYPPQPSLGWGCFGMGFTRKADEDPEPGRCRRTDGKKWRCSKEAYPDSKYCEKHMHRGKNRSRKPVEMSLATPAPAPAPAAATTATATSSPAPSYHRPAHDATPSPYHALYGXXAAAAVALTRGGAYHHAQHVSPFHFHLETTHPHPPPPYNYSADQRDYAYGHAAAKEVGEHAFFSDGAXXERVDRQAAAGQWQFRQLGVETKPGPTPLFPVAGYGHGAASPYGVEMGKDDDEQEERRRQHCFVLGADLRLERPSSGHGHGHDHDDAAAAQKPLRPFFDEWPHQKGDKAGSWMGLDGETQLSMSIPMAATDLPVTSRFRNDE

SEQ ID NO: 18807 - protein, 380 aa, Zea mays
  unsure (1)..(380): unsure at all Xaa locations
MMMMSGRAATAGRYPFTASQWQELEHQALIYKCLASGKPIPSYLMPPLRRILDSALATSPSLAAFPPQPSLGWGGCFGMGFSRKPADEDPEPGRCRRTDGKKWRCSKEAYPDSKYCEKHMHRGKNRSRKPVEMSLATPAPASSATSAAAAXXTSSSQAPSYHSPAPAVPYHAPYGAAYHHTQTQVTXXSPFHLLHLETTHPHPPPPPPPPYYYADQRDYAYGKEVGERAFFSDGAXXERDRQQQAAGQWQFKQLGTMEATSTTPLLVPAAGYGHGAASPYGVGQAKEDEEEEETRRQQQHCFVLGADLRLAERPSGAHDAAAQKPLRHFIDEWPHEKGSKGSWMGGLDGETTQLSMSIPMAAAADLPVTSRYRTXWRRAL

SEQ ID NO: 18808 - protein, 603 aa, Oryza sativa (japonica cultivar-group)
MDLGGGVGVVMAAVDGGGGGELGGGGLLGSRLMKHGRGNAGDQEHEWRPPAKQARGGDASSAAAAVAAAAAVSEAVKVAAPFLLGASCSPGHGGEQMLSFSSSASSCSSGGGGAAVAAAAAAGGAMPLYYGTPASCSGLSSVSLSSSMQGAMARVRGPFTPSQWIELEHQALIYKYLAANSPVPHSLLIPIRRSLTSPYSPAYFGSSTLGWGSFQLGYSGSADPEPGRCRRTDGKKWRCSRDAVADQKYCERHMNRGRHRSRKHVEGQPGHAAKAMPAAVAAAAASATQPSAPAAHSGGAVAGLAINHQHQQMKNYAANTANPCSLQYSRDLANKHNESEQVQDSDSLSMLTSISTRNTGSLFPFSKQHNPFEVSNSRPDFGLVSPDSLMSSPHSSLENVNLLTSQSLNEQQSSVSLQHFVDWPRTPAQGALAWPDAEDMQAQRSQLSISAPMASSDLSSASTSPIHEKLMLSPLKLSREYSPIGLGFAANRDEVNQGEANWMPMFRDSLMGGPLGEVLTKNNNMEARNCLSESLNLLNDGWDSSSGFDSSPVGVLQKTTFGSVSSSTGSSPRLENHSVYDGNSNLRDDLGSVVVNHPSIRLV

SEQ ID NO: 18809 - protein, 338 aa, Sorghum bicolor
MMLSGHGGGRRLFTASQWQELEHQALIFKYMASGAPVPHDLVLPLRLATGVDTAPSLAFPPQPSPSLAYWGCYGAGAPFGRKAEDPEPGRCRRTDGKKWRCSREAHGESKYCEKHIHRGKSRSRKPVEVTSPAAAAYRPSALSISPPRAADAPPPSLAHPHQHLRHGAASAAAAARGAPGQATAGALQLHLDASLHAASPPPSYHRYAHSHAHYTPPPSLFPGGGGGYDYGQSKELREAELRRRHFHALGADLSLDKPLAATAAGSAAAEKPLRRFFDEWPRESGDTRPSSWAGAEDATQLSISIPAASPSDLAASAAARYHNGEPSGERKTPLLLVP

SEQ ID NO: 18810 - protein, 607 aa, Oryza sativa
  unsure (1)..(607): unsure at all Xaa locations
XANPAEFVGQRVREQXRRRGRWIEQSSAGRRRVFVQTETGCVLGMDLDRSDNAHTVKRRLQLALNVPTGETSLTFGDRVLENDLSFIRPDSPLLLTRNSINRSCSTPCLCPVSKDFEHKDRSGLVEMLGCSISCARVKRLVDDVVTAIRSGVDPVPIGSGLGGSYYFRNISGDRVAIVKPTDEEPFAPNNPKGFVGRALGQPGLKKSVRVGETGFREVAAYLLDHDNFANVPPTALVKITHSIFHINCPVNGGRAHDQKQQVSSKIASFQQFIAHDFDASDHGTSSFPVAAVHRIGILDIRIFNTDRHAGNVLVRKLDGGTGRFGCQTELFPIDHGLCLPENLEDPYFEWIHWAQSSIPFSEEELEYIKNLDPMRDVAMLRRELPIIREACLRVLXVLCTIFLKEAAASGLCLAEIGEMMTREFRGLEEEPSKLEVVCMEARRKLAEWEPYSPVIEQGEDMDFQFSLDMLGEYNDVIRSPRFNGLGAKGNGFRNPLSKLVESIDEDNDDDDGRSESSKRSSERVHSGGLKFPSADKSSGSNGSVHAHRSADEQLPSSVYFVRLSDMNAEEWNIFLEKFQELLKEALQERAAAAGQRMKQRLGTSCKF

SEQ ID NO: 18811 - protein, 402 aa, Triticum aestivum
  unsure (1)..(402): unsure at all Xaa locations
XGETGFREVAAYLLDHENFANVPATALVKITHSVFNINRPMNGGTPAHDHKPQVTSKIASFQQFIAHDFDASDHGTSSFPVAAVHRIGILDIRIFNTDRHGGNVLVRKLDGGTGRFGCQTELFPIDHGLCLPENLEDPYFEWIHWAQASIPFSEEELEYISKLDPMRDAAMLRGELPMIREACLRVLILCTIFLKEAAAFGLCLAEIGEMMTREFAGMEEEPRKLEIVCMENWRXADQREAFXGSVERVEDMDFQFSMDVLGGYSDVIRSXRFNCSGMEARSRNPLTKLVESMAEDGDDEEDRKEPSRHSSDRFSSADFSTPSLHRTTSSKTSSNSSVHAPNRSADEQLPSSLCFVRLSDMSAEEWHVFVEKFQELLKEALEECKAAAGQRMKQRLGTSCKF

SEQ ID NO: 18812 - protein, 261 aa, Mus musculus
MASADWGYGSENGPDQWSKLYPIANGNNQSPIDIKTSEANHDSSLKPLSISYNPATAKEIVNVGHSFHVIFDDSSNQSVLKGGPLADSYRLTQFHFHWGNSNDHGSEHTVDGTRYSGELHLVHWNSAKYSSASEAISKADGLAILGVLMKVGPANPSLQKVLDALNSVKTKGKRAPFTNFDPSSLLPSSLDYWTYFGSLTHPPLHESVTWVICKDSISLSPEQLAQLRGLLSSAEGEPAVPVLSNHRPPQPLKGRTVRASF

SEQ ID NO: 18813 - protein, 261 aa, Mus musculus
MASADWGYGSENGPDQWSKLYPIANGNNQSPIDIKTSEANHDSSLKPLSISYNPATAKEIVNVGHSFHVIFDDSSNQSVLKGGPLADSYRLTQFHFHWGNSNDHGSEHTVDGTRYSGELHLVHWNSAKYSSASEAISKADGLAILGVLMKVGPANPSLQKVLDALNSVKTKGKRAPFTNFDPSSLLPSSLDYWTYFGSLTHPPLHESVTWVICKDSISLSPEQLAQLRGLLSSAEGESAVPVLSNHRPPQPLKGRTVRASF

SEQ ID NO: 18814 - protein, 261 aa, Mus musculus
MASADWGYGSENGPDQWSKLYPIANGNNQSPIDIKTSEANHDSSLKPLSISYNPATAKEIVNVGHSFHVIFDDSSNQSVLKGPLADSYRLTQFHFHWGNSSNDHGSEHTVDGTRYSGELHLVHWNSAKYSSASEAISKADGLAILGVLMKVGPANPSLQKVLDALNSVKTKGKRAPFTNFDPSSLLPSSLDYWTYFGSLTHPPLHESVTWVICKDSISLSPEQLAQLRGLLSSAEGESAVPVLSNHRPPQPLKGRTVRASF

SEQ ID NO: 18815 - protein, 260 aa, Mus musculus
MAKEWGYASHNGPDHWHELYPIAKGDNQSPIELHTKDIKHDPSLQPWSASYDPGSAKTILNNGKTCRVVFDDTYDRSMLRGGPLSGPYRLRQFHLHWGSSDDHGSEHTVDGVKYAAELHLVHWNPKYNTFGEALKQPDGIAVVGIFLKIGREKGEFQILLDALDKIKTKGKEAPFTHFDPSCLFPACRDYWTYHGSFTTPPCEECIVWLLLKEPMTVSSDQMAKLRSLFSSAENEPPVPLVGNWRPPQPVKGRVVRASFK

SEQ ID NO: 18816 - protein, 260 aa, Mus musculus
MAKEWGYARHNGPDHWHELYPIAKGDNQSPIELHTKDIKHDPSLQPWSASYDPGSAKTILNNGKTCRVVFDDTYDRSMLRGGPLSRPYRLRQFHLHWGSSDDHGSEHTVDGVKYAAELHLVHWNPRYNTFGEALKQPDGIAVVGILLKIGREKGEFQILLDALDKIKTKGKEAPFTHFDPSCLFPACRDYWTYHGSFTTPPCEECIVWLLLKEPMTVSSDQMAKLRSLFSSAENEPPVPLVGNWRPPQPVKGRVVRASFK

SEQ ID NO: 18817 - protein, 262 aa, Mus musculus
MARLSWGYGEHNGPIHWNELFPIADGDQQSPIEIKTKEVKYDSSLRPLSIKYDPASAKIISNSGHSFNVDFDDTEDKSVLRGGPLTGNYRLRQFHLHWGSADDHGSEHVVDGVRYAAELHVVHWNSDKYPSFVEAAHESDGLAVLGVFLQIGEHNPQLQKITDILDSIKEKGKQTRFTNFDPLCLLPSSWDYWTYPGSLTVPPLLESVTWIVLKQPISISSQQLARFRSLLCTAEGESAAFLLSNHRPPQPLKGRRVRASFY

SEQ ID NO: 18818 - protein, 259 aa, Mus musculus
AKEWGYARHNGPDHWHELYPIAKGDNQSPIELHTKDIKHDPSLQPWSASYDPGSAKTILNNGKTCRVVFDDTYDRSMLRGGPLSRPYRLRQFHLHWGSSDDHGSEHTVDGVKLAAELHLVHWNPRYNTFGEALKQPDGIAVVGILLKIGREKGEFQILLDALDKIKTKGKEAPFTHFDPSCLFPACRDYWTYHGSFTTPPCEECIVWLLLKEPMTVSSDQMAKLRSLFSSAENEPPVPLVGNWRPPQPVKGRVVRASFK

SEQ ID NO: 18819 - protein, 260 aa, Mus musculus
MSHHWGYSKHNGPENWHKDFPIANGDRQSPVDIDTATAQHDPALQPLLISYDKAASKSIVNNGHSFNVEFDDSQDNAVLKGGPLSDSYRLIQFHFHWGSSDGQGSEHTVNKKKYAAELHLVHWNTKYGDFGKAVQQPDGLAVLGIFLKIGPASQGLQKVLEALHSIKTKGKRAAFANFDPCSLLPGNLDYWTYPGSLTTPPLLECVTWIVLREPITVSSEQMSHFRTLNFNEEGDAEEAMVDNWRPAQPLKNRKIKASFK

SEQ ID NO: 18820 - protein, 260 aa, Mus musculus
MSHHWGYSKHNGPENWHKDFPIANGDRQSPVDIDTATAQHDPALQPLLISYDKAASKSIVNNGHSFNVEFDDSQDNAVLKGGPLSDSYRLIQFHFHWGSSDGQGSEHTVNKKKYAAELHLVHWNTKYGDFGKAVQQPDGLAVLGYFLKIGPASQGLQKVLEALHSIKTKGKRAAFANFDPCSLLPGNLDYWTYPGSLTTPPLLECVTWIVLREPITVSSEQMSHFRTLNFNEEGDAEEAMVDNWRPAQPLKNRKIKASFK

SEQ ID NO: 18821 - protein, 260 aa, Mus musculus
MSHHWGYSKHNGPENWHKDFPIANGDRQSPVDIDTATAQHDPALQPLLISYDKAASKSIVNNGHSFNVEFDDSQDNAVLKGGPLSDSYRLIQFHFHWGSSDGQGSEHTVNKKKYAAELHLVHWNTKYGDFGKAVQQPDGLAVLGYFLKIGPASQGLQKVLEALHSIKTKGKRAAFANFDPCSLLPGNLDYWTYPGSLTTPPLLECVTWIVLRDPITVSSEQMSHFRTLNFNEEGDAEEAMVDNWRPAQPLKNRKIKASFK

SEQ ID NO: 18822 - protein, 260 aa, Mus musculus
MSHHWGYSKHNGPENWHKDFPIANGDRQSPVDIDTATAHHDPALQPLLISYDKAASKSIVNNGHSFNVEFDDSQDNAVLKGGPLSDSYRLIQFHFHWGSSDGQGSEHTVNKKKYAAELHLVHWNTKYGDFGKAVQQPDGLAVLGYFLKIGPASQGLQKVLEALHSIKTKGKRAAFANFDPCSLLPGNLDYWTYPGSLTTPPLLECVTWIVLREPITVSSEQMSHFRTLNFNEEGDAEEAMVDNWRPAQPLKNRKIKASFK

SEQ ID NO: 18823 - protein, 248 aa, Mus musculus
CATGTRQSPINIQWKDSVYDPQLAPLRVSYDAASCRYLWNTGYAFQVEFDDSCEDSGISGGPLGNHYRLKQFHFHWGATDEWGSEHAVDGHTYPAELHLVHWNSTKYENCKKASVGENGLAVIGVFLKLGAHHQALQKLVDVLPEVRHKDTQVAMGPFDPSCLMPACRDYWTYPGSLTTPPLAESVTWIVQKTPVEVSPSQLSMFRTLLFSGRGEEEDVMVNNYRPLQPLRDRKLRSSFRLDRTKMRS

SEQ ID NO: 18824 - protein, 248 aa, Mus musculus
CATGTRQSPINIQWKDSVYDPQLAPLRVSYDAASCRYLWNTGYFFQVEFDDSCEDSGISGGPLGNHYRLKQFHFHWGATDEWGSEHAVDGHTYPAELHLVHWNSTKYENYKKASVGENGLAVIGVFLKLGAHHQALQKLVDVLPEVRHKDTQVAMGPFDPSCLMPACRDYWTYPGSLTTPPLAESVTWIVQKTPVEVSPSQLSMFRTLLFSGRGEEEDVMVNNYRPLQPLRDRKLRSSFRLDRTKMRS

SEQ ID NO: 18825 - protein, 248 aa, Mus musculus
SAEGTRQSPINIQWKDSVYDPQLAPLRVSYDAASCRYLWNTGHAFQVEFDDSCEDSGISGGPLGNHYRLKQFHFHWGATDEWGSEHAVDGHTYPAELHLVHWNSTKYENYKKASVGENGLAVIGVFLKLGAHHQALQKLVDVLPEVRHKDTQVAMGDFDPSCLMPACRDYWTYPGSLTTPPLAESVTWIVQKTPVEVSPSQLSMFRTLLFSGRGEEEDVMVNNYRPLQPLRDRKLRSSFRLDRTKMRS

SEQ ID NO: 18826 - protein, 264 aa, Mus musculus
MTGHHCWGYGQDDGPSNWHKLYPIAQGDRQSPINIISSQAVYSPSLQPLELFYEACMSLSITNNGHSVQVDFNDSDDRTVVSGGPLEGPYRLKQLHFHWGKKRDMGSEHTVDGKSFPSELHLVHWNAKKYSTFGEAAAAPDGLAVVGVFLETGDEHPSMNRLTDALYMVRFKDTKAQFSCFNPKCLLPTSRHYWTYPGSLTTPPLSESVTWIVLREPIRISERQMEKFRSLLFTSEDDERIHMVDNFRPPQPLKGRVVKASFQA

SEQ ID NO: 18827 - protein, 317 aa, Mus musculus
MAVMNHLRVILQVSSSTLPWRRCWVPRLVPRRSCSLYTCTYRTRNRALPPLWENLDLVPAGDRQSPINIRWRDSVYDPGLKPLTISYDPATCLHIWNNGYSFLVEFEDSTDKSVVEGGPLEHNYRLKQFHFHWGAIDAWGSEHTVDSKCYPAELHLVHWNAVKFESFEDAALEENGLAVIGVFLKLGKHHKELQKLVDTLPSIKHKDTLVEFGSFDPSCLMPTCPDYWTYSGSLTTPPLSESVTWIIKKQPVEVDRDQLEQFRTLLFTSEGEKEKRMVDNFRPLQPLMNRTVRSSFRHDYVLNIQVKAKPTASEVTP

SEQ ID NO: 18828 - protein, 317 aa, Mus musculus
MAVMNHLRVILQVSSSTLPWRRCWVPRLVPRRSCSLYTCTYRTRNRALPPLWENLDLVPAGDRQSPINIRWRDSVYDPGLKPLTISYDPATCLHIWNNGYSFLVEFEDSTDKSVVEGGPLEHNYRLKQFHFHWGAIDAWGSEHTVDSKCYPAELHLVHWNAVKFESFEDAALEENGLAVIGVFLKLGKHHKELQKLVDTLPSIKHKDTLVEFGSFDPSCLMPTCPDYWTYSGSLTTPPLSESVTWIIKKQPVEVDRDQLEQFRTLLFTFEGEKEKRMVDNFRPLQPLMNRTVRSSFRHDYVLNIQVKPKPTASEVTP

SEQ ID NO: 18829 - protein, 317 aa, Mus musculus
MAVMNHLRVILQVSSSTLPWRRCWVPRLVPRRSCSLYTCTYRTRNRALPPLWENLDLVPAGDRQSPINIRWRDSVYDPGLKPLTISYDPATCLHIWNNGYSFLVEFEDSTDKSVVEGGPLEHNYRLKQFHFHWGAIDAWGSEHTVDSKCYPAELHLVHWNAVKFESFEDAALEENGLAVIGVFLKLGKHHKELQKLVDTLPSIKHKDTLVEFGSFDPSCLMPTCPDYWTYSGSLTTPPLSESVTWIIKKQPVEVDRDQLEQFRTLLFTSEGEKEKRMVDNFRPLQPLMNRTVRSSFRHDYVLNIQVKPKPTASEVTP

SEQ ID NO: 18830 - protein, 299 aa, Mus musculus
MLRRDPRKPLAILRHVGLLCATGPQRWRFQHSCAEEHSNCARHPLWTGPVSSAEGTRQSPINIQWKDSVYDPQLAPLRVSYDAASCRYLWNTGYFFQVEFDDSCEDSGISGGPLGNHYRLKQFHFHWGATDEWGSEHAVDGHTYPAELHLVHWNSTKYENYKKASVGENGLAVIGVFLKLGAHHQALQKLVDVLPEVRHKDTQVAMGPFDPSCLLPACRDYWTYPGSLTTPPLAESVTWIVQKTPVEVSPSQLSTFRTLLFSGRGEEEDVMVNNYRPLQPLRDRKLRSSFRLDRTKMRS

SEQ ID NO: 18831 - protein, 298 aa, Mus musculus
MLRRDPRKPLAILRHVGLLCATGPQRWRFQHSCAEEHSNCARHPLWTGPVSSAEGTRQSPINIQWKDSVYDPQLAPLRVSYDAASCRYLWNTGYFFQVEFDDSCEDSGISGGPLGNHYRLKQFHFHWGATDEWGSEHAVDGHTYPAELHLFMNSTKYENYKKASVGENGLAVIGVFLKLGAHHQALQKLVDVLPEVRHKDTQVAMGPFDPSCLLPACRDYWTYPGSLTTPPLAESVTWIVQKTPVEVSPSQLSTFRTLLFSGRGEEEDVMVNNYRPLQPLRDRKLRSSFRLDRTKMRS

SEQ ID NO: 18832 - protein, 255 aa, Mus musculus
GQDDGPSNWHKLYPIAQGDRQSPINIISSQAVYSPSLQPLELFYEACMSLSITNNGHSVQVDFNDSDDRTVVSGGPLEGPYRLKQLHFHWGKKRDMGSEHTVDGKSFPSELHLVHWNAKKYSTFGEAAAAPDGLAVVGVFLETGDEHPSMNRLTDALYMVRFKDTKAQFSCFNPKCLLPTSRHYWTYPGSLTTPPLSESVTWIVLREPIRISERQMEKFRSLLFTSEDDERIHMVDNFRPPQPLKGRVVKASFQA

SEQ ID NO: 18833 - protein, 354 aa, Mus musculus
MPHRSLRATVVLLLVILKKQPSSSAPLNGSKWTYVGPAGEKNWSKKYPSCGGLLQSPIDLHSDILQYDASLAPLQFQGYNVSVEKLLNLTNDGHSVRLNLNSDMYIQGLQPHHYRAEQLHLHWGNRNDPHGSEHTVSGKHFAAELHIVHYNSDLYPDFSTASDKSEGLAVLAVLIEIGSANPSYDKIFSHLQHVKYKGQQVLIPGFNIEELLPESPGEYYRYEGSLTTPPCYPTVLWTVFRNPVQISQEQLLALETALYFTHMDDPTPREMINNFRQVQKFDERLVYISFRQGLLTNTGLSLGIILSVALAGVLGISIVLAVSIWLFKRKKSKKGDNKGVIYKPAIKKEAEVHA

SEQ ID NO: 18834 - protein, 344 aa, Mus musculus
MPHRSLRATVVLLLVILKKQPSSSAPLNGSKWTYVGPAGEKNWSKKYPSCGGLLQSPIDLHSDILQYDASLAPLQFQGYNVSVEKLLNLTNDGHSVRLNLNSDMYIQGLQPHHYRAEQLHLHWGNRNDPHGSEHTVSGKHFAAELHIVHYNSDLYPDFSTASDKSEGLAVLAVLIEIGSANPSYDKIFSHLQHVKYKGQQVLIPGFNIEELLPESPGEYYRYEGSLTTPPCYPTVLWTVFRNPVQISQEQLLALETALYFTHMDDPTPREMINNFRQVQKFDERLVYISFRQGIILSVALAGVLGISIVLAVSIWLFKRKKSKKGDNKGVIYKPAIKKEAEVHA

SEQ ID NO: 18835 - protein, 337 aa, Mus musculus
MLFFALLLKVTWILAADGGHHWTYEGPHGQDHWPTSYPECGGDAQSPINIQTDSVIFDPDLPAVQPHGYDQLGTEPLDLHNNGHTVQLSLPPTLHLGGLPRKYTAAQLHLHWGQRGSLEGSEHQINSEATAAELHVVHYDSQSYSSLSEAAQKPQGLAVLGILIEVGETENPAYDHILSRLHEIRYKDQKTSVPPFSVRELFPQQLEQFFRYNGSLTTPPCYQSVLWTVFNRRAQISMGQLEKLQETLSSTEEDPSEPLVQNYRVPQPLNQRTIFASFIQAGPLYTTGEMLGLGVGILAGCLCLLLAVYFIAQKIRKKRLGNRKSVVFTSARATTEA

SEQ ID NO: 18836 - protein, 354 aa, Mus musculus
MPHRSLRATVVLLLVILKKQPSSSAPLNGSKWTYVGPAGEKNWSKKYPSCGGLLQSPIDLHSDILQYDASLAPLQFQGYNVSVEKLLNLTNDGHSVRLNLNSDMYIQGLQPHHYRAEQLHLHWGNRNDPHGSEHTVSGKHFAAELHIVHYNSDLYPDFSTASDKSEGLAVLAVLIEIGSANPSYDKIFSHLQHVKYKGQQVLIPGFNIEELLPESPGEYYRYEGSLTTPPCYPTVLWTVFRNPVQISQEQLLALETALYFTHMDDPTPREMINNFRQVQKFDERLVYISFRQGLLTDTGLSLGIILSVALAGVLGISIVLAVSIWLFKRKKSKKGDNKGVIYKPAIKKEAEVHA

SEQ ID NO: 18837 - protein, 437 aa, Mus musculus
MASLGPSPWAPLSTPAPTAQLLLFLLLQVSAQPQGLSGMQGEPSLGDSSSGEDELGVDVLPSEEDAPEEADPPDGEDPPEVNSEDRMEESLGLEDLSTPEAPEHSQGSHGDEKGGGHSHWSYGGTLLWPQVSPACAGRFQSPVDIRLERTAFCRTLQPLELLGYELQPLPELSLSNNGHTVQLTLPPGLKMALGPGQEYRALQLHLHWGTSDHPGSEHTVNGHRFPAEIHVVHLSTAFSELHEALGRPGGLAVLAAFLQESPEENSAYEQLLSHLEEISEEGSKIEIPGLDVSALLPSDLSRYYRYEGSLTTPPCSQGVIWTVFNETVKLSAKQLHTLSVSLWGPRDSRLQLNFRATQPLNGRTIEASFPAAEDSSPEPVHVNSCFTAGDILALVFGLLFAVTSIAFLLQLRRQHRHRSGTKDRVSYSPAEMTETGA

SEQ ID NO: 18838 - protein, 437 aa, Mus musculus
  unsure (1)..(437): unsure at all Xaa locations
MASLGPSPWAPLSTPAPTAQLLLFLLLQVSAQPQGLSGMQGEPSLGDSSSGEDELGVDVLPSEEDAPEEADPPDGEDPPEVNSEDRMEESLGLEDLSTPEAPEHSQGSHGDEKGGGHSHWSYGGTLLWPQVSPACAGRFQSPVDIRLERTAFCRTLQPLELLGYELQPLPELSLSNNGHTVQLTLPPGLKMALGPGQEYRALQLHLHWGTSDHPGSEHTVNGHRFPAEIHVVHLSTAFSELHEALGRPGGLAVLAAFLQESPEENSAYEQLLSHLEEISEEGSKIEIPGLDVSALLPSDLSRYYRYEGSLTTPPCSQGVIWTVFNETVKLSAKQLHTLSVSLWGXRDSRLQLNFRATQPLNGRTIEASFPAAEDSSPEPVHVNSCFTAGDILALVFGLLFAVTSIAFLLQLRRQHRHRSGTKDRVSYSPAEMTETGA

SEQ ID NO: 18839 - protein, 192 aa, Mus musculus
EFDDSQDNAVLKGGPLSDSYRLIQFHFHWGSSDGQGSEHTVNKKKYAAELHLVHWNTKYGDFGKAVQQPDGLAVLGIFLKIGPASQGLQKVLEALHSIKTKGKRAAFANFDPCSLLPGNLDYWTYPGSLTTPPLLECVTWIVLREPITVSSEQMSHFRTLNFNEEGDAEEAMVDNWRPAQPLKNRKIKASFK

SEQ ID NO: 18840 - protein, 325 aa, Mus musculus
VAHAYASAMRALVSVVSLFFLGIQAHSDWSYSGDDGVGESQWSEQYPSCGGERQSPIDVKTEEVMFNPSLKPLSLVNYEKENLEFTMTNNGHTVSIDLPPSMYLETSDGTEFISKAFHFHWGGRDWELSGSEHTIDGIRSIMEAHFVHFNKEYGTYENAKDQKNGLAVLAVLFKIDEYAENTYYSDIISALKNIEKPGETTTLKDTTIRNLLPKDVHHYYTYPGSLTTPPCTENVQWFVLRDKVTLSKAQVVTIENSVMDHNNNTIQNGYRSTQPNNHRVVEANFLNVPDMYSSYHLYLKNMQKEILQPKKQKKTKKNRHFWSRK

SEQ ID NO: 18841 - protein, 291 aa, Mus musculus
MADLSFIEDAVAFPEKEEDEEEEEEEGVEWGYEEGVEWGLVFPDANGEYQSPINLNSREARYDPSLLDVRLSPNYVVCRDCEVTNDGHTIQVILKSKSVLSGGPLPQGQEFELYEVRFHWGRENQRGSEHTVNFKAFPMELHLIHWNSTLFGSIDEAVGKPHGIAIIALFVQIGKEHVGLKAVTEILQDIQYKGKSKTIPCFNPNTLLPDPLLRDYWVYEGSLTIPPCSEGVTWILFRYPLTISQMQIEEFRRLRTHVKGAELVEGCDGILGDNFRPTQPLSDRIIRAAFQ

SEQ ID NO: 18842 - protein, 317 aa, Mus musculus
MRALVSVVSLFFLGIQAHSDWSYSGDDGVGESQWSEQYPSCGGERQSPIDVKTEEVMFNPSLKPLSLVNYEKENLEFTMTNNGHTVSIDLPPSMYLETSDGTEFISKAFHFHWGGRDWELSGSEHTIDGIRSIMEAHFVHFNKEYGTYENAKDQKNGLAVLAVLFKIDEYAENTYYSDIISALKDIEKPGETTTLKDTTIRDLLPKDVHHYYTYPGSLTTPPCTENVQWFVLRDRVTLSKAQVVTIENSVMDHNNNTIQNGYRSTQPNNHRVVEANFLNVPDMYSSYHLYPKNMQKEILQPKKQKKTKKNRHFGSRK

SEQ ID NO: 18843 - protein, 303 aa, Mus musculus
MADLSFIEDAVAFPEKEEDEEEEEEEGVEWGYEEGVEWGLVFPDANGEYQSPINLNSREARYDPSLLDVRLSPNYVVCRDCEVTNDGHTIQVILKSKSVLSGGPLPQGQEFELYEVRFHWGRENQRGSEHTVNFKAFPMELHLIHWNSTLFGSIDEAVGKPHGIAIIALFVQIGKEHVGLKAVTEILQDIQYKGKSKTIPCFNPNTLLPDPLLRDYWVYEGSLTIPPCSEGVTWILFRYPLTISQMQIEEFRRLRTHVKGVELVEGCDGILGDNFRPTQPLSDRVIRAAFSSQRDREQTHLHQ

SEQ ID NO: 18844 - protein, 291 aa, Mus musculus
MADLSFIEDAVAFPEKEEDEEEEEEEGVEWGYEEGVEWGLVFPDANGEYQSPINLNSREARYDPSLLDVRLSPNYVVCRDCEVTNDGHTIQVILKSKSVLSGGPLPQGQEFELYEVRFHWGRENQRGSEHTVNFKAFPMELHLIHWNSTLFGSIDEAVGKPHGIAIIALFVQIGKEHVGLKAVTEILQDIQYKGKSKTIPCFNPNTLLPDPLLRDYWVYEGSLTIPPCSEGVTWILFRYPLTISQMQIEEFRRLRTHVKGAELVEGCDGILGDNFRPTQPLSDRVIRAAFQ

SEQ ID NO: 18845 - protein, 291 aa, Mus musculus
MADLSFIEDAVAFPEKEEDEEEEEEEGVEWGYEEGVEWGLVFPDANGEYQSPINLNSREARYDPSLLDVRLSPNYVVCRDCEVTNDGHTIQVILKSKSVLSGGPLPQGQEFELYEVRFHWGRENQRGSEHTVNFKAFPMELHLIHWNSTLFGSIDEAVGKPHGIAIIALFVQIGKEHVGLKAVTEILQDIQYKGKSKTIPCFNPNTLLPDPLLRDYWVYEGSLTIPPCSEGVTWILFRYPLTISQMQIEEFRRLRTHVKGVELVEGCDGILGDNFRPTQPLSDRVIRAAFQ

SEQ ID NO: 18846 - protein, 305 aa, Mus musculus
MQLLLALLALAYVAPSTEDSGWCYEIQTKDPRSSCLGPEKWPGACKENQQSPINIVTARTKVNPRLTPFILVGYDQKQQWPIKNNQHTVEMTLGGGACIIGGDLPARYEAVQLHLHWSNGNDNGSEHSIDGRHFAMEMHIVHKKLTSSKEDSKDKFAVLAFMIEVGDKVNKGFQPLVEALPSISKPHSTSTVRESSLQDMLPPSTKMYTYFRYNGSLTTPNCDETVIWTVYKQPIKIHKNQFLEFSKNLYYDEDQKLNMKDNVRPLQPLGKRQVFKSHAPGQLLSLPLPTLLVPTLTCLVANFLQ

SEQ ID NO: 18847 - protein, 258 aa, Mus musculus
WCYEIQTEDPRSSCLGPEKWPGACKENQQSPINIVTARTKVNPRLTPFILVGYDQKQQWPIKNNQHTVEMTLGGGACIIGGDLPARYEAVQLHLHWSNGNDNGSEHSIDGRHFAMEMHIVHKKLTSSKEDSKDKFAVLAFMIEVGDKVNKGFQPLVEALPSISKPHSTSTVRESSLQDMLPPSTKMYTYFRYNGSLTTPNCDETVIWTVYKQPIKIHKNQFLEFSKNLYYDEDQKLNMKDNVRPLQPLGKRQVFKSHA

SEQ ID NO: 18848 - protein, 328 aa, Mus musculus
MGGAARLSAPQALVLWAALGAAAHIGPAPDPEDWWSYKENLQGNFVPGPPFWGLVNAAWSLCAVGKRQSPVDVELKRVLYDPFLPPLRLSTGGEKLRGTLYNTGRHVSFLPASRPVVNVSGGPLLYSHRLSELRLLFGARDGAGSEHQINHEGFSAEVQLIHFNQELYGNLSAASRGPNGLAILSLFVNVAGSSNPFLSRLLNRDTITRISYKNDAYFLQDLSLELLFPESFGFITYQGSLSTPPCSETVTWILIDRALNITSLQMHSLRLLSQNPPSQIFQSLSGNGRPLQPLAHRALRGNRDPRHPERRCRGPNYRLHVDGGPHGR

SEQ ID NO: 18849 - protein, 1442 aa, Mus musculus
MRRLLEPCWWILFLKITSSVLHYVVCFPALTEGYVGTLQESRQDSSVQIRRRKASGDPYWAYSGAYGPEHWVTSSVSCGGSHQSPIDILDHHARVGDEYQELQLDGFDNESSNKTWMKNTGKTVAILLKDDYFVSGAGLPGRFKAEKVEFHWGHSNGSAGSEHSVNGRRFPVEMQIFFYNPDDFDSFQTAISENRIIGAMAIFFQVSPRDNSALDPIIHGLKGVVHHEKETFLDPFILRDLLPASLGSYYRYTGSLTTPPCSEIVEWIVFRRPVPISYHQLEAFYSIFTTEQQDHVKSVEYLRNNFRPQQALNDRVVSKSAVRDAWNHDLADFLDNPLGTEASKVCSSPPIHMKVQPLNQTALQVSWSQPETIYHPPIMNYMISYSWTKNEDEKEKTFTKDSDKDLKATISHVSPDSLYLFRVQAVCRNDMRSDFSQTMLFQANTTRIFQGTRIVKTGVPTASPASSADMAPISSGSSTWTSSGIPFSFVSMATGMGPSSSGSQATVASVVTSTLLAGLGFGGGGISSFPSTVWPTRLPTASAASKQAGRTVLATTEALASPGPDVHSAPSKDSEGTEEGEKEEKSESEDGEREHEEEEKDSEKKEKSEATHTAAESDRTAPAPTPSSPHRTAAEGGHQTIPGRRQDHSAPATDQPGHVAPDLDPLVDTATQVPPTATEEHYSGSDPRRPEMPSKKPMSRGDRFSEDSKFITVNPAEKNTSGMLSRPSPGRMEWIIPLIVVSALTFVCLVLLIAVLVYWRGCNKIKSKGFPRRSREVPSSGERGEKGSRKCFQTAHFYVEDSSSPRVVPNESVPIIPIPDDMEAIPVKQFGKHIGELYSNSQHGFSEDFEEVQRCTADMNITAEHSNHPDNKHKNRYINILAYDHSRVKLRPLPGKDSKHSDYINANYVDGYNKAKAYIATQGPLKSTFEDFWRMIWEQNTGIIIMITNLVEKGRRKCDQYWPTENTEEYGNIIVTLKSTKVHACYTVRRLSVRNTKVKKGQKGNPKGRQNERTVIQYHYTQWPDMGVPEYALPVLTFVRRSSAARMPDMGPVLVHCSAGVGRTGTYIVIDSMLQQIKDKSTVNVLGFLKHIRTQRNYLVQTEEQYIFIHDALLEAILGKETAVSSSQLHSYVNSILIPGVGGKTRLEKQFKLITQCNAKYVECFSAQKECNKEKNRNSSVVPAERARVGLAPLPGMKGTDYINASYIMGYYRSNEFIITQHPLPHTTKDFWRMIWDHNAQIIVMLPDNQSLAEDEFVYWPSREESMNCEAFTVTLISKDRLCLSNEEQIIIHDFILEATQDDYVLEVRHFQCPKWPNPDAPISSTFELINVIKEEALTRDGPTIVHDEYGAVSAGMLCALTTLSQQLENENAVDVFQVAKMINLMRPGVFTDIEQYQFVYKAMLSLISTKENGNGPMTGDKNGAVLTAEESDPAESMESLV

SEQ ID NO: 18850 - protein, 239 aa, Mus musculus
MDVFVHVGPDQWSKLYPIANGNNQSPIDIKTSEANHDSSLKPLSISYNPATAKEIVNMGHSFHVIFDDSTNQYVLKGGPLADSYRLTQFHFHWGNSNDHGSEHTVDGTRYSGELHLVHWNSAKYSSASEAISKADGLAILGVLMKVGPANPRLQKVLDALNSVKSKTERACSEWKAHSEAWYIIPHICSHEHTEDTRVYAHVHGEQLQRSLPLNEVPDQENEVKTIHGSVVRDSQRKRW

SEQ ID NO: 18851 - protein, 261 aa, Mus musculus
MFNPSLKPLSLVNYEKENLEFTMTNNGHTVSIDLPPSMYLETSDGTEFISKAFHFHWGGRDWELSGSEHTIDGIRSIMEAHFVHFNKEYGTYENAKDQKNGLAVLAVLFKIDEYAENTYYSDIISALKDIEKPGETTTLKDTTIRDLLPKDVHHYYTYPGSLTTPPCTENVQWFVLRDRVTLSKAQVVTIENSVMDHNNNTIQNGYRSTQPNNHRVVEANFLNVPDMYSSYHLYPKNMQKEILQPKKQKKTKKNRHFGSRK

SEQ ID NO: 18852 - protein, 251 aa, Mus musculus
RTRGEKENLEFTMTNNGHTVSIDLPPSMYLETSDGTEFISKAFHFHWGGRDWELSGSEHTIDGIRSIMEAHFVHFNKEYGTYENAKDQKNGLAVLAVLFKIDEYAENTYYSDIISALKNIEKPGETTTLKDTTIRNLLPKDVHHYYTYPGSLTTPPCTENVQWFVLRDKVTLSKAQVVTIENSVMDHNNNTIQNGYRSTQPNNHRVVEANFLNVPDMYSSYHLYLKNMQKEILQPKKQKKTKKNRHFWSRK

SEQ ID NO: 18853 - protein, 429 aa, Mus musculus
MRILQSFLACVQLLCLCRLDWAYGYYRQQRKLVEEIGWSYTGALNQKNWGKKYPICNSPKQSPINIDEDLTQVNVNLKKLKFQGWEKASLENTFIHNTGKTVEINLTNDYYLSGGLSEKVFKASKITFHWGKCNVSSEGSEHSLEGQKFPLEMQVYCFDADRFSSFEEAVKGKGRLRALSILFEVGVEENLDYKAIIDGTESVSRFGKQAALDPFVLQNLLPNSTDKYYIYNGSLTSPPCTDTVEWIVFKDTVSISESQLAVFCEVLTMQQSGYVMLMDYLQNNFREQQYKFSRQVFSSYTGKEEIHEVVCSSEPENVQADPENYTSLLVTWERPRVVYDAMIEKFAVLYQPLAGNDQAKHEFLTDGYQDLGAILNNLLPNMSYVLQIVAVCSNGLYGKYSDQLIVDMPTEDAELDLFPELIGTEEIIK

SEQ ID NO: 18854 - protein, 306 aa, Mus musculus
MTVPHQFVRGQERKKVYYNTLVKELGTFLGRNAPCPACPRLKAAVLHYVVCFPALTEGYVGTLQESRQDSSVQIRRRKASGDPYWAYSGAYGPEHWVTSSVSCGGSHQSPIDILDHHARVGDEYQELQLYGFDNESSNKTWMKNTGKTVAILLKDDYFVSGAGLPGRFKAEKVEFHWGHSNGSAGSEHSVNGRRFPVEMQIFFYNPDDFDSFQTAISENRIIGAMAIFFQVSPRDNSALDPIIHGLKGVVHHEKETFLDPFILRDLLPASLGSYYRYTGSLTTPPCSEIVEWIVFRRPVPISYHQV

SEQ ID NO: 18855 - protein, 1612 aa, Mus musculus
MRILQSFLACVQLLCLCRLDWAYGYYRQQRKLVEEIGWSYTGALNQKNWGKKYPICNSPKQSPINIDEDLTQVNVNLKKLKFQGWEKASLENTFIHNTGKTVEINLTNDYYLSGGLSEKVFKASKITFHWGKCNVSSEGSEHSLEGQKFPLEMQVYCFDADRFSSFEEAVKGKGRLRRLSILFEVGVEENLDYKAIIDGTESVSRFGKQAALDPFVLQNLLQNSTDKYYIYNGSLTSPPCTDTVEWIVFKDTVSISESQLAVFCEVLTMQQSGYVMLMDYLQNNFREQQYKFSRQVFSSYTGKEEIHEVVCSSEPENVQADPENYTSLLVTWERPRVVYDAMIEKFAVLYQPLAGNDQAKHEFLTDGYQDLGAILNNLLPNMSYVLQIVAVCSNGLYGKYSDQLIVDMPTEDAELDLFPELIGTEEIIKEEEYGKDNEEDTGLNPGRDSVTNQIRKKEPQVSTTTHYNHMGTKYNEAKTNRSPTRGSEFSGKSDVPNTSPNSTSQHVAEFETERGISLPSQTGTNLPPHNVEGTSASLNSGSKTLFIFPQMNLSGTAESLNTVPITEYKEVSADVSEEENFLTDFKLDTGADDSSGSSPSTSTVPFFSDNLSHGYITSSDMPEAITYDVLKPGSTRNAPEDSAPSGSEESLKDPSLEGSVWFPGSTDLTTQSETGSGRESFLQVNSTDIQIDESRETTESFSPDATVSQDPSVTDMGMPHYSTFAYLPTEVTPQAFTPSSRPLDLAPTINILHSQTTQPVYNGETPLQPSYSSEVFPLATPLLLDNQTLNTTPAASSSDSALHATPVSPSVGVSFESILSSYDDAPLLPFSSASFSSEMFRHLHTVSQTLPQVTSAAERDELSLHASLLVARGDLLLEPSLVQYSDVASHQATTRAASDTLGFGSESAVFYKTSMVSQIESPRSDVVMHAYSSGPEPSYTVEGSHHVPTVSYSSAMPLHGSVDVSDQGSLLINPSHISMPESSFITPTASLLQPPPALSGDGEWSGASSDSELLLPDADGLRTLNISSPVSVAEFTYTTSVFADGIKPLSKSEMMYGNETELKMSSFSDMAYPSKSTVVPKMSDVVHKWSESLKETSVSISSMKSVFPESLVYPTTKGFEQGVSHVPEIIFPVQPTHTASQASGDTWLKPGLSANSEAAFSDTASREVVHPSTQPLLYEAATPFNTEALLQPSFQASDVDTLLKTALPSVPSDPILAGTPQVEQSSSSVSHPMASESGSSESMLHFTSVPILDISPSKVHSTPLQGLTVPHSSKKFSEQGLLKSKSPQQVLPSLFSNDEFFQNAHLDVSQAYPPKGRHAFVTPVLSIDEPQNTLINKLVYSEDIFSSTEISITDKVLTGLPTLASDVLSSTDHSVPLGSGPISLTMVSPNRDDSVTTAKLLLPSTATSKLTQSARSDADLVGGGEDGDDYDDDDYDDIDRGRFPVNKCMSCLPYRESREKVMNDSDTQESSLVDQSDPISPLLFENTEEENGGTGVTRVDKSPPPSMLPQNHNDGKEDSDIQMGSAVLPHTPGSKAWAVLTSDEESGSGQGTSDSLNDNETSTDFSFPDVNEKDTDGVLETDDTGIAPGSPRSSTPSVTSGHSGVSNSSEAG

SEQ ID NO: 18856 - protein, 324 aa, Mus musculus
MWALDFLLSFLLIQLAAQVDSSGTWCYDSQDPKCGPAHWKELAPACGGPTQSPINIDLRLVQRDYTLKPFIFQGYDSAPQDPWVLENDGHTVLLRVNSCQQNCPAIRGAGLPSPEYRLLQLHFHWGSPGHQGSEHSLDEKHGSMEMHMVHMNTKYQSMEDARSQPDGFAILAVLLVEEDRDNTNFSAIVSGLKNLSSPGVAVNLTSTFALASLLPSALRLLRYYRYSGSLTTPGCEPAVLWTVFENTVPIGHAQVVQFQAVLQTGPPGLHPRPLTSNFRPQQPLGGRRISASPEASVRSSVSTLPCLHLALVGLGVGLRLWQGP

SEQ ID NO: 18857 - protein, 204 aa, Mus musculus
GPPFWGLVNAAWSLCAVGKRQSPVDVELKRVLYDPFLPPLRLSTGGEKLRGTLYNTGRHVSFLPASRPVVNVSGGPLLYSHRLSELRLLFGARDGAGSEHQINHEGFSAEVQLIHFNQELYGNLSAASRGPNGLAILSLFVNVAGSSNPFLSRLLNRDTITRISYKNDAYFLQDLSLELLFPESFGFITYQGSLSTPPCSETVT

SEQ ID NO: 18858 - protein, 597 aa, Mus musculus
MRILQSFLACVQLLCLCRLDWAYGYYRQQRKLVEEIGWSYTGALNQKNWGKKYPMCNSPKQSPINIDEDLTQVNVNLKKLKFQGWEKASLENTFIHSTGKTVEINLTNDYYLSGGLSEKVFKASKITFHRGKCNVSSEGSEHSLEGQKFPLEMQVYCFDADRFSSFEEAVKGKGRLRALSILFEVGVEENLDYKAIIDGTESVSRFGKQAALDPFVLQNLLQNSTDKYYIYNGSLTSPPCTDTVEWIVFKDTVSISESQLAVFCEVLTMQQSGYVMLMDYLQNNFREQQYKFSRQVFSSYTGKEEIHEVVCSSEPENVQADPENYTSLLVTWERPRVVYDAMIEKFAVLYQPLAGNDQAKHEFLTDGYQDLGAILNNLLPNMSYVLQIVAVCSNGLYGKYSDQLIVDMPTEDAELDLFPELIGTEEIIKEEEYGKDNEEDTGLNPGRDSVTNQIRKKEPQVSTTTHYNHMGTKYNEAKTNRSPTRGSEFSGKSDVPNTSPNSTSQHVAEFETERGISLPSQTGTNLPPHNVEGTSASLNSGSKTLFIFPQMNLSGTAESLNTVPITEYKEVSADVSEEENFLTDFKLDTGADDSSAG

SEQ ID NO: 18859 - protein, 261 aa, Rattus norvegicus
MASADWGYDSKNGPDQWSKLYPIANGNNQSPIDIKTSEAKHDSSLKPVSVSYNPATAKEIVNVGHSFHVVFDDSSNQSVLKGGPLADSYRLTQFHFHWGNSNDHGSEHTVDGAKYSGELHLVHWNSAKYSSAAEAISKADGLAIIGVLMKVGPANPNLQKVLDALSSVKTKGKRAPFTNFDPSSLLPSSLDYWTYFGSLTHPPLHESVTWVICKESISLSPEQLAQLRGLLSSAEGEPAVPVLSNHRPPQPLKGRTVRASF

SEQ ID NO: 18860 - protein, 260 aa, Rattus norvegicus
MAKEWGYASHNGPEHWHELYPIAKGDNQSPIELHTKDIRHDPSLQPWSVSYDPGSAKTILNNGKTCRVVFDDTFDRSMLRGGPLSGPYRLRQFHLHWGSSDDHGSEHTVDGVKYAAELHLVHWNPKYNTFGEALKQPDGIAVVGIFLKIGREKGEFQILLDALDKIKTKGKEAPFNHFDPSCLFPACRDYWTYHGSFTTPPCEECIVWLLLKEPMTVSSDQMAKLRSLFASAENEPPVPLVGNWRPPQPIKGRVVRASFK

SEQ ID NO: 18861 - protein, 260 aa, Rattus norvegicus
  unsure (1)..(260): unsure at all Xaa locations
XAKEWGYASHNGPEHWHELYPIAKGDNQSPIELHTKDIRHDPSLQPWSVSYDPGSAKTILNNGKTCRVVFDDTFDRSMLRGGPLSGPYRLRQFHLHWGSSDDHGSEHTVDGVKYAAELHLVHWNPKYNTFGEALKQPDGIAVVGIFLKIGREKGEFQILLDALDKIKTKGKEAPFNHFDPSCLFPACRDYWTYHGSFTTPPCEECIVWLLLKEPMTVSSDQMAKLRSLFASAENEPPVPLVGNWRPPQPIKGRVVRASFK

SEQ ID NO: 18862 - protein, 281 aa, Rattus norvegicus
MTIGAFSSLTPTCLRAFHRGPWRGWGYDEHYGPIHWNELFPIADGDQQSPIEIKTKEVKYDSSLRPLSIKYDPASAKIISNSGHSFNVDLDDTEDKSVLHGGPLTGSYRLRQFHLHWGSADDHGSEHVVDGVRYAAELHVVRWNSDKYPSFVEAAHESDELAVLGAFLQIGEHNPQLQKITDILDSIKEKGKQTRFTNFDPLCLLPSSWDYWTYPGSLTVPPLLESVTWIVLKQPISISSQQLARFRSLLCTAEGESEAFLLSNHRPPQPLKGRRVRASFY

SEQ ID NO: 18863 - protein, 260 aa, Rattus norvegicus
MAKEWGYGSHNGPEHWHELYPIAKGDNQSPIELHTKDIRHDPSLQPWSVSYDPGSAKTILNNGKTCRVVFDDTFDRSMLRGGPLSGPYRLRQFHLHWGSSDDHGSEHTVDGVKYAAELHLVHWNPKYNTSEEALKQPDGIAVVGIFLKIGREKGEFQILLDALDKIKTKGKEAPFNHFDPSCLFPACRDYWTYHGSFTTPPCEECIVWLLLKEPMTVSSDQMANVRSLFASAENEPPVPLVGNWRPPQPIKGRVVRASFK

SEQ ID NO: 18864 - protein, 260 aa, Rattus norvegicus
MSHHWGYSKSNGPENWHKEFPIANGDRQSPVDIDTGTAQHDPSLQPLLICYDKVASKSIVNNGHSFNVEFDDSQDFAVLKEGPLSGSYRLIQFHFHWGSSDGQGSEHTVNKKKYAAELHLVHWNTKYGDFGKAVQHPDGLAVLGIFLKIGPASQGLQKITEALHSIKTKGKRAAFANFDPCSLLPGNLDYWTYPGSLTTPPLLECVTWIVLKEPITVSSEQMSHFRKLNFNSEGEAEELMVDNWRPAQPLKNRKIKASFK

SEQ ID NO: 18865 - protein, 264 aa, Rattus norvegicus
MTGHHCWGYGQDDGPSNWHKLYPIAQGDRQSPINIISSQAVYSPSLQPLELFYEACMSLSITNNGHSVQVDFNDSDDRTVVAGGPLEGPYRLKQLHFHWGKKRDVGSEHTVDGKSFPSELHLVHWNAKKYSTFGEAAAAPDGLAVVGIFLETGDEHPSMNRLTDALYMVRFKDTKAQFSCFNPKCLLPTSRHYWTYPGSLTTPPLSESVTWIVLREPIRISERQMEKFRSLLFTSEDDERIHMVNNFRPPQPLKGRVVKASFQS

SEQ ID NO: 18866 - protein, 304 aa, Rattus norvegicus
MLRAKMLGRGPYKPLAILRHMGPLCATRPQHWRFQHSYAEKHSNCARHPLWTGPVSSPGGTQQSPINIQWTDSVYDPKLAPLRVSYDAASCRYLWNTGYFFQVEFDDSCEESGISGGPLGNHYRLKQFHFHWGATDEWGSEHMVDGHAYPAELHLVHWNSMKYENYKKATTGENGLAVIGVFLKLGAHHEALQRLVDILPEVRHKDTQVTMGPFDPSCLLPACRDYWTYPGSLTTPPLAESVTWIVHKMPIEVSPSQLSTFRTLLFSGRGEDEEVMVNNFRPLQPLRGRNVRSSFQVPRVGTKS

SEQ ID NO: 18867 - protein, 225 aa, Rattus norvegicus
MGSTSLVLCVPVLRGGPLTGSYRLRQFHLHWGSADDHGSEHVVDGVRYAAELHVVHWNSDKYPSFVEAAHESDGLAVLGVFLQIGEHNPQLQKITDILDSIKEKGKQTRFTNFDPLCLLPSSWDYWTYPGSLTVPPLLESVTWIVLKQPISISSQQLARFRSLLCTAEGESAAFLLSNHRPPQPLKGRRHNTYGVSVKDCYATKHSDCVELETELTTFFFMKHYV

SEQ ID NO: 18868 - protein, 418 aa, Rattus norvegicus
MASLGLSPWVPLLTPAPTVQLLLLLLLLVSAHPQSLSGMQGVPSLGESSSGEDDLGVEDLPSEEDTPGEADPPGGEDPPEVNSKARKEDSLALEDLPTPEAPENRQGSHRDEKGTLLWPQVSPACAGRFQSPVDIRLELTSFCRTLQPLELLGYELQSLPELSLCNNGHTVQLTLPPGLKMVLGPGQEYRALQLHLHWGTSDHPGSEHTVNGHRFPAEIHVVHLSTAFSELHEALGRPGGLAVLAAFLQESPEENSAYEQLLSHLEEIAEEGSKIEIPGLDVSALLPSDLSRYYRYEGSLTTPPCSQGVIWTVFNETVKLSAKQLHTLSVSLWGLRDSRLQLNFRATQPLNGRTIEASFPAVADSSPEPGDILALVFGLLFAATSIAFLLQLRRQHRHRSGTKDGVTYSPAEMTETGA

SEQ ID NO: 18869 - protein, 319 aa, Rattus norvegicus
MGGAARLSAPQALVLWAALGAAAHIGPAPDPEDWWSYKENLQGNFVPGPPFWGLVNAAWSLCAVGKRQSPVDVELKRVLYDPFLPPLRLSTGGEKLRGTLYNTGRHVSFLPASRPVVNVSGGPLLYSHRLSELRLLFGARDGAGSEHQINHQGFSAEVQLIHFNQELYGNLSAASRGPNGLAILSLFVNVAGSSNPFLSRLLNRDTITRISYKNDAYFLQDLSLELLFPESFGFITYQGSLSTPPCSETVTWILIDRALNITSLQVTDLQIFQSLSGNGRPLQPLAHRALRGNRDPRHPERRCRGPNYRLHVDGGPHGR

SEQ ID NO: 18870 - protein, 328 aa, Rattus norvegicus
MGGAARLSAPQALVLWAALGAAAHIGPAPDPEDWWSYKENLQGNFVPGPPFWGLVNAAWSLCAVGKRQSPVDVELKRVLYDPFLPPLRLSTGGEKLRGTLYNTGRHVSFLPASRPVVNVSGGPLLYSHRLSELRLLFGARDGAGSEHQINHQGFSAEVQLIHFNQELYGNLSAASRGPNGLAILSLFVNVAGSSNPFLSRLLNRDTITRISYKNDAYFLQDLSLELLFPESFGFITYQGSLSTPPCSETVTWILIDRALNITSLQMHSLRLLSQNPPSQIFQSLSGNGRPLQPLAHRALRGNRDPRHPERRCRGPNYRLHVDGGPHGR

SEQ ID NO: 18871 - protein, 1426 aa, Rattus norvegicus
MRRLLEPCWWILFLKITSSVLHYVVCFPALTEGYVGTLQESRQGSSVQIRRRKASGDPYWAYSGAYGPEHWVTSSVSCGGSHQSPIDILDHHARVGEEYQELQLDGFDNESSNKTWMKNTGKTVAILLKDDYFVSGAGLPGRFKAEKVEFHWGHSNGSAGSEHSVNGRRFPVEMQIFFYNPDDFDSFQTAISENRIIGAMAIFFQVSPRDNSALDPIIHGLKGVVHHEKETFLDPFVLRDLLPASLGSYYRYTGSLTTPPCSEIVEWIVFRRPVPISYHQLEAFYSIFTTEQQDHVKSVEYLRNNFRPQQALNDRVVSKSAVRDAWNHDLADFLDNPLGTEASKVCSSPPIHMKVQPLNQTALQVSWSQPETIYHPPIMNYMISYSWTKNEDEKEKTFTKDSDKDLKATISHISPDSLYLFRVQAVCRNDMRSDFSQTMLFQANTTRIFQGTRIVKTGVPTASPASSADMAPISSGSSTWTSSGIPFSFVSMATGMGPSSSGSQATVASVVTSTLLAGLGFGGGGISSFPSTVWPTRLPTASAASKQAGRPVLATTEALASPGPDGDSAPTKDGEGAEEGEKEEKSESEDGEREQEEEEKDSEKKEKSEATHTAAESDQTAPAPTPSSPHRTAQEGGHQTIPGHRQDHSAPVTDQPGHVDPGLDTLVDTATQVPPTATEEHYSGSDPKRPEMPSKKPISRGDRFSEDSKFITVNPAEKNTSGMISRPSPGRMEWIIPLIVVSALTFVCLVLLIAVLVYWRGCNKIKSKGFPRRSREVPSSGERGEKGSRKCFQTAHFYVEDSSSPRVVPNESIPIIPIPDDMEAIPVKQFGKSQHGFSGDFEEVQRCTADMNITAEHSNHPDNKHKNRYINILAYDHSRVKLRPLPGKDSKHSDYINANYVDGYNKAKAYIATQGPLKSTFEDFWRMIWEQNTGIIIMITNLVEKGRRKCDQYWPTENTEEYGNIIVTLKSTEVHACYTVRRFSVRNTKVKKGQKGNPKGRQNERTVIQYHYTQWPDMGVPEYALPVLTFVRRSSAARMPDMGPVLVHCSAGVGRTGTYIVIDSMLQQIKDKSTVNVLGFLKHIRTQRNYLVQTEEQYIFIHDALLEAILGKETEVSSSQLHSYVNSILIPGVGGKTRLEKQFKLITQCNAKYVECFSAQKECNKEKNRNSSVVPAERARVGLAPLPGMKGTDYINASYIMGYYRSNEFIITQHPLPHTTKDFWRMIWDHNAQIIVMLPDNQSLAEDEFVYWPSREESMNCEAFTVTLISKDRLCLSNEEQIIIHDFILEATQDDYVLEVRHFQAPISSTFELINVIKEEALARDGPTIVHDEYGAVSAGMLCALTTLSQQLENENAVDVFQVAKMINLMRPGVFTDIEQYQFVYKAMLSLVSTKENGNGPMTGDKNGAVLTAEESDPAESMESLV

SEQ ID NO: 18872 - protein, 1168 aa, Rattus norvegicus
MRRLLEPCWWILFLKITSSVLHYVVCFPALTEGYVGTLQESRQGSSVQIRRRKASGDPYWAYSGAYGPEHWVTSSVSCGGSHQSPIDILDHHARVGEEYQELQLDGFDNESSNKTWMKNTGKTVAILLKDDYFVSGAGLPGRFKAEKVEFHWGHSNGSAGSEHSVNGRRFPVEMQIFFYNPDDFDSFQTAISENRIIGAMAIFFQVSPRDNSALDPIIHGLKGVVHHEKETFLDPFVLRDLLPASLGSYYRYTGSLTTPPCSEIVEWIVFRRPVPISYHQLEAFYSIFTTEQQDHVKSVEYLRNNFRPQQALNDRVVSKSAVRDAWNHDLADFLDNPLGTEASKVCSSPPIHMKVQPLNQTALQVSWSQPETIYHPPIMNYMISYSWTKNEDEKEKTFTKDSDKDLKATISHISPDSLYLFRVQAVCRNDMRSDFSQTMLFQANTTRIFQGTRIVKTGVPTASPASSADMAPISSGSSTWTSSGIPFSFVSMATGMGPSSSGSQATVASVVTSTLLAGLGFGGGGISSFPSTVWPTRLPTASAASKQAGRPVLATTEALASPGPDGDSAPTKDGEGAEEGEKEEKSESEDGEREQEEEEKDSEKKEKSEATHTAAESDQTAPAPTPSSPHRTAQEGGHQTIPGHRQDHSAPVTDQPGHVDPGLDTLVDTATQVPPTATEEHYSGSDPKRPEMPSKKPISRGDRFSEDSKFITVNPAEKNTSGMISRPSPGRMEWIIPLIVVSALTFVCLVLLIAVLVYWRGCNKIKSKGFPRRSREVPSSGERGEKGSRKCFQTAHFYVEDSSSPRVVPNESIPIIPIPDDMEAIPVKQFGKSQHGFSGDFEEVQRCTADMNITAEHSNHPDNKHKNRYINILAYDHSRVKLRPLPGKDSKHSDYINANYVDGYNKAKAYIATQGPLKSTFEDFWRMIWEQNTGIIIMITNLVEKGRRKCDQYWPTENTEEYGNIIVTLKSTEVHACYTVRRFSVRNTKVKKGQKGNPKGRQNERTVIQYHYTQWPDMGVPEYALPVLTFVRRSSAARMPDMGPVLVHCSAGVGRTGTYIVIDSMLQQIKDKSTVNVLGFLKHIRTQRNYLVQTEEQYIFIHDALLEAILGKETEVSSSQLHSYVNSILIPGVGGKTRLEKQFKLITQCNAKYVECFSALRGQQVEGS

SEQ ID NO: 18873 - protein, 717 aa, Rattus norvegicus
MRRLLEPCWWILFLKITSSVLHYVVCFPALTEGYVGTLQESRQGSSVQIRRRKASGDPYWAYSGAYGPEHWVTSSVSCGGSHQSPIDILDHHARVGEEYQELQLDGFDNESSNKTWMKNTGKTVAILLKDDYFVSGAGLPGRFKAEKVEFHWGHSNGSAGSEHSVNGRRFPVEMQIFFYNPDDFDSFQTAISENRIIGAMAIFFQVSPRDNSALDPIIHGLKGVVHHEKETFLDPFVLRDLLPASLGSYYRYTGSLTTPPCSEIVEWIVFRRPVPISYHQLEAFYSIFTTEQQDHVKSVEYLRNNFRPQQALNDRVVSKSAVRDAWNHDLADFLDNPLGTEASKVCSSPPIHMKVQPLNQTALQVSWSQPETIYHPPIMNYMISYSWTKNEDEKEKTFTKDSDKDLKATISHISPDSLYLFRVQAVCRNDMRSDFSQTMLFQANTTRIFQGTRIVKTGVPTASPASSADMAPISSGSSTWTSSGIPFSFVSMATGMGPSSSGSQATVASVVTSTLLAGLGFGGGGISSFPSTVWPTRLPTASAASKQAGRPVLATTEALASPGPDGDSAPTKDGEGAEEGEKEEKSESEDGEREQEEEEKDSEKKEKSEATHTAAESDQTAPAPTPSSPHRTAQEGGHQTIPGHRQDHSAPVTDQPGHVDPGLDTLVDTATQVPPTATEEHYSGSDPKRPEMPSKKPISRGDRFSEDSKFITVNPGK

SEQ ID NO: 18874 - protein, 1397 aa, Rattus norvegicus
MRRLLEPCWWILFLKITSSVLHYVVCFPALTEGYVGTLQESRQGSSVQIRRRKASGDPYWAYSGAYGPEHWVTSSVSCGGSHQSPIDILDHHARVGEEYQELQLDGFDNESSNKTWMKNTGKTVAILLKDDYFVSGAGLPGRFKAEKVEFHWGHSNGSAGSEHSVNGRRFPVEMQIFFYNPDDFDSFQTAISENRIIGAMAIFFQVSPRDNSALDPIIHGLKGVVHHEKETFLDPFVLRDLLPASLGSYYRYTGSLTTPPCSEIVEWIVFRRPVPISYHQLEAFYSIFTTEQQDHVKSVEYLRNNFRPQQALNDRVVSKSAVRDAWNHDLADFLDNPLGTEASKVCSSPPIHMKVQPLNQTALQVSWSQPETIYHPPIMNYMISYSWTKNEDEKEKTFTKDSDKDLKATISHISPDSLYLFRVQAVCRNDMRSDFSQTMLFQANTTRIFQGTRIVKTGVPTASPASSADMAPISSGSSTWTSSGIPFSFVSMATGMGPSSSGSQATVASVVTSTLLAGLGFGGGGISSFPSTVWPTRLPTASAASKQAGRPVLATTEALASPGPDGDSAPTKDGEGAEEGEKEEKSESEDGEREQEEEEKDSEKKEKSEATHTAAESDQTAPAPTPSSPHRTAQEGGHQTIPGHRQDHSAPVTDQPGHVDPGLDTLVDTATQVPPTATEEHYSGSDPKRPEMPSKKPISRGDRFSEDSKFITVNPAEKNTSGMISRPSPGRMEWIIPLIVVSALTFVCLVLLIAVLVYWRKCFQTAHFYVEDSSSPRVVPNESIPIIPIPDDMEAIPVKQFGKSQHGFSGDFEEVQRCTADMNITAEHSNHPDNKHKNRYINILAYDHSRVKLRPLPGKDSKHSDYINANYVDGYNKAKAYIATQGPLKSTFEDFWRMIWEQNTGIIIMITNLVEKGRRKCDQYWPTENTEEYGNIIVTLKSTEVHACYTVRRFSVRNTKVKKGQKGNPKGRQNERTVIQYHYTQWPDMGVPEYALPVLTFVRRSSAARMPDMGPVLVHCSAGVGRTGTYIVIDSMLQQIKDKSTVNVLGFLKHIRTQRNYLVQTEEQYIFIHDALLEAILGKETEVSSSQLHSYVNSILIPGVGGKTRLEKQFKLITQCNAKYVECFSAQKECNKEKNRNSSVVPAERARVGLAPLPGMKGTDYINASYIMGYYRSNEFIITQHPLPHTTKDFWRMIWDHNAQIIVMLPDNQSLAEDEFVYWPSREESMNCEAFTVTLISKDRLCLSNEEQIIIHDFILEATQDDYVLEVRHFQAPISSTFELINVIKEEALARDGPTIVHDEYGAVSAGMLCALTTLSQQLENENAVDVFQVAKMINLMRPGVFTDIEQYQFVYKAMLSLVSTKENGNGPMTGDKNGAVLTAEESDPAESMESLV

SEQ ID NO: 18875 - protein, 309 aa, Rattus norvegicus
MQLLLALLALAYVAPSTEDSHWCYEIQAKEPNSHCSGPEQWTGDCKKNQQSPINIVTSKTKLNPSLTPFTFVGYDQKKKWEVKNNQHSVEMSLGEDIYIFGGDLPTQYKAIQLHLHWSEESNKGSEHSIDGKHFAMEMHVVHKKMTTGDKVQDSDSKDKIAVLAFMVEVGNEVNEGFQPLVEALSRLSKPFTNSTVSESCLQDMLPEKKKLSAYFRYQGSLTTPGCDETVIWTVFEEPIKIHKDQFLEFSKKLYYDQEQKLNMKDNVRPLQPLGNRQVFRSHASGRLLSLPLPTLLVPTLTCLVASFLH

SEQ ID NO: 18876 - protein, 323 aa, Rattus norvegicus
MWALGFRLCFLLMLAAQVDSNGTWCYDSQDPKCGPAHWKELAPACGGPTQSPVNIDLRLVQRDYALKPFIFHGYDSAPQDPWILENDGHTVLLRVHSCQQNCPAIRGAGLPSSEYRLLQLHFHWGSPGHKGSEHSVDEKHGSMEMHMVHMNTKYQSMGHARSQPDGLAILAVLLVEEDKDNTNFSAIVSGLKNVSSPGVSVNLTSTFALASLLPSALGLLRYYRYSGSLTTPGCEPAVLWTVFENTVPIGHAQVVQFQAVPQTGPPGLHPRPLTDNFRPQQPLGGRRISASPGASIRSSVPIRPCLHLALLGLGVGLRLWQGP

SEQ ID NO: 18877 - protein, 1616 aa, Rattus norvegicus
MRILQSFLACVQLLCVCRLDWAYGYYRQQRKLVEEIGWSYTGALNQKNWGKKYPICNSPKQSPINIDEDLTQVNVNLKKLKFQGWEKPSLENTFIHNTGKTVEINLTNDYYLSGGLSEKVFKASKMTFHWGKCNVSSEGSEHSLEGQKFPLEMQIYCFDADRFSSFEETVKGKGRLRALSILFEIGVEENLDYKAIIDGTESVSRFGKQAALDPFILQNLLPNSTDKYYIYNGSLTSPPCTDTVEWIVFKDTVSISESQLAVFCEVLTMQQSGYVMLMDYLQNNFREQQYKFSRQVFSSYTGKEEIHEAVCSSEPENVQADPENYTSLLITWERPRVVYDTMIEKFAVLYQPLEGNDQTKHEFLTDGYQDLGAILNNLIPNMSYVLQIVAICSNGLYGKYSDQLIVDMPTEDAELDLFPELIGTEEIIKEENYGKGNEEDTGLNPGRDSATNQIRKKEPQVSTTTHYNHMGTKYNEAKTNRSPTRGSEFSGKSDVLNTSLNPTSQQVAEFNPEREMSLPSQIGTNLPPHSVEGTSASLNSGSKTLLVFPQMNLSGTAESLNMVSITEYKEVSADLSEEENLLTDFKLDSGADDSSGSSPASSTVPFSTDNLSHGYTSSSDTPEAVTYDVLRPESTRNALEDSAPSGSEESLKDPSLEGSVWFPGSTDLTTQSETGSGREGFLQVNSTDFQVDESRETTETFSPDATASRGPSVTDMEMPHYSTFAYPPTEVTSHAFTPSSRPLDLAPTSNILHSQTTQPVYNGETPLQPSYSSEVFPLVTPLLLDNQTLNTTPAASSSDSALHATPVFPSVGVSFDSILSSYDDAPLLPFSSASFSSDLFHHLHTVSQTLPQVTSAAERDELSLHASLLVAGGDLLLEPSLVQYSDVMSHQVTIHAASDTLEFGSESAVLYKTSMVSQIESPSSDVVMHAYSSGPETSYAIEGSHHVLTVSSSSAIPVHDSVGVADQGSLLINPSHISLPESSFITPTASLLQLPPALSGDGEWSGASSDSELLLPDTDGLRTLNMSSPVSVADFTYTTSVSGDDIKPLSKGEMMYGNETELKMSSFSDMAYPSKSTVVPKMSDIVNKWSESLKETSVSVSSINSVFTESLVYPITKVFDQEISRVPEIIFPVKPTHTASQASGDTWLKPGLSTNSEPALSDTASSEVSHPSTQPLLYEAASPFNTEALLQPSFPASDVDTLLKTALPSGPRDPVLTETPMVEQSSSSVSLPLASESASSKSTLHFTSVPVLNMSPSDVHPTSLQRLTVPHSREEYFEQGLLKSKSPQQVLPSLHSHDEFFQTAHLDISQAYPPKGRHAFATPILSINEPQNTLINRLVYSEDIFMHPEISITDKALTGLPTTVSDVLIATDHSVPLGSGPISMTTVSPNRDDSVTTTKLLLPSKATSKPTHSARSDADLVGGGEDGDDYDDDDYDDIDSDRFPVNKCMSCSPYRESQEKVMNDSDTQESSLVDQSDPISHLLSENTEEENGGTGVTRVDKSPDKSPPPSMLPQKHNDGREDRDIQMGSAVLPHTPGSKAWAVLTSDEESGSGQGTSDSLNDNETSTDFSFPDVNEKDADGVLEADDTGIAPGSPRSSTPSVTSGHSGVSNSSEAG

SEQ ID NO: 18878 - protein, 2316 aa, Rattus norvegicus
MRILQSFLACVQLLCVCRLDWAYGYYRQQRKLVEEIGWSYTGALNQKNWGKKYPICNSPKQSPINIDEDLTQVNVNLKKLKFQGWEKPSLENTFIHNTGKTVEINLTNDYYLSGGLSEKVFKASKMTFHWGKCNVSSEGSEHSLEGQKFPLEMQIYCFDADRFSSFEETVKGKGRLRALSILFEIGVEENLDYKAIIDGTESVSRFGKQAALDPFILQNLLPNSTDKYYIYNGSLTSPPCTDTVEWIVFKDTVSISESQLAVFCEVLTMQQSGYVMLMDYLQNNFREQQYKFSRQVFSSYTGKEEIHEAVCSSEPENVQADPENYTSLLITWERPRVVYDTMIEKFAVLYQPLEGNDQTKHEFLTDGYQDLGAILNNLIPNMSYVLQIVAICSNGLYGKYSDQLIVDMPTEDAELDLFPELIGTEEIIKEENYGKGNEEDTGLNPGRDSATNQIRKKEPQVSTTTHYNHMGTKYNEAKTNRSPTRGSEFSGKSDVLNTSLNPTSQQVAEFNPEREMSLPSQIGTNLPPHSVEGTSASLNSGSKTLLVFPQMNLSGTAESLNMVSITEYKEVSADLSEEENLLTDFKLDSGADDSSGSSPASSTVPFSTDNLSHGYTSSSDTPEAVTYDVLRPESTRNALEDSAPSGSEESLKDPSLEGSVWFPGSTDLTTQSETGSGREGFLQVNSTDFQVDESRETTETFSPDATASRGPSVTDMEMPHYSTFAYPPTEVTSHAFTPSSRPLDLAPTSNILHSQTTQPVYNGETPLQPSYSSEVFPLVTPLLLDNQTLNTTPAASSSDSALHATPVFPSVGVSFDSILSSYDDAPLLPFSSASFSSDLFHHLHTVSQTLPQVTSAAERDELSLHASLLVAGGDLLLEPSLVQYSDVMSHQVTIHAASDTLEFGSESAVLYKTSMVSQIESPSSDVVMHAYSSGPETSYAIEGSHHVLTVSSSSAIPVHDSVGVADQGSLLINPSHISLPESSFITPTASLLQLPPALSGDGEWSGASSDSELLLPDTDGLRTLNMSSPVSVADFTYTTSVSGDDIKPLSKGEMMYGNETELKMSSFSDMAYPSKSTVVPKMSDIVNKWSESLKETSVSVSSINSVFTESLVYPITKVFDQEISRVPEIIFPVKPTHTASQASGDTWLKPGLSTNSEPALSDTASSEVSHPSTQPLLYEAASPFNTEALLQPSFPASDVDTLLKTALPSGPRDPVLTETPMVEQSSSSVSLPLASESASSKSTLHFTSVPVLNMSPSDVHPTSLQRLTVPHSREEYFEQGLLKSKSPQQVLPSLHSHDEFFQTAHLDISQAYPPKGRHAFATPILSINEPQNTLINRLVYSEDIFMHPEISITDKALTGLPTTVSDVLIATDHSVPLGSGPISMTTVSPNRDDSVTTTKLLLPSKATSKPTHSARSDADLVGGGEDGDDYDDDDYDDIDSDRFPVNKCMSCSPYRESQEKVMNDSDTQESSLVDQSDPISHLLSENTEEENGGTGVTRVDKSPDKSPPPSMLPQKHNDGREDRDIQMGSAVLPHTPGSKAWAVLTSDEESGSGQGTSDSLNDNETSTDFSFPDVNEKDADGVLEADDTGIAPGSPRSSTPSVTSGHSGVSNSSEAEASNSSHESRIGLAEGLESEKKAVIPLVIVSALTFICLVVLVGILIYWRKCFQTAHFYLEDNTSPRVISTPPTPIFPISDDIGAIPIKHFPKHVADLHASNGFTEEFETLKEFYQEVQSCTVDLGITADSSNHPDNKHKNRYVNIVAYDHSRVKLTQLAEKDGKLTDYINANYVDGYNRPKAYIAAQGPLKSTAEDFWRMIWEHNVEVIVMITNLVEKGRRKCDQYWPTDGSEEYGSFLVNQKNVQVLAYYTVRNFTLRNTKIKKGSQKGRSSGRLVTQYHYTQWPDMGVPEYSLPVLAFVRKTAQAKRHAVGPVVVHCSAGVGRTGTYIVLDSMLQQIQHEGTVNIFGFLKHIRSQRNYLVQTEEQYVFIHDTLVEAILSKETEVPDSHIHSYVNTLLIPGPSGKTKLEKQFQLLSQSNILQSDYSTALKQCNREKNRTSSIIPVERSRVGISSLSGEGTDYINASYIMGYYQSNEFIITQHPLLHTIKDFWRMIWDHNAQLVVMIPDGQNMAEDEFVYWPNKDEPINCESFKVTLMSEEHKCLSNEEKLIVQDFILEATQDDYVLEVRHFQCPKWPNPDSPISKTFELISIIKEEAANRDGPMIVHDEHGGVTAGTFCALTTLMHQLEKENSMDVYQVAKMINLMRPGVFTDIEQYQFLYKVVLSLVSTRQEENPSTSLDSNGAALPDGNIAESLESLV

SEQ ID NO: 18879 - protein, 285 aa, Rabbit fibroma virus
MSSRQESPIDLKIYNTTVEKYPPLDINYGDNSTRIHNNGSTLKVLFNVSVPSTLQGGPLKSKYVLSELSFRWGRSEHSVNGAYYIGEVQMVHWNLKYTNYDNARKYKDGVVILAVFLKTGRLNDKIELITSQVSNIVQKNASHVFTGFNPISLLPKCLDYWTYAGTTTASPIDKNVTWIVFKEPIPISAGQLGRLRTMISSDPGKPVTYIYNNFRETQPVKEYNVKASFSNAEGCYDRHVYKNPFVELYALVIATVCILIVLSVISVVLYNRRTHSLSRRVYYGR

SEQ ID NO: 18880 - protein, 286 aa, Myxoma virus
MSSRQESPIDLKIYSTPVEEYPPLDVNYGDNSTYIYNNGSTLKVLFNVAIPSTLQGGPLKSKYVLSELSFRWGRSEHSVNGAYYVGEVQMVHWNLKYANYDDARKYKDGVVILAVFLKAGGLNDKIELITSQVHNIVQKNASKGFTGFNPVSLLPKCLDYWTYTGTTTVAPIDKNVTWIVFKDPIPISAGQLGRLRTMTSSDPGKPVTYIYNNFKETQPVKEYNVKASFSNAEGCYDKHVYKNPFIELYVIIAVVVCVTIILSVMASILYNRRRFVALARRIYYGS

SEQ ID NO: 18881 - protein, 292 aa, Rhodopseudomonas palustris
MDRPNRLGQSVTVKRRSFVPLPFAPASGNASSRASTPETSMDRRNILKAFAGLALCPLCATAGAAAEGAHHWGYEGEGGPAKWGEIDPANQICSIGVQQSPVDIRSTVSANLFPLQVQWADTADTIINNGHTIQLNVAEGSTLKLGGATFKLVQFHFHRPSEHQIDGKSFPMEVHFVHRMDSGTLGVVGVLMQEGAANAAFAKIVATMPQSEGPAVKADAGINPNALLPAKLGYYRYEGSLTTPPCSEVVDWMVLTDPITVAAEDVAAFAKLYPMNARPVQKDNRRFVLQSN

SEQ ID NO: 18882 - protein, 255 aa, Rhodopseudomonas palustris
MDRRNILKAFAGLALCPLCATAGAAAEGAYHWGYEGEGGPAKWGELDPANQICSIGVQQSPVDIRSTVSANLFPLQVQWADTADTIINNGHTIQLNVAEGSTLKLGGATFKLVQFHFHRPSEHQIDGKSFPMEVHFVHRMDSGTLGVVGVVGVLMQEGAANAAFAKIVATMPQSEGPAVKADAAINPNALLPAKLGYYRYEGSLTTPPCSEVVDWMVLTDPITVAAEDVAAFAKLYPMNARPVQKDNRRFVLQSN

SEQ ID NO: 18883 - protein, 259 aa, Rhodospirillum rubrum
MVMQRAFSHAAMAVAFGLVGFSGAPAVAAETAHPPHWAYEGKGGPVDWGALSEDYHACAAGKEQSPVDIRDAIPAKLPAIAPAYQAQSAVVVNNGHTLQVNVSPGSSLDFRGQRYELLQYHFHHPSEHLVNGKAAPLELHLVHKGPTALTVIGVMLVPGAANPAIEAIWKVAPAKEGGEATLGDPGPDLGKLLPESKSYTFYEGSLTTPPCSEVVNWINLKTPVTVSEDQIARFAALFPMNARPPQALHRRIILESQDQ

SEQ ID NO: 18884 - protein, 237 aa, Synechococcus sp. PCC 7942
MRRRSLLAALGGSCIGWLGSSQPVWASADWDYSRRRGPRQWAKLDPAYAICQQGRQQSPINLTGQPDRTPLDYRDRPFKGILQQAPHSLRIDCPAGNGFWEAGTFYELLQFHFHTPSEHQHQGQRFPAEIHFVHRSDRDQLAVVGVFLAAGDRPLPILDNLLAVPPSTDNQLLSTAIQPTDLMPRDRTVWRYSGSLTTPPCSEPVLWRVCDRPLFVARQQLRQLRQRLGMNARPLQA

SEQ ID NO: 18885 - protein, 230 aa, Enterococcus faecium
MDVEWGYSGDKGPENWASLCDWFARGAEFPLQSPIHLTKGEETKIEGDTLSFHYQKQRFTDKEFKNTIHLVPFDQLSYVEFKKERYYLTDIHFHLPSEHIINGKQEDIEFHFVHMNSKKENLVVGVMYQLMVQEGWLYNQENGESWNLEKHEHWVNPDVFFPEQKSHFHYIGSLTTPPTSGPIQWFVMDHVGKLNQEFLLPFDGQYARPNNRPIQPLNGREIYYFEEFEQ

SEQ ID NO: 18886 - protein, 262 aa, Monodelphis domestica
MANLNWSYEGENGPEHWSKLYPIANGDNQSPIDIKTKEVKHDASLKPISVSYNPATAKEIVNVSHNFQVNFEDKDNQSVLKGGPFTGSFRLRQFHFHWGTADDHGSEHTVDGVKYSSELHIVHWNSEKYSSFSEAAEKPDGLAIIAVFIKAGQANPGLQKVIDALSSIKTKGKKAPFANFDPSLLIPQSSDYWSYHGSLTHPPLHESVTWIIYREPISASSEQLAKFRSLLSTAEGEKASSILHNHRLPQPLKGRQVKASFK

SEQ ID NO: 18887 - protein, 260 aa, Tribolodon hakonensis
MSHGWGYADHNGPQKWCENFPIANGPRQSPIDIQTKGASYDDTLKPLKLKYDPTTSLDILNNGHSFQVTFADDNDSSMLTEGPISGKYRLKQFHFHWGASDGKGSEHTVDGKCYPAELHLVHWNTKYASFGEAANKPDGLAVVGVFLQIGEDNPKLQKILDAMDAIKSKGKQTSFTNFDPTCLLPKSLEYWTYPGSLTTPPLYESVTWIVCKQPISVSSEQMKKFRSLLFTAEEEKACCMVNNYRPPQPLKDRKVCASFK

SEQ ID NO: 18888 - protein, 274 aa, Nicotiana langsdorffii x Nicotiana sanderae
MRMAAITKMLFISFLFLSSVFLARSGEVDDESEFSYDEKSENGPANWGNIRPDWKECSGKLQSPIDIFDLRAEVVSNLRILQKDYKPSNATLLNRGHDIMLRLDDGGYLKINETQYQLKQLHWHTPSEHTINGERFNLEAHLVHESNNGKFVVIGIVYEIGLWPDPFLSMIENDLKVPANKKGIERGIGIIDPNQIKLDGKKYFRYIGSLTTPPCTEGVVWIIDRKVKTVTRRQIKLLQEAVHDGFETNARPTQPENERYINSTYHSFGIEKQQ

SEQ ID NO: 18889 - protein, 233 aa, Listeria innocua
MTKEKVLWGYDEKTGPEMWGHICSDFEIAHTGKAQSPVNIEQADVVKLKPSTMKFYYKETDYTIKRIEQSVHVFPHDKEQGLRFNGEYYPLVSFHAHIPAEHLLDGYVYPIEWHFVHEKPDGTTLVMSAWMEIDNTNNVEFKDLPTYFPEVFADFETEREITLDVNEFMPEERVFYTYQGSRTTPPTVEGVTWIVLKNAKTLGQEDFTEFEKAIGNTSRPVQDLNGREITFYN

SEQ ID NO: 18890 - protein, 233 aa, Listeria monocytogenes EGD-e
MTKEKVLWGYDEKTGPEMWGHICSDFEIAHTGKAQSPVDIEQADVVKLKPSTMKFYYKETDYTIRRIEQSVHVFPHDKEQGLRFNGEYYPLVSFHAHIPAEHLLDGYIYPIEWHFVHEKPDGTTLVMSAWMDIDNTNNIEFKNLPTYFPEVFADFETEREITLDVNEFMPEERVFYTYQGSRTTPPTVEGVTWIVLKNAKTLGQEDFTEFEKAIGNTSRPVQDLNGREITFYN

SEQ ID NO: 18891 - protein, 241 aa, Anopheles gambiae str. PEST
MRKSLLATALLLCPAAFAATPHWEYSGEAGPAQWARLTPEFGQCAGSNQSPVNLDGLVDAELAPLQFHYLAGGRSVTNNGHTVQVDYAPGSRLELDGMRFELKQFHFHAPSENLIKGHSYPLEGHLVHINAKGELAVVAVMFEPGQANAALSQAWQVLPAKAGESHAFKEPISAEQLLPAKRDYYRFSGSLTTPPCSEGVRWLVMKQPVQVSQAQIDAFKAVMHHPNNRPVQPLHGRLVLQ

SEQ ID NO: 18892 - protein, 288 aa, Anopheles gambiae str. PEST
LEESETDQNHVKMSVTWGYTQMNGPQKWPEMFPQARGQRQSPVDIVTSKTQNSGDLQENPLRWTYVPENTRSLVNPGYCWRVDVNGKGSMLTGGPLQKEQFILEQFHCHWGCSDSRGSEHTVDGESFAGELHLVHWNQSKYKSFAEAAGHPDGLAVLGVFLKVGKPHPELDIIARLLPFITHKGDRVTLNKPLDPARLLPEGKAYWTYLGSLTTPPCSESVTWILFKEPIEVSHEQLELFREMRCYDAAEECPCDETLNKQFDYGKVINNFRPPLELGNRQLREVDSY

SEQ ID NO: 18893 - protein, 330 aa, Anopheles gambiae str. PEST
TSPSDFAYSVKVLCSVQTKLTMKSFTLLICYGLFVLHAARGDEWNYPTPGTNGVMSEPERWGGQCDNGRRQSPIDLTIAAAVRGQFAPLFFSNYMLPLKQPRVTNTGHSIQINNRDSAITMQGGGLGGRFVLDQMHFHWGSEHTLDDTRYGLELHLVHHDTRYASLEDAVQARNGVAVLGVLFHVGSQPNMHIDTILDTATEIQNEVGKEALLRGKLSPYNLLPSNRTSFYRYEGSLTTPACAESVIWTVFTESISVSLEQVERFKAIHDQTGRELVNNFRSVQPLNTRALVYATEWDQQGNNFATKMTSNVVFLGAIVLLVITSRLSYH

SEQ ID NO: 18894 - protein, 352 aa, Anopheles gambiae str. PEST
SHQFWYYQSIMATHRILDTMAIKVGPSHWGEQYNSCTGKHQSPININSLDVKKVNLPPLVFQGFDVSPRETNLTNNGHTVVVTMESEVTPTVSGGPLTGVYEYSQLHFHWGDNDTFGSEDMIDNHRFPMELHVVFFKQEYKNARTALNHPDGLTVLAFFFEIAPDDNPMYQEFIELLGNVTGSHLSARFDTPPSLKDLIADDLLHYYTYDGSLTTPPCSEVVTWIDFKEPILLSHAQVQAFRALENEEGHPLTHNFRPVQPLGDRVVLYNTDEIIKQVDLDGEQPEEPSEAGVDTNQLDTGRSDEAPKAPSDPNGRKHPRNAGTPSIATRWSSVLVVALPLLWAAFLRSERY

SEQ ID NO: 18895 - protein, 296 aa, Anopheles gambiae str. PEST
IEASWEEWWTYDGISGPAFWGLINPQWNMCNKGRRQSPINVEPEKLLFDPYLRSLHIDKHKISGTLHNTGQSLVFRVEKDTKQHVNISSGPLAYRYQFEEIYFHYGTDNNQGSEHHIHGYSFPGEIQLYGFNKELYHNMSEAQHKAQGIVGISLMLQIGDTPNPELRIITSAFNKVLYKGSSTPIRHISLRSLLPNTEQYMTYEGSTTHPGCWESTVWIILNKPIYITKQELYALRKLMQGSEQTPKAPLGNNARPLQALHHRTVRTNIDFANTGVSKTQSCPTMYKDMYYKANRW

SEQ ID NO: 18896 - protein, 323 aa, Anopheles gambiae str. PEST
TLQTFHTASKQSEVKQKNIQTIPYRVSVPVSSTMGVRPRQCLVYGGLLLIAVVATLVHGDFSYEDPDRWADTDPDCGGMRQSPIDIVRSAATLPSLDHAAPLLLEGGARKPVSIVVTNNGHTAQYTFHWSKESERPTLIGGPLPFGAPYVLEQLHFHWGADNGRGSEHTFDGVAWAAEAHFVFYKQEYGSFDQAVTQPDGLAVVGALYEVGGDKVKPGAKWAVPLPKIRPAGSTTTLEGGAVFNLDSVAPGGSWLRYYSYAGSLTTPPCAESVTWIVRDGTSPIAQKDLDELRNLRDSADQPLVDNFRPVQPLNGRPVVRYGF

SEQ ID NO: 18897 - protein, 383 aa, Anopheles gambiae str. PEST
NNSKKTEMQLLKWHGQLILLNFLMFMSWRPCRGLNVPSYDSNYRANPTRRSAVFAQPSSYYDQYAAAGPKPLTADQRRAKLTALSNPDFYFPDDPEADLAEANEPEPALERQRARPAPAAGSFSYNEKDKNGPSHWYRVDARCGGRYQSPILLNTSSALLVNRKRPLRLDGQTNLPQTILLQNDGHSAKFTYNWRTGADRPVLRGGPLKTKYLFDQFHFHWGVNSTVGSEHVYDYQRYPMEIHLVFYNGLYESFAAAREQVDGIAVVGLFYEIYDHAVDEQLNTWTRFLRNVVEPNSQHTIEFIDTFPLYEVIGDVEWPYFSYEGSLTTPPCLETVTWIVATKPLLVTEKEMKQFRRLQSPTGLMVNNYRPVQKLNHRRVFLY

SEQ ID NO: 18898 - protein, 328 aa, Anopheles gambiae str. PEST
NITIAKKVFIMQLSIGSRCCRSVSSLLFALLLIGGRYDGADGHRFGYSKPDQRRWSKAHQSCAGAHQSPIAIHSHRAVPLYMPAIELVGYNNLLPGPMTIHNNGHSVSLSIPKTDPTSGKHPYIFGGKLENEYELEGLHFHWGDKNNRGAEHVLNDIRYPLEMHIIHRNKKYKSVGEALGYSDGLTVLGFFYQVTEQDAPSINTLVRSFGQIVDYDQTLQLNHTFTLQSLIDGIDLTRFYTYKGSLTTPPCSEAVTWVVFPDLLELSVNQMKRFRTLDTGIHGSPMVDNYRALQPIGNRRVFVRKVNSRYTGLDVFEGRHHSKWDWVY

SEQ ID NO: 18899 - protein, 292 aa, Anopheles gambiae str. PEST
FDTLTGPAFWGLINPEWSLCNKGRRQSPVNLEPQRLLFDPNLRILHIDKHRISGTITNTGHSVIFTADNETSSAYGTPQIPVNLTGGPLSYRYRFHEIHVHYGLHDQFGSEHSVEGYTFPAEARHIQIFGYNSQLYANFSDALYRAQGIVGVAILLQLGDLSNPELRMLTDQLERIRYGGDEAPVRRISVRDLLPDTEHYMTYEGSTTAPACYETVTWIVMNKPIYITKQQLHALRRLMQGGPDHPKAPLGNNFRPPQPLLHRPVRTNIDFRNKLEKGGKICATMYKDVHYK

SEQ ID NO: 18900 - protein, 248 aa, Anopheles gambiae str. PEST
QSPIALNQRSTVIRDGIQPLDYFGHWDGLGKAKMVNTGSSAMITFSDRPFRPFIVGGVLGNKYIFEQLHFHWGIGDGSGCEHTLEGSTYSMEAHAVHYNAKYGSFAEAVDKPDGLAVLGFFVQAYGNDDCPAFDKIVAGLQYIRSPDAQTEIDADCLAWMGMQELNRHYYTYKGSLTTPPYFESVTWLVYKTPIYVSSRQLEAFRQLQACPKDSSKKIVNNFRSVQVPQQVPEVVFVRNNHPVVFSKL

SEQ ID NO: 18901 - protein, 249 aa, Anopheles gambiae str. PEST
VQSPIALNQRSTVIRDGIQPLDYFGHWDGLGKAKMVNTGSSAMITFSDRPFRPFIVGGVLGNKYIFEQLHFHWGIGDGSGCEHTLEGSTYSMEAHAVHYNAKYGSFAEAVDKPDGLAVLGFFVQAYGNDDCPAFDKIVAGLQYIRSPDAQTEIDADCLAWMGMQELNRHYYTYKGSLTTPPYFESVTWLVYKTPIYVSSKQLEAFRQLQACPKDSSKKIVNNFRSVQVPQQVPEVVFVRNNHPVVLSKL

SEQ ID NO: 18902 - protein, 269 aa, Anopheles gambiae str. PEST
MQRTASKGTVQSPVCLVQGRARIVDDAAPLHYVGHWDGLGRATLSNNGQSAVLTLSERPFRPFLVGGPLGSAYLFEQLHFHWGPDDAVGSEHLLDGRAHSMEAHLVHYNARYGSFGAALAHPDGLAVVALWLDGGGSAVWRPLQPIVRALRHIRRPGTRTTALPADCLRWLAAGLELGRHYYTYDGSMTTAPYRECVRWLIYRTPVYVSPRQTAAFRRLLGRCPARPGGDRFAPITSNFRPVQRSAAGGDPLGLVFVRDSVGAARRAKL

SEQ ID NO: 18903 - protein, 264 aa, Magnetospirillum magnetotacticum
MCLMGGAVMDRRSFLKGASGAACLCGACGGSIAEAVASEGAHWAYEGHGGPKEWGMLSPEYAACSMGREQSPVDLSKPIAAIIGDPLTAWRPIPLRVQNNGHTIQVDCAGGGSLMLDGKSYDLLQFHFHHPSEHTVDGAFFDMECHFVHKAADGGLAVLGVMIAKGAANPALEAIWQVMPAKGGETATGTSMLDASMLLPKDPVTFRYAGSLTTPPCSEVVQWVVYRQAVTASAEQLAAFAKLFPNNARPVQPLNRRKLLLDVM

SEQ ID NO: 18904 - protein, 275 aa, Xanthomonas campestris pv. campestris str. ATCC 33913
MPSFKSFLLHRVSPVCLCVAAGWGTVAMAQTVLPDATPVHAHETTQHDGHEWGYTGPEGAEHWAELAKENALCGNGQQNSPIDLKDAIDATLGKLQLDYGAVPLVVRNTGHSIQLDLHAGGTMRVGGKQYDALQLHFHHPSEHLLNGRRFPMEAHIVHQGPDGTLGVLAIFFETGKANPAFQRVLDAMPSDKNQTRQVADAVVRASDFLPPANQRSFYRYEGSLTTPPCSETVDWVVLSQPVQVSREQINAFERVYPFNARPLQPLDRRFLLKSH

SEQ ID NO: 18905 - protein, 271 aa, Xanthomonas axonopodis pv. citri str. 306
MLQSASRNAWRVAFPPWHRPSHPRSAFFLPEFVHARFQVASVTSHQPAVPVHRRRLGRGGHGANRTARKQAGGGARDRAAYRAIDANLGTLLLSYSAVPLVVRNTGHSIQLDLHDGGSMATGGKQYQALQLHFHHPSEHLLNGRRFPMEAHLVHQGPDGTLGVLAIFFETGKANTAFQRVLDAMPKDKDQTRQVANATVSAEAFLPPSNQRSFYRYEGSLTTPPCSETVDWVVLSQPVQVSEAQINAFERVYPFNARPLQPLDRRFLLKSH

SEQ ID NO: 18906 - protein, 237 aa, Leuconostoc mesenteroides subsp. mesenteroides ATCC 8293
MVHCEHIVGTFFVVALLYINTIVRNLRGTRMKHLDYREQEDWRKADDTIYQSPIDIPLTSIQQQENSQLIIHFEDRVQSDDRIIGEQFLVQGNLRVDGTVWALERFHFHDGAEHLVDGKRYDAEIHFVFQRDNQTLVLAVFGETADTDNGIEVRNIYDEHVNADGLMKLIPDNRSYYRYTGSLTTPPLGQNINWLILTSAIQISKQDKAFLHADYPNNYREVQDLNGREIDFFPEKK

SEQ ID NO: 18907 - protein, 213 aa, Oenococcus oeni MCW
MPKLDYDNQNNWLFKTGQMQSPVALESNKAEKIEKQATLKLNYSTNASYVHDNGQGIEIGLSGKAIIDNRFFSLQQFHIHAPSEHLLNNYRFDGEIHFVHQAKDGRTAVIAVFLKAGKTSKTFSQIFNHLNQDQNFVCDLTDLIPENKSYYHYLGSLTTPPLTENVEWYILANPVEISRQQLAEFHKLYPYNNRQLQSLNGRPVLYCSSTIKN

SEQ ID NO: 18908 - protein, 256 aa, Streptococcus mutans UA159
MKKKFIYLTVLVVVAVFCISTFLTLKGDSQDREAHWSYSGSTSPEHWGDLSDDYKAAKDGKEQSPINITGAKDVDLPSLQLNSKNSKAEVENNGHTIEVKLKNKKNTLKFNGKTYTLEQFHFHAPSENQIDGKTYPLEGHFVYTTKDKKITVISILYQYGKENKTLKQVWKKMPQKAETKKNLSQPVAISQLFPKDLDYYNFEGSLTTPPCTEGVNWIVFKKQENISKAQVKKFSKTLGFNNNRPIQKLNGREIKE

SEQ ID NO: 18909 - protein, 240 aa, Vibrio vulnificus CMCP6
MKKTVIAAVLATGLTAMGCHAAEWGYEGKHGPEHWGEIAKECAMGKNQSPIDIRQPTQADLKGLDLHYSGQVIALSNNGHTLQGSLSGENVLDIDGKSFELKQFHFHTPSENLIQGKQYPLEAHFVHADKAGNLAVVAVMFESGSQNQALNSLIAKVPKAGEEVKLAQAFDVNDLIPAHSEYYRFNGSLTTPPCSEGVRWLVIKEASELSPTQTHVLMQAMGQNNRPVQPLNARVVLSKE

SEQ ID NO: 18910 - protein, 211 aa, Lactobacillus plantarum WCFS1
MTFDYAHQTDWPMTSGQHQSPIDIQTQHVQSSQLSAINWRGLYQAKTITGEATTLKASGIGAAYLNDRDFAFQQIHFHTPAEHLIDGQAAPIEWHLVHQSATGQLAVVAVFGRIGKPNSSLQGLLDQFTAQTSHELTTPVNLTELLPDTGTVYHYLGSLTTPPLSETVEWYVCADTVMIGEQQLAAYQQLFAANNRKIQPLNDRPIIAERF

SEQ ID NO: 18911 - protein, 238 aa, Vibrio parahaemolyticus RIMD 2210633
MKKSLTAIGLSLVFVGSANAANWGYEGSHGPEHWGEFASECAQGKNQSPIDIHSATQAELAKLQLDYQGKVVALTNNGHTLQTSIEGENVLTIDSKAFTLKQFHFHTPSENHVDGKSYPLEAHYVHADEQGNLAVVAVFFEQGKANPALANLLENVPERDQNVAIRAPFDANALIPSDKDYYRFNGSLTTPPCSEGVRWLVIKDPQSISAEQIAQFEHVMGENNRPVQPLNARMVLTK

SEQ ID NO: 18912 - protein, 239 aa, Vibrio parahaemolyticus RIMD 2210633
MNKTLLAFSLSLLTLSAAQASEWGYGNDKHGPEHWGEIAKDCATTKNQSPINIENPADAKLEALNPSYTGQVIGLTNNGHTLQAQVNGRNSFTIDGETFELQQFHFHTPSENQIKGRQYPLEAHFVHANEDGELAVISVMFDAGDQNAALSKLINAIPQENQTTFFKDTFEINDLLPKTANYYRFNGSLTTPPCSEGVRWFVLKDTQTLSKDQAAKLMEVMGQNNRPLQPLNARVVLSN

SEQ ID NO: 18913 - protein, 291 aa, Bradyrhizobium japonicum USDA 110
MGRKDRVGEPINSTRDGHCDSPRLSPRLRAHRRSNSSWGNMMNRRHALKALAGLALCPVCKPAFAAEGVHWSYEGAGAPAKWGDLDAANKACAVGLQQSPIDIEATIKSQLPTLKLNWGKSADTIVNNGHTIQLNFAEGSTLTLGDVKYKLLQVHFHRPSEHMIGGKNFPMEAHFVHRNDAGGLAVVGVLMAEGKPNPAFGKIVKTMPAADGPAVKADASIDPLAMLPTRLSYFRYPGSLTTPPCSEVVEWLLLTTPIQVSAADVAAFAKLYPMNARPVQKDNRRYVLRST

SEQ ID NO: 18914 - protein, 232 aa, Enterococcus faecalis V583
MKKIKNMDVEWSYTGNDGPEHWHTLCDWFAEGAKFAYQSPIALEKESAETVNSQITFHYKKEEFTEKEFKNTFHFVPPNTESYVMFENVAYHLTDIHFHMPSEHLLSGKQYPLEFHLVHMNDAGENLVVGCLFTITEEENRFSEANHPMDWENGTHQQWFNPSIFLPEERLHYHYVGSLTTPPTKGPVKWFVFDTIQKMDQAFLNKIKEGMLAFNNRPLQPLNGRKIYFSND

SEQ ID NO: 18915 - protein, 246 aa, Dioscorea cayenensis
EDEFSYIEGSPNGPENWGNLRPEWKTCGNGMKQSPINLCDDKVIQTPALGKLRTSYQAARATLKNNGHDIMVNFKSDAGSQFINRVQYQLKRIHFHSPSEHALNGERYDLEIQMVHESQDQRRAVTAIMFRFGRSDPFLSDLEDFIKQISRSENFEVDAGVVDPRQLLQFDDPSYYRYMGSFTAPPCTEDITWTVIKKLGTVSPKQVLMLKQAVNENAINNARPLQPLKFRTVFLYPHQKPNHDAI

SEQ ID NO: 18916 - protein, 273 aa, Dioscorea cayenensis
MSSSTLLHLLLLSSLLFSCLPNAKPQQAEDEFSYIEGSPNGPENWGNLKKEWETCGKGMEQSPIQLRDNRVIFDQTLGELRRNYRAAEATLRNSGHDVLVEFEGNAGSLSINRVAYQLKRIHFHSPSEHEMNGERFDLEAQLVHESQDQKRAVVSILFRFGRADTFLSDLEDFIKQFSSSQKNEINAGVVDPNQLQFDDCAYFRYMGSFTAPPCTEGISWTVMRKVATVSPRQVLLLKQAVNENAINNARPLQPTNYRSVFYFEQLKSKLGVI

SEQ ID NO: 18917 - protein, 589 aa, Dunaliella salina
MGSRRITLLGALFAVLAVAIEGRTLLTHNLKAEAAETVDAVSSVVAGSAGRQLLVSEPHDYNYEKVGFDWTGGVCVNTGTSKQSPINIETDSLAEESERLGTADDTSRLALKGLLSSSYQLTSEVAINLEQDMQFSFNAPDEDLPQLTIGGVVHTFKPVQIHFHHFASEHAIDGQLYPLEAHMVMASQNDGSDQLAVIGIMYKYGEEDPFLKRLQETAQSNGEAADKNVELNSFSINVARDLLPESDLTYYGYDGSLTTPGCDERVKWHVFKEARTVSVAQLKVFSEVTLAAHPEATVTNNRVIQPLNGRKVYEYKGEPNDKYNYVQHGFDWRDNGLDSCAGDVQSPIDIVTSTLQAGSSRSDVSSVNLNDLNTDAFTLTGNTVNIGQGMQINFGDPPAGDLPVIRIGTRDVTFRPLQVHWHFFLSEHTVDGVHYPLEAHIVMKDNDNLGDSAGQLAVIGIMYKYGDADPFITDMQKRVSDKIASGAITYGQSGVSLNNPDDPFNVNIKNNFLPSELGYAGYDGSLTTPPCSEIVKWHVFLEPRTVSVEQMEVFADVTLNSNPGATVTTNRMIQPLEGRTVYGYNGAAA

SEQ ID NO: 18918 - protein, 589 aa, Dunaliella salina
MGSRRITLLGALFAVLAVAIEGRTLLTHNLKAEAAETVDAVSSVVAGSAGRQLLVSEPHDYNYEKVGFDWTGGVCVNTGTSKQSPINIETDSLAEESERLGTADDTSRLALKGLLSSSYQLTSEVAINLEQDMQFSFNAPDEDLPQLTIGGVVHTFKPVQIHFHHFASEHAIDGQLYPLEAHMVMASQNDGSDQLAVIGIMYKYGEEDPFLKRLQETAQSNGEAGDKNVELNSFSINVARDLLPESDLTYYGYDGSLTTPGCDERVKWHVFKEARTVSVAQLKVFSEVTLAAHPEATVTNNRVIQPLNGRKVYEYKGEPNDKYNYVQHGFDWRDNGLDSCAGDVQSPIDIVTSTLQAGSSRSDVSSVNLMTLNTDAFTLTGNTVNIGQGMQINFGDPPAGDLPVIRIGTRDVTFRPLQVHWHFFLSEHTVDGVHYPLEAHIVMKDNDNLGDSAGQLAVIGIMYKYGDADPFITDMQKRVSDKIASGAITYGQSGVSLNNPDDPFNVNIKNNFLPSELGYAGYDGSLTTPPCSEIVKWHVFLEPRTVSVEQMEVFADVTLNSNPGATVTTNRMIQPLEGRTVYGYNGAAA

SEQ ID NO: 18919 - protein, 555 aa, Dunaliella salina
MARLVLLGALLGALCATAVQGSLDGSQVEAGLGRQLTQDKPHEYNYNRHGIDWRDEGLDNCAGSMQSPINIDMATLNRGEERSDVSGLYLNGLASPAYDVAADVTVNAEQDMKITFKDVAQNNMPAIKIDGSDMLFKPVQLHFHHFLSEHAINGAHYPLEAHLVMGDASGNTNQLAVLGIMYQYGEQPDDFVRRLQTKTIDEIATNGAGYGETVNVTDLSVNIMKDVLPPTHHNYVGYDGSLTTPPCDERVKWHVFTEPRTITTGQLEKFLMITKRGHTDAIVTNNRIVQPIGRPLYHYKPTPASYNYARKGIDWREAGLDNCAGDRQSPINIDTTDLQPGAVSGISLNGLESQSFTFTDAYVNLEQDMKVSFTAPTNNLPTVNIDGNDESFRPIQLHFHHFSSEHTVDGMIYPLEAHLVMASQAENSNQLAVIAIFYQYGSEADDFLTRLHTEAISAQQGNANWGDNNVPINLPITFATDLMPSSTEHWAYEGSLTTPPCDERVRWIVMKEPRTTTAEQMETFKTATVNAHYAAEIVNNRAIQERNSRPISSIP

SEQ ID NO: 18920 - protein, 498 aa, Dunaliella salina
MARLALLGAALLCALAVSTQGSPEGHGTKTEMMGAGRLLQQGPHTNSDPPYNYNCHGFDWAASSSSAEITELCDSPASSFPVADCDGDMQSPINIVTSELADPTDRSGVSGINLRGMGSSDFVLRSNVKVNIEQDMKISWDAPTSGNLPTIMIDGTEQRFQPIQLHFHHFASEHTINGQLYPLEAHLVMASLDDPNQLAVIGTMYKYGNGDDFLARLFGKVEDALEERDDVSYGSKEVPIDMEISPKDHVLPQSSLEYAGYDGSLTTPPCSEVVKWHVFTSPRTISIDQLKTFERVSLNAHPNEAIPTNNRVIQPLGTRAAYRYEATAMDDSGDGTGNADELSSPTTVTATYDIMVSGTASSLADMFNNGARLDNGGFGPDDQAEADLLRQIQRRARANSGAEGAEVVRMMKFTAALGRRRLNQQGAAAEMDIRYYFEGSTDQEEATSAVNGMNPSSLGSSSSGLTDVQQTEVTSSASSLRAGLGLVVAAFFGAALAL

SEQ ID NO: 18921 - protein, 498 aa, Dunaliella salina
MARLALLGAALLCALAVSTQGSPEGHGTKTEMMGAGRLLQQGPHTNSDPPYNYNCHGFDWAASSSSAEITELCDSPASSFPVADCDGDMQSPINIVTSELADPTDRSGVSGINLRGMGSSDFVLRSNVKLNIEQDMKISWDAPTSGNLPTIMIDGTEQRFQPIQLYFHHFASEHTINGQLYPLDAHLVMASLDDPNQLAVIGTMYKYGNGDDFLARLFGKVEDALEERDDVSYGSKEVPIDMEISPKDHVLPQSSLEYAGYDGSLTTPPCSEVVKWHVFTSPRTISIDQLKTFERVSFNAHPNEAIPTNNRVIQPLGTRAVYRYEATAMDDSGDGTGNADELSSPTTVTATYDIMVSGTASSLADMFNNGARLDNGGFGPDDQAEADLLRQIQRRARANSGAEGAEVVRMMKFTAALGRRRLNQQGAAAEMDIRYYFEGSTDQEEATSAVNGMNPSSLGSSSSGLTDVQQTEVTSSASSLRAGLGLVVAAFFGAALAL

SEQ ID NO: 18922 - protein, 310 aa, Chlamydomonas reinhardtii; identical to SEQ ID NO: 490

SEQ ID NO: 18923 - protein, 387 aa, Chlamydomonas reinhardtii
ESLPATHLNTMARTGALLLVALALAGCAQACIYKFGTSPDSKATVSGDHWDHGLNGENWEGKDGAGNAWVCKTGRKQSPINVPQYQVLDGKGSKIANGLQTQWSYPDLMSNGTSVQVINNGHTIQVQWTYNYAGHATIAIPAMHNQTNRIVDVLEMRPNDAADRVTAVPTQFHFHSTSEHLLAGKIYPLELHIVHQVTEKLEACKGGCFSVTGILFQLDNGPDNELLEPIFANMPSREGTFSNLPAGTTIKLGELLPSDRDYVTYEGSLTTPPCSEGLLWHVMTQPQRISFGQWNRYRLAVGLKECNSTETAADAGHHHHHRRLLHNHAHLEEVPAATSEPKHYFRRVMLAESANPDATPARPLPLARTSATPSTPTAAPSSWPAIT

SEQ ID NO: 18924 - protein, 377 aa, Chlamydomonas reinhardtii
MARTGALLLVALALAGCAQACIYKFGTSPDSKATVSGDHWDHGLNGENWEGKDGAGNAWVCKTGRKQSPINVPQYQVLDGKGSKIANGLQTQWSYPDLMSNGTSVQVINNGHTIQVQWTYNYAGHATIAIPAMHNQTNRIVDVLEMRPNDAADRVTAVPTQFHFHSTSEHLLAGKIYPLELHIVHQVTEKLEACKGGCFSVTGILFQLDNGPDNELLEPIFANMPSREGTFSNLPAGTTIKLGELLPSDRDYVTYEGSLTTPPCSEGLLWHVMTQPQRISFGQWNRYRLAVGLKECNSTETAADAGHHHHHRRLLHNHAHLEEVPAATSEPKHYFRRVMLAESANPDAYTCKAVAFGQNFRNPQYANGRTIKLARYH

SEQ ID NO: 18925 - protein, 377 aa, Chlamydomonas reinhardtii
NMARTGALLLVALALGCAQACIYKFGTSPDSKATVSGDHWDHGLNGENWEGKDGAGNAWVCKTGRKQSPINVPQYQVLDGKGSKIANGLQTQWSYPDLMSNGTSVQVINNGHTIQVQWTYNYAGHATIAIPAMHNQTNRIVDVLEMRPNDAADRVTAVPTQFHFHSTSEHLLAGKIYPLELHIVHQVTEKLEACKGGCFSVTGILFQLDNGPDNELLEPIFANMPSREGTFSNLPAGTTIKLGELLPSDRDYVTYEGSLTTPPCSEGLLWHVMTQPQRISFGQWNRYRLAVGLKECNSTETAADAGHHHHHRRLLHNHAHLEEVPAATSEPKHYFRRVMLAESANPDAYTCKAVAFGQNFRNPQYANGRTIKLARYH

SEQ ID NO: 18926 - protein, 357 aa, Chlamydomonas reinhardtii
CIYKFGTSPDSKATVSGDHWDHGLNGENWEGKDGAGNAWVCKTGRKQSPINVPQYQVLDGKGSKIANGLQTQWSYPDLMSNGTSVQVINNGHTIQVQWTYNYAGHATIAIPAMHNQTNRIVDVLEMRPNDAADRVTAVPTQFHFHSTSEHLLAGKIYPLELHIVHQVTEKLEACKGGCFSVTGILFQLDNGPDNELLEPIFANMPSREGTFSNLPAGTTIKLGELLPSDRDYVTYEGSLTTPPCSEGLLWHVMTQPQRISFGQWNRYRLAVGLKECNSTETAADAGHHHHHRRLLHNHAHLEEVPAATSEPKHYFRRVMLAESANPDAYTCKAVAFGQNFRNPQYANGRTIKLARYH

SEQ ID NO: 18927 - protein, 380 aa, Chlamydomonas reinhardtii
MARTGALLLAALALAGCAQACIYKFGTSPDSKATHTGDHWDHSLNGENWEGKDGAGNPWVCKTGRKQSPINVPQYHVLDGKGSKIATGLQTQWSYPDLMSNGSSVQVINNGHTIQVQWTYDYAGHATIAIPAMRNQSNRIVDVLEMRPNDASDRVTAVPTQFHFHSTSEHLLAGKIFPLELHIVHKVTDKLEACKGGCFSVTGILFQLDNGPDNELLEPIFANMPTREGTFTNLPAGTTIKLGELLPSDRDYVTYEGSLTTPPCSEGLLWHVMTQPQRISFGQWNRYRLAVGEKECNSTETDAAHADAGHHHHHHRRLLHNHAHLEEVPAATSEPKHYFRRVMEETENPDAYTCTTVAFGQNFRNAQYANGRTIKLARYE

SEQ ID NO: 18928 - protein, 374 aa, Chlamydomonas reinhardtii
MARTGALLLAALALAGCAQACIYKFGTSPDSKATHTGDHWDHSLNGENWEGKDGAGNPWVCKTGRKQSPINVPQYHVLDGKGSKIATGLQTQWSYPDLMSNGSSVQVINNGHTIQVQWTYDYAGHATIAIPAMRNQSNRIVDVLEMRPNDASDRVTAVPTQFHFHSTSEHLLAGKIFPLELHIVHKVTDKLEACKGGCFSVTGILFQLDNGPDNELLEPTREGTFTNLPAGTTIKLGELLPSDRDYVTYEGSLTTPPCSEGLLWHVMTQPQRISFGQWNRYRLAVGEKECNSTETDAAHADAGHHHHHHRRLLHNHAHLEEVPAATSEPKHYFRRVMEETENPDAYTCTTVAFGQNFRNAQYANGRTIKLARYE

SEQ ID NO: 18929 - protein, 348 aa, Chlorella sorokiniana
MRVAAALLALAVCANACSHVYFADSDLHAHGRRLTAAEGPTWNYNKGGSDWPGTCASGNKQSPIAFSSDGLPAISSDARANLQLGVVSGLKVINTGHGTQIEWDKLEDSAATVPVFDDTWQAIFDGSSENKTVRQVPVKPLQFHLHTASEHLVNGELAPVELHIVAAVDNTTGAWVPENCRQSQCLTVFGVSIWLASDPYAKSDSFWQTVVDNLPTATGKEGANNLTSPATLNLTALLPEDLTFATYSGSLTTPPCSEGVQWHMFVTPKRELSAAQLNALQAISSTATAEVLAACPADEVIPEVAAADGAGNSSASTVELGCKTPTGARITNRQVMPLNDRTVFISKP

SEQ ID NO: 18930 - protein, 261 aa, Lepisosteus osseus
MSHSWGYAANNGPDKWHEKFPIAQGPRQSPIDIVPSQAQHDPDLKPLRIVYDPSTSKGILNNGHSFQVDFADENDSSTLQGGPISGVYRLRQFHFHWGASDERGSEHTVGGVKYAAELHLVHWNAGKYASFGDAAKAPDGLAVVGVFLKIGAASPNLQKVLDALDAIKTKGKQTPFPQFDPKILLPSSLDFWTYEGSLTTPPLLESVTWIVLKEPITVSSEQMAKFRSLLFTAEGETACCMVDNYRPPQPLKGRKVRASFK

SEQ ID NO: 18931 - protein, 325 aa, Acetabularia acetabulum
MLSTVILCLLVVSAFTKQKSHDDEFNYKLGGDDWPGLCATGDLQSPIDVHFMNQLSGSQIQGCEIVEELKGDTDMYAYPERLVLNRDGQPQATFQFGSTDEVLITNVGDAIVWMFDDDFSLLNLPIQGGKLDGVLHPITKGQGRTSNFMGGQIEYVQARFVNFHVHSPGEHMYNGYLAPLEGHFVMNIDQADLDTCPEAGCLAVVSVHFQHSLDDTPNQFIQDTLELIGGEWPVQIGASMEANGSLNFDQLLPQNPHYMLYSGSLTTPPCTEGVLWHVIQESVPVSIAQVAALQNAIGYSHDGIVRNNRRIQPINNRDIIYHDCI

SEQ ID NO: 18932 - protein, 315 aa, Acetabularia acetabulum
MLSALVLCQLVVLSISQKDFNYKLGGDDWPGLCATGNLQSPIDVRFSEPLSSLKAQTCEISSKLKISNPGRLVLNRAGLPQATFQFGSSDKVTVANVGGAIVWLFDDDFSLLNLPIEGGKLDGILQSNNKGLDRISIFMREQIEVVQARFINFHVHSVSEHMFNGFLAPLEGHFVMQIDQADLQSCPEAGCLAVVGVHFQHSIDDTPNQFIQDTLQLIGGKWPDTNGQSIPASGSLNFDQLVPHNPSYMLYSGSLTTPPCTEGVLWHVIQQPMTVSIAQVAELQNAIGFERDGLVRNNRRIQPINNRDMIYHDCI

SEQ ID NO: 18933 - protein, 315 aa, Acetabularia acetabulum
MLSALVLCQLVVLSISQKDFNYKLGGDDWPGLCATGNLQSPIDVRFSEPLSSLKAQTCEISSKLEKSNPGRLVLNRAGLPQATFQFGSSDKVTVANVGGAIVWLFDDDFSLLNLPIEGGKLDGILQSNNKGLDRISIFMREQIEVVQARFINFHVHSVSEHMFNGFLAPLEGHFVMQIDQADLQSCPEAGCLAVVGVHFQHSIDDTPNQFIQDTLQLIGGKWPDTNGQSIPASGSLNFDQLVPHNPSYMLYSGSLTTPPCTEGVLWHVIQQPMTVSIAQVAELQNAIGFERDGLVRNNRRIQPINNRDMIYHDCI

SEQ ID NO: 18934 - protein, 284 aa, Arabidopsis thaliana
MKIMMMIKLCFFSMSLICIAPADAQTEGVVFGYKGKNGPNQWGHLNPHFTTCAVGKLQSPIDIQRRQIFYNHKLNSIHREYYFTNATLVNHVCNVAMFFGEGAGDVIIENKNYTLLQMHWHTPSEHHLHGVQYAAELHMVHQAKDGSFAVVASLFKIGTEEPFLSQMKEKLVKLKEERLKGNHTAQVEVGRIDTRHIERKTRKYYRYIGSLTTPPCSENVSWTILGKVRSMSKEQVELLRSPLDTSFKNNSRPCQPLNGRRVEMFHDHERVDKKETGNKKKKPN

SEQ ID NO: 18935 - protein, 277 aa, Arabidopsis thaliana
MKTIILFVTFLALSSSSLADETETEFHYKPGEIADPSKWSSIKAEWKICGTGKRQSPINLTPKIARIVHNSTEILQTYYKPVEAILKNRGFDMKVKWEDDAGKIVINDTDYKLVQSHWHAPSEHFLDGQRLAMELHMVHKSVEGHLAVIGVLFREGEPNAFISRIMDKIHKIADVQDGEVSIGKIDPREFGWDLTKFYEYRGSLTTPPCTEDVMWTIINKVGTVSREQIDVLTDARRGGYEKNARPAQPLNGRLVYLNEQSSPSPTPRLRIPRVGPV

SEQ ID NO: 18936 - protein, 275 aa, Arabidopsis thaliana
MVNYSSISCIFFVALFSIFTIVSISSAASSHGEVEDEREFNYKKNDEKGPERWGELKPEWEMCGKGEMQSPIDLMNERVNIVSHLGRLNRDYNPSNATLKNRGHDIMLKFEDGAGTIKINGFEYELQQLHWHSPSEHTINGRRFALELHMVHEGRNRRMAVVTVLYKIGRADTFIRSLEKELEGIAEMEEAEKNVGMIDPTKIKIGSRKYYRYTGSLTTPPCTQNVTWSVVRKVRTVTRKQVKLLRVAVHDDANSNARPVQPTNKRIVHLYRPIV

SEQ ID NO: 18937 - protein, 267 aa, Arabidopsis thaliana
MDTNAKTIFFMAMCFIYLSFPNISHAHSEVDDETPFTYEQKTEKGPEGWGKINPHWKVCNTGRYQSPIDLTNERVSLIHDQAWTRQYKPAPAVITNRGHDIMVSWKGDAGKMTIRKTDFNLVQCHWHSPSEHTVNGTRYDLELHMVHTSARGRTAVIGVLYKLGEPNEFLTKLLNGIKAVGNKEINLGMIDPREIRFQTRKFYRYIGSLTVPPCTEGVIWTVVKRVNTISMEQITALRQAVDDGFETNSRPVQDSKGRSVWFYDPNV

SEQ ID NO: 18938 - protein, 248 aa, Arabidopsis thaliana
MDEYVEDEHEFSYEWNQENGPAKWGKLRPEWKMCGKGEMQSPIDLMNKRVRLVTHLKKLTRHYKPCNATLKNRGHDMMLKFGEEGSGSITVNGTEYKLLQLHWHSPSEHTMNGRRFALELHMVHENINGSLAVVTVLYKIGRPDSFLGLLENKLSAITDQNEAEKYVDVIDPRDIKIGSRKFYRYIGSLTTPPCTQNVIWTVVKKVRTVTKNQVKLLRVAVHDNSDTNARPVQPTNKRVVKLYKPKSL

SEQ ID NO: 18939 - protein, 263 aa, Arabidopsis thaliana
MKHIFFNSCITKKNIEDETQFNYEKKGEKGPENWGRLKPEWAMCGKGNMQSPIDLTDKRVLIDHNLGYLRSQYLPSNATIKNRGHDIMMKFEGGNAGLGITINGTEYKLQQIHWHSPSEHTLNGKRFVLEEHMVHQSKDGRNAVVAFFYKLGKPDYFLLTLERYLKRITDTHESQEFVEMVHPRTFGFESKHYYRFIGSLTTPPCSENVIWTISKEMRTVTLKQLIMLRVTVHDQSNSNARPLQRKNERPVALYIPTWHSKLY

SEQ ID NO: 18940 - protein, 260 aa, Arabidopsis thaliana
MDANTKTILFFVVFFIDLFSPNILFVYAREIGNKPLFTYKQKTEKGPAEWGKLDPQWKVCSTGKIQSPIDLTDERVSLIHDQALSKHYKPASAVIQSRGHDVMVSWKGDGGKITIHQTDYKLVQCHWHSPSEHTINGTSYDLELHMVHTSASGKTTVVGVLYKLGEPDEFLTKILNGIKGVGKKEIDLGIVDPRDIRFETNNFYRYIGSLTIPPCTEGVIWTVQKRVLYFFCFCYRLIIFVTPYINIFWIFVFVFWCMLM

SEQ ID NO: 18941 - protein, 263 aa, Arabidopsis thaliana
MVNYSSISCIFFVALFSIFTIVSISSAASSHGEVEDEREFNYKKNDEKGPERWGELKPEWEMCGKGEMQSPIDLMNERVNIVSHLGRLNRDYNPSNATLKNRGHDIMLKFEDGAGTIKINGFEYELQQLHWHSPSEHTINGRRNRRMAVVTVLYKIGRADTFIRSLEKELEGIAEMEEAEKNVGMIDPTKIKIGSRKYYRYTGSLTTPPCTQNVTWSVVRKVRTVTRKQVKLLRVAVHDDANSNARPVQPTNKRIVHLYRPIV

SEQ ID NO: 18942 - protein, 188 aa, Arabidopsis thaliana
MFFGEGAGDVIIENKNYTLLQMHWHTPSEHHLHGVQYAAELHMVHQAKDGSFAVVASLFKIGTEEPFLSQMKEKLVKLKEERLKGNHTAQVEVGRIDTRHIERKTRKYYRYIGSLTTPPCSENVSWTILGKVRSMSKEQVELLRSPLDTSFKNNSRPCQPLNGRRVEMFHDHERVDKKETGNKKKKPN

SEQ ID NO: 18943 - protein, 2254 aa, Arabidopsis thaliana
MKHIFFNSCITKKNIEDETQFNYEKKGEKGPENWGRLKPEWAMCGKGNMQSPIDLTDKRVLIDHNLGYLRSQYLPSNATIKNRGHDIMMKFEGGNAGLGITINGTEYKLQQIHWHSPSEHTLNGKRYLKRITDTHESQEFVEMVHPRTFGFESKHYYRFIGSLTTPPCSENVIWTISKEMRTVTLKQLIMLRVTVHDQSNSNARPLQRKNERPVALYIPTWHSPFRCVLSVNMKKDEKIGLTGRTIYTRSLAASIPASVEQETPGLRRSSRGTPSTKVITPASATRKSERLAPSPASVSKKSGGIVKNSTPSSLRRSNRGKTEVSLQSSKGSDNSIRKGDTSPDIEQRKDSVEESTDKIKPIMSARSYRALFRGKLKESEALVDASPNEEELVVVGCSRRIPAGNDDVQGKTDCPPPADAGSKRLPVDETSLDKGTDFPLKSVTETEKIVLDASPIVETGDDSVIGSPSENLETQKLQDGKTDCSPPANAESKTLPVGETSLEKEYPQKFQDDNTDCLPPANAESKRLPVGETSLEKDTDFPLKSTTETGKMVLYASPIVETRDDSVICSPSTNLETQKLLVSKTGLETDIVLPLKRKRDTAEIELDACATVANGDDHVMSSDGVIPSPSGCKNDNRPEMCNTCKKRQKVNGDCQNRSVCSCIVQPVEESDNVTQDMKETGPVTSREYEENGQIQHGKSSDPKFYSSVYPEYWVPVQLSDVQLEQYCQTLFSKSLSLSSLSKIDLGALEETLNSVRKTCDHPYVMDASLKQLLTKNLELHEILDVEIKASGKLHLLDKMLTHIKKNGLKAVVFYQQATQTPEGLLLGNILEDFVGQRFGPKSYEHGIYSSKKNSAINNFNKESQCCVLLLETRACSQTIKLLRADAFILFGSSLNPSHDVKHVEKIKIESCSERTKIFRLYSVCTVEEKALILARQNKRQNKAVENLNRSLTHALLMWGASYLFDKLDHFHSSETPDSGVSFEQSIMDGVIHEFSSILSSKGGEENEVKLCLLLEAKHAQGTYSSDSTLFGEDHIKLSDEESPNIFWSKLLGGKNPMWKYPSDTPQRNRKRVQYFEGSEASPKTGDGGNAKKRKKASDDVTDPRVTDPPVDDDERKASGKDHMGALESPKVITLQSSCKSSGTDGTLDGNDAFGLYSMGSHISGIPEDMLASQDWGKIPDESQRRLHTVLKPKMAKLCQVLHLSDACTSMVGNFLEYVIENHRIYEEPATTFQAFQIALSWIAALLVKQILSHKESLVRANSELAFKCSRVEVDYIYSILSCMKSLFLEHTQGLQFDCFGTNSKQSVVSTKLVNESLSGATVRDEKINTKSMRNSSEDEECMTEKRCSHYSTATRDIEKTISGIKKKYKKQVQKLVQEHEEKKMELLNMYADKKQKLETSKSVEAAVIRITCSRTSTQVGDLKLLDHNYERKFDEIKSEKNECLKSLEQMHDVAKKKLAEDEACWINRIKSWAAKLKVCVPIQSGNNKHFSGSSNISQNAPDVQICNNANVEATYADTNCMASKVNQVPEAENTLGTMSGGSTQQVHEMVDVRNDETMDVSALSREQLTKSQSNEHASITVPEILIPADCQEEFAALNVHLSEDQNCDRITSAASDEDVSSRVPEVSQSLENLSASPEFSLNREEALVTTENRRTSHVGFDTDNILDQQNREDCSLDQEIPDELAMPVQHLASVVETRGAAESDQYGQDICPMPSSLAGKQPDPAANTESENLEEAIEPQSAGSETVETTDFAASHQGDQVTCPLLSSPTGNQPAPEANIEGQNINTSAEPHVAGPDAVESGDYAVIDQETMGAQDACSLPSGSVGTQSDLGANIEGQNVTTVAQLPTDGSDAVVTGGSPVSDQCAQDASPMPLSSPGNHPDTAVNIEGLDNTSVAEPHISGSDACEMEISEPGPQVERSTFANLFHEGGVEHSAGVTALVPSLLNNGTEQIAVQPVPQIPFPVFNDPFLHELEKLRRESENSKKTFEEKVSFPHYPKSILKAELERKMAEVQAEFRRKFHEVEAEHNTRTTKIEKDKNLVIMNKLLANAFLSKCTDKKVSPSGAPRGKIQQLAQRAAQVSALRNYIAPQQLQASSFPAPALVSAPLQLQQSSFPAPGPAPLQPQASSFPSSVSRPSALLLNFAVCPMPQPRQPLISNIAPTPSVTPATNPGLRSPAPHLNSYRPSSSTPVATATPTSSVPPQALTYSAVSIQQQQEQQPQQSLSSGLQSNNEVEPTRWLRSLLLKRNVLLSCI

SEQ ID NO: 18944 - protein, 250 aa, Mesorhizobium loti
MHRRNLIRGFIALGVCPICAQTARAASAHWGYGGSVGPEHWADLDTRNFACSAGRQQSPIDIAGTVKADIPRIDISWLKGGGRMVNNGHTIQINMPEGSTLTRGDRVYQLAQLHFHAPSEHHVAGMSFPMEAHFVHKDTKSDTLGVLSALLTPGATNKSFAGLAKVFPARPGEEMAVDEFDPNGLLPASLGYWTYEGSLTTPPCTENVEWMVAMEPVEVDTADIKRFTTLYASNARSIRPSNRRFILGLS

SEQ ID NO: 18945 - protein, 250 aa, Mesorhizobium loti
MHRRNLIRAFIALGVCPICAQTARAASAHWGYGGSVGPEHWADLDTRNFACSAGRQQSPIDIAGTVKADIPRIDISWLKGGGRMVNNGHTIQINMPEGSTLTRGDRVYQLAQLHFHAPSEHHVAGMSFPMEAHFVHKDTKSDTLGVLSALLMPGATNNSFAGLAKVFPARPGEEMAVDEFDPNGLLPASLGYWTYEGSLTTPPCTENVEWMVAMEPVEVDTADIKRFTTLYASNARSIRPSNRRFILGLS

SEQ ID NO: 18946 - protein, 249 aa, Sinorhizobium meliloti
MERRDFLRGLALLAACPLCVKTAYAAEGVHWRYEGEEGPEHWGSLAKENSACSAGSQQSPIDIRGAVKADIPELTADWKSGGTILNNGHTIQVNAAGGTLRRGDKSYDLVQYHFHSPSEHFVDGKSFPMEAHFVHKNAETGTLGVLGVFLVPGAANSTFASLAEKFPRNPGEESPLITIDPKGLLPSSLSYWTYEGSLTTPPCSEIVDWMVAMEAVEVDPGDIKKFTALYSMNARPALAGNRRYVLSSS

SEQ ID NO: 18947 - protein, 287 aa, Glycine max
  unsure (1)..(287): unsure at all Xaa locations
LFTMALRVHFSIVSIAVLALCTSADYFSANFSYAGPNGPEYWGSLSPSYAACSHGKSQSPVELMKTDIVIDMQLKNLNRNYLPTNATLVDNIFNIGVHFEGKVGDININGKNYSLKQLHWHSPSEHMANGRIHDAELHLVHLTEDNYNIAVVAVLYKLGDPDPLISQFEDKLVDLEKEIRAGNKDAQIAIGTFDVEEINRSSHRYYRYVGSLTTPPCKEGVTWNILGKLRTLSKKQLELLKAPLGPEFKHNARPLQQLNGRKIQMYYHPNHLHGSHATPSKYHKXIA

SEQ ID NO: 18948 - protein, 191 aa, Glycine max
  unsure (1)..(191): unsure at all Xaa locations
GITQKLLNQRANKMERAMAIQLFAYSFFIVIVLLFPPAMCAEFNYDLSSPNGPLNWGXXNPQWQLCKNGKNQSPINLQKLSADVEFISGIQRNYQPANATLISSEHDIMVNWTENAGHITINGTQYQLAQGHWHSPSEHRINGIRYDLELHMVHISSAGRLAVTGVLYKFGRPDDEFISKIEDDLQLMAEN

SEQ ID NO: 18949 - protein, 203 aa, Glycine max
  unsure (1)..(203): unsure at all Xaa locations
XQLRRPPPPSMKMEFFLTDHTLSNIKVNDTGVGLLSVLSLSSEPPMLMVMSXEFEALQFHFHAPAEHTINEGRYELELHIVHKTKTHRNLAVVAVFFEXLIKTPELPPTLXIDALKLDRCGCDLDLNMYELLSQDLTEMTXXFFAYKGGLTTPPCSETVNWYLFEKPVKITQAQLNHFNLRWKDNMNFACGEGNNRPIQALNX

SEQ ID NO: 18950 - protein, 173 aa, Glycine max
  unsure (1)..(173): unsure at all Xaa locations
SKSIRTFYSSLKYLTRNILQCLLXLVLICCLFTAFLFLSLPVMSQEVEDESEFSYDEKSENGPSNWGDIHPEWSLCNNGSMQSPIDLLNERVQIVSHLGRLQMNYQPSNATIKNRGHDIKLEWVAGAGYLQINETEYVLKQCHWHSPSEHTIDGKRLDLEVHMVHDTSSGQSA

SEQ ID NO: 18951 - protein, 162 aa, Glycine max
  unsure (1)..(162): unsure at all Xaa locations
MIEINMKHQGKLRVFLPNMIILVTILLHSTTWISAQEVEDESEFDYIKGSEKGPSHWGELKKEWETCKSGKMQSPIDLSSHRVRVVPKLGELKKYYTPQNATIXKNRGHDIELKWEGDAGSININGTEFFLHQCHWHSPSEHTINGRRYDLEXHMVHESKTX

SEQ ID NO: 18952 - protein, 187 aa, Glycine max
  unsure (1)..(187): unsure at all Xaa locations
RLREDDRRGPTHPRTNNLCATCRHSTHKSQLSPPSETCSVKVTXSVAISLICILFCSTLTSALDEPEYGYNEKSANGPXHWGDLKEEWAACKIGQIQSPIDLSTNGVEVIPKLGGLNWNYKPQHATVSNRGHDVAVIWEGDAGSIEINGTPFFLQQAHWHWPAEXTIXGRRYDWEXHMVHVSPQPDX

SEQ ID NO: 18953 - protein, 278 aa, Oryza sativa (japonica cultivar-group)
MAASHGNAIFVLLLCTLFLPSLACDSGGVKFGYTGSIGPDFWGNLSADFTRCSNGKQQSPIDIDTNNLVHELNMEPLHRNYTAANATLVDNIFNVALRYEEAAGVLSINGVKYTLKQMHWHSPSEHTINGFRFPLELHMVHTNENGNITVLAFLYRFGRPDPFFEQIQDKLAALNAEGCKAEKGSPVPAGSVSLLTMRQHVHIYYRYVGSLTTPPCAENVIWNIPAMPREMTPQQAADLMAPLDEGYRRNSRPTQQMNGRTVQLYHRFWGKKKRRSSP

SEQ ID NO: 18954 - protein, 276 aa, Oryza sativa (japonica cultivar-group)
MAASHGNAIFVLLLCTLFLPSLACDSGGVKFGYTGSIGPDFWGNLSADFTRCSNGKQQSPIDIDTNNLVHELNMEPLHRNYTAANATLVDNIFNVALRYEEAAGVLSINGVKYTLKQMHWHSPSEHTINGFRFPLELHMVHTNENGNITVLAFLYRFGRPDPFFEQDKLAALNAEGCKAEKGSPVPAGSVSLLTMRQHVHIYYRYVGSLTTPPCAENVIWNIPAMPREMTPQQAADLMAPLDEGYRRNSRPTQQMNGRTVQLYHRFWGKKKRRSSP

SEQ ID NO: 18955 - protein, 276 aa, Oryza sativa (japonica cultivar-group)
MSTSARRLLLLAGAAAAIALLLSATAPVAGAEDDGYSYIPGSPRGPQNWGSLKPEWATCSSGKMQSPINLGLLDLTLAPGLGNLNYTYQNANASVVNRGHDIMVRFDGDAGSLKINGTAYQLRQMHWHTPSEHTIDGRRYDMELHMVHLNAQNQAAVIGILYTIGTRDEFLQKLEPYIIEISKQEGKERVIIGGADPNVAKGQDTVYYRYMGSFTTPPCTEGVIWTVVRKVRTVSLSQITLLKAAVLTGNENNARPLQGVNNREIDLFLPLPLINN

SEQ ID NO: 18956 - protein, 312 aa, Oryza sativa
  unsure (1)..(312): unsure at all Xaa locations
SEHGHFGSRXQTPSAWARSALRRVQALLHCRKRWQLLMEMRSLFCCCALSFSRPLXCDSGGVKFGYTGSIGPDFWGNLSADFTRCSNGKQQSPIDIDTNNLVHELNMEPLHRNYTAANATLVDNIFNVALRYEEAAGVLSINGVKYTLKQMHWHSPSEHTINGFRFPLELHMVHTNENGNITVLAFLYRFGRPDPFFEQIQDKLAALNAEGCKAEKGSPVPAGSVSLLTMRQHVHIYYRYVGSLTTPPCAENVIWNIPAMPREMTPQQAADLMAPLDEGYRRNSRPTQQMNGRTVQLYHRFWGKKKRRSSPX

SEQ ID NO: 18957 - protein, 350 aa, Oryza sativa
  unsure (1)..(350): unsure at all Xaa locations
MARARRGRQNAAASPPSLALQLQVASLVIVFVFAFSSAITPTRADHVEGHMSHEMFGYEXTTRRGPAKWGXSLHKEWAVCGDGKKQSPIDITTVEPQKVXXEPLMQAYKAGATTIQNRGHDYMLKWKDGNSKLTVQGKEYTLKQVHWHEPSEHTINGTRFDAEMHMVHEDPSMARAVVSVLFKAGQPNAVLTEMAPHFKNLAGKEKAEEEVKEPVDPSTWVDKTSGYYRYDGSLTTPPCTEGVIWTIMSKIGDASKEQIDLLKXXVATTVEPNARPAQKLNDRIVRSKRYNKVVASTTAKPLQQTALQRLASEGRTELAPPGQRHKKTEHYAQHMFQVFIRYLRTSRGSR

SEQ ID NO: 18958 - protein, 409 aa, Oryza sativa
MASVTGTQQANWGGLLETAATNVPIAAVTPRHHRSRSHSRYRGRRIQHSRGRRHRIRCPPSPLSPTATTCRFRGRGRRIRKLPPLAPEVGGGCIRPLPATAHCRPPPPLPRLGSVDPRVDVATEDGGGAVGGERRRARRLLLLAGAAAAIALLLSATAPVAGAEDDGYSYIPGSPRGPQNWGSLKPEWATCSSGKMQSPINLGLLDLTLAPGLGNLNYTYQNANASVVNRGHDIMVRFDGDAGSLKINGTAYQLRQMHWHTPSEHTIDGRRYDMELHMVHLNAQNQAAVIGILYTIGTTPDEFLQKLEPYIIAISNQEGKEKMVVGGADPNVAKGKDTVYYRYMGSFTTPPCTEGVIWTVVRKVRTVSLSQITLLKAAVLTGNENNARPLQGVNNREIDLFLPLPLINN

SEQ ID NO: 18959 - protein, 296 aa, Oryza sativa
  unsure (1)..(296): unsure at all Xaa locations
MVSLRAAIVLVVAASSVAVAFSHAEGNEGPDFTYKGANGPSNWGKLSPEYRMCGEGRSQSXVDINTKTVVPRSDLDTLDRNYNAVNATIVNNGKDITMKFHGEVGQVIIAGKPYRFQAXXWHAPSEHTINGRRFPLELHLVHKSDADGGLAVISVLYKLGAPDSFYLQFKDHLAELGADECDFSKEEAHVAAGLVQMRSLQKRTGSYFRYGGSLTTPPCGENVVWSVLGKVREISQEQLHLLMSPLPTKDARPAQPLNGRAVFYYNXRRAAPSPSRNSPSDSFFFFSFFFFLVFCI

SEQ ID NO: 18960 - protein, 311 aa, Oryza sativa
  unsure (1)..(311): unsure at all Xaa locations
MVSSHAAIVFFLVAASSLLSYGEAAPKMTAVAADYGYPADYGYAAGSKLGPENWGKLSPAYKLCGDGKKQSPIDIVTKQAISNPNLDSLNRTYTASDGTLVNNGKDILMEFADKVGTVTVNGKVYSFRRVHWHAPSEHTINGEKHPLELQMVHAAADGSLAVIAILYKYGAPDSFYFQLKRKLAELAADGCSFGEENAQVALGLVHLRSLQKRTGSYFRYAGSLTAPPCTEDVFWSVLGKIRQISQEQVALITALLPAGGARPTQPLNGRTVQFYNPPNXXPSPSRSSSPRPNGLWPIYIYYMGCIGLHRP

SEQ ID NO: 18961 - protein, 174 aa, Oryza sativa
  unsure (1)..(174): unsure at all Xaa locations
XCIAHASSFVVTAVVTLLLLAPAAGAEEDDQFGYIPGTPRGPENWGSLKPEWATCSSGEMQSPINLGLLDLTLAPGLGDLNYTYRNANATVVNRGHDIMVRFDGGDDAAAAGGLVINGTAYRLRQVHWHAPSEHAVDGRRYDMELHMVHLNTQNQTAVVGILYAIGAQDEFLHK

SEQ ID NO: 18962 - protein, 166 aa, Oryza sativa
AGSVVINGTAYYLRQLHWHSPTEHSVDGRRYDMELHMVHESAEKKAAVIGLLYEVGRPDRFLQKMEPYLKMIADKEDREEKVGMIDPRGARGRASVYYRYMGSLTTPPCTQGVVWTIVKRVRTVSRYQLDLLREAVHDEMENNARPLQAVNNRDISIFRPYPHKRY

SEQ ID NO: 18963 - protein, 196 aa, Oryza sativa
  unsure (1)..(196): unsure at all Xaa locations
XHWHSPSEHTINGQRFAVELHMVHHSDDGNITVIAVLYRHGKPDPFLFQIKDKLAALYLEGCKAEKGEPLPVGLVDMRELKKGADRYFRYVGSLTTPPCTENVIWNIFGEIRQLTQEQAAALRGALHGGYTHNRRPTQPLNGRTYVPKFRNVNVIGAMDCNKTLFIVMVHIIHFSFVRSLRKGDNGMDAGKTKTLN

SEQ ID NO: 18964 - protein, 273 aa, Triticum aestivum
  unsure (1)..(273): unsure at all Xaa locations
MASQMSSAWAAVVVIVSSLLAVALSHDEGGGPSFGYTPGTPDGPENWGKLSPAYKACGDGKAQSPIDIVIANAVPNPNLDTLTRVYAPSNATLHNTGKDIVMSFEQGGEPVMPGSINFKLKMIHWHAPGEHTVNGKRFPLELHMVHVDDQDHKAVIGILYEIGNPDPFYDQLTEKLRELXXTTPTVAAGVVELKSLQKRTGSYFRYMGSLTTPPCTEKVMWNILGKGRELSQEQLQLITAPLPHQDNRPPQPLNGRQVAFYNXRQTPSSPSNP

SEQ ID NO: 18965 - protein, 314 aa, Triticum aestivum
  unsure (1)..(314): unsure at all Xaa locations
RIPATWPIRGKARNGRSTVPAMASRRAVLALVVAVAASAASVAADDPDYSYVSGTKLGPENWAKLSPKYSACNGGAAARKQSPIDIVTKSAVPKPDLDPLTRTYVATDATLINNGKEISMTFNGKPGSVSIGGKAFSLKKLRWKTPSEHTINGKRHPVEVQLVHESDAGXSGELAIIAILYKLGAPDSFYYQLKRKLAELAADRCSYGEQDARVATGLVHLRSLEKRTGSYFRYMGSLTAPPCAENVYWNVLGKVRQMTKEQIDLVTAPLPAAAKQNARPVQPLNGRVVTFYNXRPTAPSPSTCDLTPIRWSAN

SEQ ID NO: 18966 - protein, 324 aa, Triticum aestivum
  unsure (1)..(324): unsure at all Xaa locations
YPQGPAPAGSKRGRSTTQQTQEELTSSTSRGADTQPSTNALRAHQDNMRPSRDLRLAVLLLLFSASVLLPAARAQQETEEEEEFSYSLDAENGPAHWGDIKEEWSACGKGNMQSPIDLASPRVSLVRGLGYLNHSYAPANATIVNRGHDIMLKFEGDAGSVSIGGTPYFLRQLHWHSPTEHSVNGRRYDMELHMFHESAQGKAAVIGVFYEIGAHDAFLHKLEPYLEMIADRKDREEKMGMMDPRGARGKASVYYRYVGSLTTPPCSEGVIWTIVKRVRTVSRHQLELLXREAVHDDMEKNARPRQEVNNRDISMFRPFEQNRH

SEQ ID NO: 18967 - protein, 285 aa, Triticum aestivum
MRSARHLHLPVWALLLLLHFSAFVPAARAQQEIDDESEFSYVCGAKNGPENWGKIKEEWATCGTGRMQSPIDLSDRHASRAPHLGYLNHSYPPAEASIVNRGHDIAVMFHGDAGSLWINGTAYHLRQVHWHSPSEHRVNGRRYSLELHMVHLSAENKAAVIGLLYKIGRPDHFLHELEPYLRRMADTKEKEEMVGVVDPWVARGDAEAYYRYMGSLTTPACDEGVIWTVIKRVATVSTHQLKLLTDAVHDGFEMNARPLQKVNGRDINFFCPDDHHERYYAAADQ

SEQ ID NO: 18968 - protein, 286 aa, Triticum aestivum
MRSARHLRLAVSALLLLLLLSAGVLAARAQHEIDDESEFSYVCGAKNGPENWGKIKEEWATCGTGQMQSPIDLSDRHASRAPNLGYLNHSYLPVEASIVNRGHDIMVMFNGDAGSLWINGTAYHLRQVHWHSPSEHRVNGRRYSLELHMVHLSAENKTAVIGILYKIGSRDHFLPSSRSYLKRMADTKEKEEMVGMVDPWEAPGRWRRAYYRYMGALPRATADERISWWVIKRPTTISAHQLRPVTDSVHAALEFNARPLKKATRTDISLLSPADHHARDYAAADQ

SEQ ID NO: 18969 - protein, 199 aa, Triticum aestivum
  unsure (1)..(199): unsure at all Xaa locations
MAKGWGYASHNGPDHWHELFPNAKGENQSPIELHTKDIRHDPSLQPWSVSYDGGSAKTILNNGKTCRVVFDDTYDRSMLRGGPLPGPYRLRQFHLHWGSSDDHGSEHTVDGVKYAAELHLVHWNPKYNTFKEALKQRDGIAVIGIFLKIGHENGEFQIFLDALDKIKTKGKEAPFTKFDPSCLFPACRDYWTYQGSFTX

SEQ ID NO: 18970 - protein, 253 aa, Triticum aestivum
  unsure (1)..(253): unsure at all Xaa locations
AGRAGNTHKRNSPAPRAEEPTPQDQERDNMRPSRDLRLAVFLLLFSASVLLPAARAQQETEEEEEFSYSLDAENGPAHWGDIKEEWSACGKGNMQSPIDLASPRVSLVRGLGYLNHSYSPANATIVNRGHDIMLKLEGDAGSVSIGGTPYFLRQLHWHSPTEHSVNGRRYDMELHMFHESAEGKAAVIGVFYEIGAHDAFLHKLEPYLEMIADRKDREEKMGMMDPRGARGKGSVYYRYVGSLXTPPWTEGVI

SEQ ID NO: 18971 - protein, 248 aa, Triticum aestivum
  unsure (1)..(248): unsure at all Xaa locations
YPQGXGXXXXYPKKKPRGLTSSTSGGADTQPSPARXRDNMRSSRDLRLAGLLLLFSASVLLPVARAQQETEEEEEFSYSLDAENGPAHWGDIKEEWSACGKGNMQSPIDLASPRVSLGRGLGYLNHSYHPANATIVNRGHDIMLKFEGDAGSVSIGGTPYFLRQLHWHSPTEHSVNGRRYDMELHMFHESAQGKAAVIGVFYEIGAHDAFLHKLEPYLEMIADRKDREEKMGMMDPRGARGKASGYYX

SEQ ID NO: 18972 - protein, 279 aa, Triticum aestivum
  unsure (1)..(279): unsure at all Xaa locations
MRSARDLRLAVSALLLLLLLSAGVLAARAQHEIDDESEFSYIRGSENGPENWGKIKEEWATCGTGQMQSPIDLSDRRAARAPNLGYLNHSYLPVEASIVNRGHDIMVKFNGDAGSLWINGTAYHLRQVHWHSPSEHRVNGRRYSLELHMVHLSAENKTAVIGILYKIGRRDHFLHELEXSYLRRIADTKEKEEMVXVVDPWDGEGRSKAYYXATLGLPSTKARXXKXXGVHLRTRHXKRXSQPXRAHQXXXNETVQXXXQQXXXXHXXXKTXXHXXXHX

SEQ ID NO: 18973 - protein, 149 aa, Triticum aestivum
  unsure (1)..(149): unsure at all Xaa locations
XKYAAELHLVHWNTRDGDFGKAVQQPDGLAVLGIFLKVGSAKPGLQKVVDVLDSIKTKGKSADFTNFDPRGLLPESLDYWTYPGSLTTPPLLECVTWIVLKEPISVSSEQVLKFRKLNFNGEGEPEELMVDNWRPAQPLKNRQIKASFK

SEQ ID NO: 18974 - protein, 201 aa, Triticum aestivum
  unsure (1)..(201): unsure at all Xaa locations
DQRPSQHASISGXLRLAVLLLFSASVLLPAARAQQETEEEEEFSYSLDAENGPANWGEIKEEWSACGKGNMQSPIDLASPRVSLVRGLGYLNHTYAPANATIVNRGHDIMLKFEGDAGSVSIGGTPYFLRQLHWHSPTEHSVNGRRYDMELHMFHESAQGKAAVIGVFYEIGAHDAFLHKLEPYLEMIADRKDMEEKMGMX

SEQ ID NO: 18975 - protein, 178 aa, Triticum aestivum
  unsure (1)..(178): unsure at all Xaa locations
MDARGGDASAIALLLCACFLTALACDSNGAKFAYSGPLGPDHWGGLDPNFTRCAMGTYQSPVDIKTSDVVYNPMLGPLHREYTAANATLVDNIFNIALRCEDAAGTVQIDGVKYKLDNIHWHSPSEHTINGERFAVEQHMVHFSDDGNISVVSILYRLGRPDPFLMQLQDKLSELXRX

SEQ ID NO: 18976 - protein, 178 aa, Triticum aestivum; identical to SEQ ID NO: 18975
  unsure (1)..(178): unsure at all Xaa locations

SEQ ID NO: 18977 - protein, 176 aa, Triticum aestivum
MYSWIPLLATFAPQALASCAYGTHLHRRADAIQAPKFGYSAANGPANWYNLDPEANKLCATGTHQSPINLSNGTHKVLSGSDLQIEIPDFHDGAEFENLGSTVEVVTEGMGGKLTLDNTVYHLKQFHFHLPSEHLDNGTSMAMEMHMVHQSEDKKLAVIGVLLEAGEFQSYSGSLT

SEQ ID NO: 18978 - protein, 272 aa, Triticum aestivum
  unsure (1)..(272): unsure at all Xaa locations
MASRFLSVAALLVAAAACVLANTQSPINIXXSSEAVDAELPALSFKHYRSSQSSYYLANTGHGCQITLKNWLYNPKVKGGPLPRTFVLEQVHFHWGASDGVGSEHYLNGNPSSMEVHLVHWNSKYASYSEASTKADGLAVIGFFIEGIDNYRNPDFQKLVNAIQIVAEESEKVEVNADLLAWVVPYLEASGYYTYDGSLTTSPYSENVLWIVYENPIPIGKAQIAPFRAIENHESEQLTTNFRQLQNADGVEVRYVXRNSTQSAPETVPDRQ

SEQ ID NO: 18979 - protein, 303 aa, Zea mays
SRPAGIPTSSASKKAKQSPHAERLQKGMGHLRGLTAARLLAAAFLLSVAAAARAQEETEHEEEFSYVVGDENGPEHWGSIKAEWGNCSAGRMQSPIDLSHERVSLVRSLGYLTHSYRPAEAAIANRGHDIMVRFKGDAGFLVINGTAYYLKQMHWHSPTEHTVDGRRYDMELHLVHESSANKAAVIGMLYEIGAEDPFLQALEPSIHRIADRQDREEAIGVVDPRRARGRASVYYRYVGSLTTPPCTEGVIWTVVKRVRTVSRHQLELLREAVHDGMEKNARPVQDVNDRDISIFRPKPHKHY

SEQ ID NO: 18980 - protein, 308 aa, Zea mays
LGTSRPAGNSSQTSSASKKAKQSPHAERLQKGMGHLRGLTAARLLAAAFLLSVAAAARAQEETEHEEEFSYVVGDENGPEHWGSIKAEWGNCSAGRMQSPIDLSHERVSLVRSLGYLTHSYRPAEAAIANRGHDIMVRFKGDAGFLVINGTAYYLKQMHWHSPTEHTVDGRRYDMELHLVHESSANKAAVIGMLYEIGAEDPFLQALEPSIHRIADRQDREEAIGVVDPRRARGRASVYYRYVGSLTTPPCTEGVIWTVVKRVRTVSRHQLELLREAVHDGMEKNARPVQDVNDRDISIFRPKPHKHY

SEQ ID NO: 18981 - protein, 283 aa, Zea mays
MGPARHLRGLTALLISAALLLSAAIPAARGQEETEDEEEFNYIPGDANGPENWGSIKPEWANCSAGRMQSPIDLARERVSLVPALGFLNHSYRPAQASIVNRGHDIMVRFNGDAGRLVINGTAYDLRQMHWHSPSEHTVDGRRYAMELHMVHESAAGKAAVIGILYEIGLADPFLLRLEPFIRRIADRKDREEPIGVVDPRLARGTASAYYRYMGSLTTPPCSEGVVWTIIKKVRSVSKRQLELLREAVHDGNENNARPLQDLNDRDISLFRPKLHKQELLSF

SEQ ID NO: 18982 - protein, 350 aa, Zea mays
  unsure (1)..(350): unsure at all Xaa locations
MFLHCVRVTASSVFRAQSFRCLFRMTTCRTANAAAVVRLLLLCSFCAAAAIACDPPNGAKFGYTGSVGPDHWGALSPSFRQCATGTKQSPIDISTAQAVSNPALQPLHRDYTVANATLVDNVVNVALRFDGDGGAGSVSVGGKLYTLKQVHWHSPSEHTVDGRRFPVELHMVHASDDGNVTVVAMLYRFGSRPDPLLWQIQDKLAALHAEGCRAEEGGGGQVPAGDVSLWSLRLHSHTYYRYVGSFTTPPCTEDVIWSVMAQVREMTVEQAAALMAPLEKAYRHNNRPTQPMNGRVVQVCHRFVMSKKTAPXPYVRAPCPGRMPGRPLLVAVDDASSILKLVSRSVGLIS

SEQ ID NO: 18983 - protein, 296 aa, Zea mays
  unsure (1)..(296): unsure at all Xaa locations
HQVRRTRGTNNLPVRVLIRARRQWCPPPXALIGLLVAAASLAVALSDGGGMAAPVYGYAAGSPNGPENWGKLSPAYKLCGEGKQQSPIDIVTKQAVPAATLDTLNRTYGATNATLINDGHDITLALEGKVGTVTVNGKAYSFEKLHWHSPSDHTINGQRFPLELHLVHRSADGALAVIGILYQLGAPDSFYYQLKRQLGEIAEEEESRVEAGLIHLRSLQKRTGSYFRYTGSLTVPPCTENVVWSVLGKVRQISQDQLQLLKAPLXXGSDARPTQPLNGRTVQFYNPPNSTISFQI

SEQ ID NO: 18984 - protein, 299 aa, Zea mays
  unsure (1)..(299): unsure at all Xaa locations
RPVAPRTQPPSSVXLLLCSCYAAAALACDPANGAKFGYSGSVGPDHWGALSPSFRQCATGTKQSPIDISTAQAVSNPALQPLHRDYTVANATLVDNVVNVALRFDGDGGGGGAGSVSVGGKLYRLKQVHWHSPSEHTVDGRRFPVELHMVHASDDGNVTVVAMLYRFGRPDPLLWQIQDKLAALHAEGCRAEKGAPVAAGDVSLWSLRLYSHTYYRYVGSFTTPPCTENVIWSVLAQVREEGPPLREGDDXWTAPPDGALERTGHTASTRNGCVVQVYRNGFINKKTAPXPCRAMRCPV

SEQ ID NO: 18985 - protein, 312 aa, Zea mays
  unsure (1)..(312): unsure at all Xaa locations
PLKGARINRGRPGTTTDTHIVYQCSSNNPCATKAIMVSSSRAVVVVVGLLVAASSLAVAASEPTYGYTAGSPDGPENWGKLSPAYKLCGQGKQQSPIDIVTKQGRPQRHLDTLNRTYAATAATLINDGHDITMTFEGKVGTVMVNGKAYSFEKMHWHSPSDHTINGQRFPLELHLVHRSADGALAVIGILYQLGAPDSFYYQLKRQLGEMAKDRCSFGEEESHEGVALIHLRSLQKRTGSYFRYTGSXLTVPPCTENVVWSVLGKVRQISKEQLQLLKAPLXXGNDARPTQPLNGRTVQFYNPPNSTVSFHM

SEQ ID NO: 18986 - protein, 279 aa, Zea mays
  unsure (1)..(279): unsure at all Xaa locations
MARRRDDVALAAITFAIVALCARYASAVGTTPQSSFSYREGDPTGPTKWATLQKDWDVCDSGTEQSPIDVAKVEVSEDLDXXLQQTYEPGDAVMHNRLHDFMLNWTGGNGGLTIEGKKYKLKQVHWHVPSEHTVNGTRFDAEMHMVHEDSTDAKSKAVVAVLFSAKAAAQALLREARWXKQNGTEEVKGPVVDPAAWIDKASGYYGYEGSLTTPPCTQGVLWTIMSKVADASKEEIHSIESVKEANARPAQKINSRVVRYYKAAGATEAPAPAPAPEAT

SEQ ID NO: 18987 - protein, 280 aa, Zea mays
  unsure (1)..(280): unsure at all Xaa locations
XVSSPSXAAVAAAVLLAAALLRVVPGARGQEETEHEEEFSYVPGDEHGPEHWGSIKAEWAACGAGRMQSPIDLSHERVSLVRSLGYLSHSYRPAEASIVNRGHDIMVRDFEGDAGSLVINGTAYYLRQLHWHSPTEHTVDGRRYDMELHLVHESAENKAAVIAVLYEIGGHDDALLRQLEPAIRRVADVRDREMRVGVVDPRRARGRASVYYRYVGSLTAPPCTEGVIWTIVKRVRSVSKHQLELLREAVHDVSLRISPHQLESASNMNVAGFGIFFFFS

SEQ ID NO: 18988 - protein, 297 aa, Zea mays
  unsure (1)..(297): unsure at all Xaa locations
MARRPDDLALAAITFAIVALCARYASAVGTXSVTSDYRAATPQSTFSYKEGDPTGPTKWATLQKDWDVCDSGTEQSPIDVAXXVEVSEDLDPLQQTYEPGDAVMHNRLHDFMLNWTGGNGGLTIEGKKYKLKQVHWHVPSEHTVNGTRFDAEMHMVHEDSTDAKSKAVVAVLFSAKAGKSSKLLRDVPQALLXERLAGKQNGTEEVNVVDPAAWIDKASGYYGYEGSLTTPPCTQGVLWTIMSKVADASKEEIHXXIESVKEANARPAQKINSRVVRYYKAAGATEAPAPAPAPEAT

SEQ ID NO: 18989 - protein, 230 aa, Zea mays
  unsure (1)..(230): unsure at all Xaa locations
RPGTTTDHIVYQCSSNNPCATKAIMVSSSRAVVVVVGLLVAASSLAADGGGPTYGYTGPDGPENWGKLSPAYKLCGQGKQQSPIDIVTKQAVPNANLDTLNRTYAATAATLINDGHDITMTFEGKVGTVMVNGKAYSFEKMHWHSPSDHTINGQRFPLELHLVHRSADGALAVIGILYQLGAPDSFYYQLKRQLGEMAKDRCSFGEEESHEGVALIPLRSLQKRTGSYFX

SEQ ID NO: 18990 - protein, 210 aa, Zea mays
  unsure (1)..(210): unsure at all Xaa locations
XCSAGRMQSPIDLSHERVSLVRSLGYLTHSYRPAEAAIANRGHDIMVRDATGDAGFLVINGTAYYLKQMHWHSPTEHTVDGRRYAMELHMVHESAAGKAAVIGILYEIGLVPDPFLLRLEPFIRRIADRKDREEPIGVVDPRLARGTASAYYRYMGSLTTPPCSEGVVWTIIKKVRSVSKRQLELLREAVHDVSPSSCRXILLFQKFDLQ

SEQ ID NO: 18991 - protein, 288 aa, Zea mays
  unsure (1)..(288): unsure at all Xaa locations
MRSFVLGTRSPCCCCLVCAWFXLDALRAGWLGSVDEDEEDFSYRRNAGNGPARWGLIRREWATCNVGLLQSPIGLSDTLAGLADRSGRLGRSYRPAAASLVNRGHSIMVRFNSNPGGVVIDGVAYRLRQMHWHAPSEHAINGRRYALELQMVHQSDTNRYAVVSQLYRISRRRPDRTIHRLERYIRRIARRKNHEELIDEEVDPRRPVSRSTAYYKYTGSFTTPPCTEGVTWVVAHQTRRVTRRQVRLLRNAVHDGTRSNRRPLQEANGRAITFYYTSPAHGRGANGD

SEQ ID NO: 18992 - protein, 191 aa, Zea mays
  unsure (1)..(191): unsure at all Xaa locations
XSGAGRMQSPIDLSHERVSLVRSLGYLSHSYRPAEASIVNRGHDIMVRFEGDAGSLVINGTAYYLRQLHWHSPTEHTVDGRRYDMELHLVHESAENKAAVIAVLYEIGGHDDALLRQLEPAIRRVADVRDREMRVGVVDPRRARGRASVYYRYVGSLTAPPCTEGVIWTIVKRVRSVSKHQLELLREAVHD

SEQ ID NO: 18993 - protein, 262 aa, Zea mays
  unsure (1)..(262): unsure at all Xaa locations
MRSFVLGTRSPCCCCLVCAWFXLDALRAGWLGSVDEDEEDFSYRRNAGNGPARWGLIRREWATCNVGLLQSPIGLSDTLAGLADRSGRLGRSYRPAAASLVNRGHSIMVRFNSNPGGVVIDGVAYRLRQMHWHAPSEHAINGRRYALELQMVHQSDTNRYAVVSQLXRIXRRRPDRTIHRLERYIRRIIARRKNHEELIDEEVDPRRPVSRSTAYYKYTGSFTTPPCTEGVTWVVAHQGTRSNRRQVSLCQKKGHQISRTFA

SEQ ID NO: 18994 - protein, 196 aa, Zea mays
  unsure (1)..(196): unsure at all Xaa locations
XNYTAEAVGSRQDTHXXTADEEDFSYRRNAGNGPARWGLIRREWATCNVGLLQSPIGLSDTLAGLADRSGRLGRSYRPAAASLVNRGHSIMVRFNSNPGGVVIDGVAYRLRQMHWHAPSEHAINGRRYALELQMVHQSDTNXLERYIRRIIARRKNHEELIDEEVDPRRPVSRSTAYYKYTGSFTTXPPCTEGVTX

SEQ ID NO: 18995 - protein, 252 aa, Neisseria gonorrhoeae
MPRFPRTLPRLTAVLLLACTAFSAAAHGNHTHWGYTGHDSPESWGNLSEEFRLCSTGKNQSPVNITETVSGKLPAIKVNYKPSMVDVENNGHTIQVNYPEGGNTLTVNGRTYTLKQFHFHVPSENQIKGRTFPMEAHFVHLDENKQPLVLAVLYEAGKTNGRLSSIWNVMPMTAGKVKLNQPFDASTLLPKRLKYYRFAGSLTTPPCTEGVSWLVLKTYDHIDQAQAEKFTRAVGSENNRPVQPLNARVVIE

SEQ ID NO: 18996 - protein, 222 aa, Neisseria gonorrhoeae
THWGYTGHDSPESWGNLSEEFRLCSTGKNQSPVNITETVSGKLPAIKVNYKPSMVDVENNGHTIQVNYPEGGNTLTVNGRTYTLKQFHFHVPSENQIKGRTFPMEAHFVHLDENKQPLVLAVLYEAGKTNGRLSSIWNVMPMTAGKVKLNQPFDASTLLPKRLKYYRFAGSLTTPPCTEGVSWLVLKTYDHIDQAQAEKFTRAVGSENNRPVQPLNARVVIE

SEQ ID NO: 18997 - protein, 221 aa, Neisseria gonorrhoeae
HWGYTGHDSPESWGNLSEEFRLCSTGKNQSPVNITETVSGKLPAIKVNYKPSMVDVENNGHTIQVNYPEGGNTLTVNGRTYTLKQFHFHVPSENQIKGRTFPMEAHFVHLDENKQPLVLAVLYEAGKTNGRLSSIWNVMPMTAGKVKLNQPFDASTLLPKRLKYYRFAGSLTTPPCTEGVSWLVLKTYDHIDQAQAEKFTRAVGSENNRPVQPLNARVVIE

SEQ ID NO: 18998 - protein, 223 aa, Neisseria gonorrhoeae
HTHWGYTGHDSPESWGNLSEEFRLCSTGKNQSPVNITETVSGKLPAIKVNYKPSMVDVENNGHTIQVNYPEGGNTLTVNGRTYTLKQFHFHVPSENQIKGRTFPMEAHFVHLDENKQPLVLAVLYEAGKTNGRLSSIWNVMPMTAGKVKLNQPFDASTLLPKRLKYYRFAGSLTTPPCTEGVSWLVLKTYDHIDQAQAEKFTRAVGSENNRPVQPLNARVVIE

SEQ ID NO: 18999 - protein, 203 aa, Neisseria gonorrhoeae
EFRLCSTGKNQSPVNITETVSGKLPAIKVNYKPSMVDVENNGHTIQVNYPEGGNTLTVNGRTYTLKQFHFHVPSENQIKGRTFPMEAHFVHLDENKQPLVLAVLYEAGKTNGRLSSIWNVMPMTAGKVKLNQPFDASTLLPKRLKYYRFAGSLTTPPCTEGVSWLVLKTYDHIDQAQAEKFTRAVGSENNRPVQPLNARVVIE

SEQ ID NO: 19000 - protein, 360 aa, Neurospora crassa
MARLFRSLMLAAAASVTPVWSLCSHNTFLHPREEGKTVEVKKFGYIGVTGPLFWSSLAPENTACSTGRRQSPIDMTGTSFNMVPSSEIQIDIPDFTEGTEFENLGTTIEVIAKGGSMTFGEKQYTLQQFHFHLPSEHLDNGTSRAMEMHMVWQTENQELAVIGTYIDVATEAGSARFIPPFAAPAPPTQPVPSGVPVHPHINKTAPDAPPARFRIRGSRSHREQEVIMPHPTNENETAPVRPVGPDTPVSGAPTVLLETIFSTVDAIRTPGTVTQTPPLILSEVVNIWKSGHFQGYMGSLTTPPCSEGVMWLVSTQTLRVAPLTFENVRSVIGFNSRLTQNAPGEDNILAKAGCAAAGTE

SEQ ID NO: 19001 - protein, 244 aa, Pectobacterium carotovorum
MKGKLSIALMLSVCFSASATDSVHWGYEGNGDPAHWGKLSPDFSLCETGKNQSPINIRQALNAQHDPLQLAFQSGTQQIINNGHTIQVNVSPGNTLLLDNETFTLQQFHFHAPSENEIDGKQFPLEGHFVYKNADGALTVIALMFQEGAANPQLATAWQQIPARVDQAEDVRTPVAIQALLPTSLNYYRFSGSLTTPPCSEGIRWLVLDHPVTASAEQISQFSSVMHHANNRPIQPLNGRIIIH

SEQ ID NO: 19002 - protein, 273 aa, Dioscorea alata
MSSSTLFHLFLLSSLLFSCFSNARLDGDDDFSYIEGSPNGPENWGNLRPEWKTCGYGMEQSPINLCDDRVIRTPTLGKLRTSYQAARATVKNNGHDIMVYFKSDAGTQFINQVEYQLKRIHFHSPSEHALSGERYDLEVQMVHESQDQRRAVIAIMFRFGRSDPFLPDLEDFISQISRRETNEVDAGVVDPRQLLQFDDPAYYRYMGSYTAPPCTEDITWTVIKKLGTVSPKQVLMLKQAVNENSMNNARPLQPLKFRTVFFYPRQKSDHVAI

SEQ ID NO: 19003 - protein, 273 aa, Dioscorea alata
MSSPTLLHLLLLSSLLFSCLPNAKPQQAEDEFSYIEGSPNGPENWGSLKPEWKTCGNGMEQSPIQLRDNRVILDQTLGKLRRNYRATDARLRNSGHDVLVEFKNNAGSLSINRVAYQLKRIHFHSPAEHEMNGERFDLEAQLVHESQDQKRAVVSILFRFGPADPFLSDLEDFIRQLSNSQKNEINAGVVDPNQLQIDDSAYYRYMGSYTAPPCTEDITWTVIKKLGTVSPKQVLMLKQAVNENSINNARPLQPTNFRSVFYFEQLKSKLGVI

SEQ ID NO: 19004 - protein, 272 aa, Dioscorea alata
MSSPTLLHLFLLSSLLFSCFSNARLDGEDEFSYIEGSPNGPENWGSLKPEWKTCGNGMEQSPIQLRDNGVIFDQTLGKLRRDYRATDARLRNSGHDVLVEFKNNAGSLSINRVAYQLKRIHFHSPAEHEMNGERFDLEAQLVHESQDQKRAAVSILFRFGPADPFLSDLEDFIRQLSNSQKNEINAGVVDPNQLQIDDSAYYRYMGSFTAPPCSEGISWTVMRKVATVSPRQVLLLKQTVNENAINNARPLQPTNFRSVFYFEQLKSKLGVI

SEQ ID NO: 19005 - protein, 246 aa, Klebsiella pneumoniae
MKTSLGKAALLALSMMPVTVFASHWSYEGEGSPEHWGALNEEYKTCQNGMNQSPINIDATFKTHLSPLDTHYIDGPITLINNGHTIQAALKTTTADTITIDGTPFILQQFHFHAPSENTVHGKHYAMEMHLVHKNAKGAVAVVAVMFEQGAENTELNKLWATMPEQAEQTAKIVTQMDLNALLPIDKTYWRFSGSLTTPPCSEGVTRIVLKHPLTLSSAQLAKFSHAMHHDNNRPVQPLNGRVVIE

SEQ ID NO: 19006 - protein, 261 aa, Anthopleura elegantissima
MAAPKWGYGPNNGPSKWAKDFPAAAGARQSPIDIKTHDAQHDSALKIKPLKIQYSQGNDFNVTNNGYSLVISRKTSEGTNLSGGPLEHNYRFEQFHFHWGKTSGSGSEHLLDGKAFPAELHLVHWNTDLFSSFGEAASSKNGLAVLGAFVQIGGESAGLKTITDLIPQVQNIGDKQDLKVPFNLSSLLPSNTNDYWTYSGSLTTPPCYESVSWFVFKEPIHATENQMQQFRSLKANDGGCIVDNYRPVMDGSGRNVRASFE

SEQ ID NO: 19007 - protein, 246 aa, Caenorhabditis elegans
MTGHWSYCDDDECGPNRWPTGQHQSPINIDLGEVERKDTHDGIKFVNYDHPIQGDIVNNGHSVQMTPELRSEHPEIYGGGLDQVYRLVQYHFHWGENDNEGSEHTLGGLRYPAELHLVHQGVEDPGKLAVVGVFLQLGKEGKALSNEERVLGKLCNPETVTRVENVRLSEKLPANKRSFWRYEGSLTTPPCSEIVTWTIFTEPVTVTHDQLELFRQVQDIEKRPIKKNYRPTQNLNDRKIVHIVAN

SEQ ID NO: 19008 - protein, 334 aa, Caenorhabditis elegans
MAQAIPFCNNKKKQLGTPRHLAPMPSHLLVLSLLVALLVVVSCGPGSDHGWGYDENNGPDTWQGKCQNHLKQSPIDIRAPDVDYALLHRMHFLNYDMDGKIELSNTGRTCDVCRRFESWQHKQPMIQGGGLKHRYKLAQFHLHWGQNDAVGSEHAMGSLHYPAELHLVHVREGLTLKEALSRPDGLAVVGVFLAKTNDPVANKFSPISERLHDLRHSGNKTELKNFRTKYVLPLDTEAFYRYEGSLTTPDCSEAVIWTVLAEPMAISSHQLHLLRQLHNKELVKSDKNYRPLQPLNGRRIQYRPSKLDRAMICSSFATTSVIITYVAILSAMLI

SEQ ID NO: 19009 - protein, 309 aa, Caenorhabditis elegans
MPSHLLVLSLLVALLVVVSCGPGSDHGWGYDENNGPDTWQGKCQNHLKQSPIDIRAPDVDYALLHRMHFLNYDMDGKIELSNTGRTFCRRFESWQHKQPMIQGGGLKHRYKLAQFHLHWGQNDAVGSEHAMGSLHYPAELHLVHVREGLTLKEALSRPDGLAVVGVFLAKTNDPVANKFSPISERLHDLRHSGNKTELKNFRTKYVLPLDTEAFYRYEGSLTTPDCSEAVIWTVLAEPMAISSHQLHLLRQLHNKELVKSDKNYRPLQPLNGRRIQYRPSKLDRAMICSSFATTSVIITYVAILSAMLI

SEQ ID NO: 19010 - protein, 259 aa, Caenorhabditis elegans
MPRRKERYSKTQRSSRERLKLTTFLAAAQRQSPIDIVPQHVCCDTDVCKADALNIDYKSGDCCDVLVSEGGFLVNVKRNCGTFLTANHLPSSKFALAQFHAHWGSNSKEGSEHFLDGKQLSGEVHFVFWNTSYESFNVALSKPDGLAVVGVFLKEGKYNDNYHGLIDTVRKATGNATPIAMPKDFHIEHLLPSPDKREFVTYLGSLTTPPYNECVIWTLFTEPVEVSFGQLNVLRNIIPANHRACQDRCDREIRSSFNF

SEQ ID NO: 19011 - protein, 235 aa, Caenorhabditis elegans
MAAAQRQSPIDIVPQHVCCDTDVCKADALNIDYKSGDCCDVLVSEGGFLVNVKRNCGTFLTANHLPSSKFALAQFHAHWGSNSKEGSEHFLDGKQLSGEVHFVFWNTSYESFNVALSKPDGLAVVGVFLKEGKYNDNYHGLIDTVRKATGNATPIAMPKDFHIEHLLPSPDKREFVTYLGSLTTPPYNECVIWTLFTEPVEVSFGQLNVLRNIIPANHRACQDRCDREIRSSFNF

SEQ ID NO: 19012 - protein, 280 aa, Caenorhabditis elegans
MAPPQVRRSARLSKRCQEEKVKLQKKNVGFKAKSKSAKKSNKKFKKAAAQRQSPIDIVPQHVCCDTDVCKADALNIDYKSGDCCDVLVSEGGFLVNVKRNCGTFLTANHLPSSKFALAQFHAHWGSNSKEGSEHFLDGKQLSGEVHFVFWNTSYESFNVALSKPDGLAVVGVFLKEGKYNDNYHGLIDTVRKATGNATPIAMPKDFHIEHLLPSPDKREFVTYLGSLTTPPYNECVIWTLFTEPVEVSFGQLNVLRNIIPANHRACQDRCDREIRSSFNF

SEQ ID NO: 19013 - protein, 243 aa, Riftia pachyptila
MAAWDYEANGPATWAKSFPLAAGKKQSPIDIDPASVSKKSTSALVASYNPAASNTLTNTGLSFQVSVDGTLSGGPLGNEYKAASFHFHWSKTSAEGSEHTVAGKAYAAEAHIVHYNAAKYASFQDAVKADDGLAVLATFIQPGATNAGVQKIIDLLPSVPTKGDTATIPGGFDVACLLPGDQSKYWYYPGSLTTPPCFESVTWIVYKDPIQLCENQLAALRKITGCNFRPTLGLCGRQVSSSF

SEQ ID NO: 19014 - protein, 239 aa, Vibrio cholerae
MKKTTWVLAMVASMSFGVQASEWGYEGEHAPEHWGKVAPLCAEGKNQSPIDVAQSVEADLQPFTLNYQGQVVGLLNNGHTLQAIVRGNNPLQIDGKTFQLKQFHFHTPSENLLKGKQFPLEAHFVHADEQGNLAVVAVMYQVGSENPLLKVLTADMPTKGNSTQLTQGIPLADWIPESKHYYRFNGSLTTPPCSEGVRWIVLKEPAHLSNQQEQQLSAVMGHNNRPVQPHNARLVLQAD

SEQ ID NO: 19015 - protein, 298 aa, Aedes aegypti
MIALFVATLLPSTIRADEWHYPTPAPNGVINEPERWGGQCETGRRQSPIDLTYQAAVKGDFAPFLFSNYMNPIRNAQLTNTGHSIQIDSTDPSVTLYGGGLPGKFVLDQMHFHWGSEHTIAGVRYGQELHMVHHDSRYNSLTEAGAVKNAVAVIGVLFHVSNQDNTHMDVVLETSQDIRDAAGKSAPLKGKLSPHNPLPKNRTSYFRYEGSLTTPTCAESVIWTVFTESLPVSLDQVELFKTIHDPSGHELVINFRSLQPLNARALVYHTDMDYSGSGAIPKLSLTLIVAAIAALLAK

SEQ ID NO: 19016 - protein, 270 aa, Drosophila melanogaster
MSHHWGYTEENGPAHWAKEYPQASGHRQSPVDITPSSAKKGSELNVAPLKWKYVPEHTKSLVNPGYCWRVDVNGADSELTGGPLGDQIFKLEQFHCHWGCTDSKGSEHTVDGVSYSGELHLVHWNTTKYKSFGEAAAAPDGLAVLGVFLKAGNHHAELDKVTSLLQFVLHKGDRVTLPQGCDPGQLLPDVHTYWTYEGSLTTPPCSESVIWIVFKTPIEVSDDQLNAMRNLNAYDVKEECPCNEFNGKVINNFRPPLPLGKRELREIGGH

SEQ ID NO: 19017 - protein, 335 aa, Drosophila melanogaster
MRRCRNTPFAIVIAPILICASLVLAQDFGYEGRHGPEHWSEDYARCSGKHQSPINIDQVSAVEKKFPKLEFFNFKVVPDNLQMTNNGHTVLVKMSYNEDEIPSVRGGPLAEKTPLGYQFEQFHFHWGENDTIGSEDLINNRAYPAELHVVLRNLEYPDFASALDKDHGIAVMAFFFQVGDKSTGGYEGFTNLLSQIDRKGKSVNMTNPLPLGEYISKSVESYFSYTGSLTTPPCSEEVTWIDFTTPIDITEKQLNAFRLLTANDDHLKNNFRPIQPLNDRTLYKNYIEIPIHNMGSIPLVDAENAAGKWRAQAAAVLLPLVVLAALSRTSIFRGF

SEQ ID NO: 19018 - protein, 311 aa, Drosophila melanogaster
MKLTAFLEASFLLICWSQAVSSHVFGYSEPNQRRWARHHGHCAGKTQSPIAITTSRTTAIHMPAVDMIGYHNLLPYPLKMINNGHTVSITIPKVNVTEVGEDFLPYIRGAKLPGEFEVEGLHFHWGDKNNRGSEHVINDIRYTMEMHIVHRNKKYATIGEALNHPDGAAVLGFFFNLDEDEGAGLVTINRHLHLIADANQEATLNVTFSLSSLIAGVDVDKFYTYKGSLTTPPCSEAVTWILFPDPIPISPKQISRFRQLSDTQDGALVDNFRTLQPVGNRRIFARTGHVRHTSIATLKHEGEYLKYDWFY

SEQ ID NO: 19019 - protein, 304 aa, Drosophila melanogaster
MHLIALSLIVCCSVSFSWANEWGYPDLDNNQDEPFPKWGGLCDSGKKQSPINLHVKGALKGEFDALKFENYDEHQKNLRMVNNGHSIQLSGFDHELTLSGGALLQDFVVEQIHMHWWSEHTINDIRYPLEVHIVHRNTIYPNMTMAANFKDGIVVIGVLYHVSNTPNEAIGSIIKSLGAVKSYDSMNKPVLVADSLAVDDLVPSVENYFTYAGSLTTPTCAEAVTWIVLTETFPVTLDQVNEFKEIEYDEGKQLHNNYRELQSENNRAVVLVEQPEQRSGSAGLTASVSLGLMTLILAGQKFLL

SEQ ID NO: 19020 - protein, 327 aa, Drosophila melanogaster
MELLQALCCTLLLLLARMQVLLAVSWEDWWTYDGISGPAFWGLINPEWSLCNKGRRQSPVNLEPQRLLFDPNLRPMHIDKHRISGLITNTGHSVIFTAGNDTVANYDGMQTPVNISGGPLSYRYRFHEIHMHYGLNDQFGSEHSVEGYTFPAEIQIFGYNSQLYANFSDALNRAQGIVGVSILLQLGDLSNAELRMLTDQLERIRYGGDEAFVKRLSIRGLLPDTDHYMTYDGSTTAPACHETVTWVVLNKPIYITKQQLHALRRLMQGSPDHPKAPLGNNYRPPQPLLHRPIRTNIDFKTTKSNGKAACPTMYREVYYKATSWKQN

SEQ ID NO: 19021 - protein, 279 aa, Drosophila melanogaster
MFLVARSFAPINSGTRSHFGFNYDKQGRDWNVKCGERQSPIALWSCNSITCNVPKLKFLNYHKSLCDPLSVINNGLTVLMRIPKTVDGSRPSLCISSEGQQVFEADQLHFHWGSALSKGSEHCLDGNYYDGEVHIVHKNASYKSNKEAGLQPNGFAVLALFIRNLEDPNIETPAMNMICKQVSSITKLDDSCPLEDSMALQDLFASIDSQKYFTYQGSLTTPPCAEAVIWFVFPTPLDVPKELWKHFWQLRDSRDQRVLNTYRELQDGHDRPVYRSKAK

SEQ ID NO: 19022 - protein, 279 aa, Drosophila melanogaster
MFLVARSFAPINSGTRSHFGFNYDKQGRDWNVKCGERQSPIALWSCNAITCNVPKLKFLNYHKSLCDPLSVINNGLTVLMRIPKTVDGSRPSLCISTEGQQVFEADQLHFHWGSALSKGSEHCLDGNYYDGEVHIVHKNASYKSNKEAGLQPNGFAVLALFIRNLEDPNIETPAMNMICKQVSSITKLDDSCPLEDSMALQDLFASIDSQKYFTYQGSLTTPPCAEAVIWFVFPTPLDVPKELWKHFWQLRDSRDQRVLNTYRELQDGHDRPVYRSKAK

SEQ ID NO: 19023 - protein, 235 aa, Drosophila melanogaster
MRQSLIVPLPRIVFGNYDVKLRGPLTLLNNGHTETANGNKPFITGGLLKGRFVAEAFHFHWGSPSSRGSEHSINQQRFDVEMHIVHRNEKYGDIDEAKNKKDGIAVIGVMLKINPNRIFPGLSKVMSALPRVTKYNAKTTIPGGLSLGQMLGNVNPRDFFTYRGSLTTPLCEQSVTWTVFSQVLPVPYSSVSKFWKLRDSEGHRLINNFRDIQPRNGRPVFYRIGKDLSGAYLGK

SEQ ID NO: 19024 - protein, 527 aa, Drosophila melanogaster
MFDTALGTVLSVMVQLIILVFGQILGQVVQHPLITTGLCLLGAFAYHADQETLKEIYQRVLLLIRTPLQFGNTSCSRNSAPVYGYDMQHGPHTWLPKSRSSSSSVEEATFFQSPVNIDESQIQRMAIRELLSWNHYDDLPASITLENTGQTLILRAQFHGNAPTISGADLLASYTFLELRFHWGWCNSEGSEHTINHRKFPLEMQVMHKTGSGIPRTCTSSYDLLMIGYVFELSAHNPFLDPLVQNLRLVQKPGKRVQISPFPISYLMYQFRSGFYSYGGSLTHPPCYQGTEWFIFPESLAISDFQLRHFRLLLGPDGISPIARNSRPVQHMGNRVVSLNCFCPYDAAQLSRMHVELCQAQAQEEHEEERIEQEQQLELERELERQRESDLKAQQEQASEAAIAASEDEGQLIETIDTTTIITSSSNTSICMTTLMRKDSPRQLEQPSQMPMMAPNQGNFCNPGIVIFSGVNESKSKCGIHQDTPEELMIHNRGTGRNMGVQNGCKADAFCGVGDGVNIGIRMELVE

SEQ ID NO: 19025 - protein, 225 aa, Drosophila melanogaster
MHLIALSLIVCCSVSFSWANEWGYPDLDNNQDEPFPKWGGLCDSGKKQSPINLHVKGALKGEFDALKFENYDEHQKNLRMVNNGHSIQLSGFDHELTLSGGALLQDFVVEQIHMHWWSEHTINDIRYPLEVHIVHRNNIYPNMTMAANFKDGIVVIGVLYHVSNTPNEAIGSIIKSLGAVKSYDSMNKPVLVADSLAVDDLVPSVENYFTYAGSLTTPTCAEAVT

SEQ ID NO: 19026 - protein, 252 aa, Pasteurella multocida
MKKSNLFVLTLGALALTACTSPLKKEETHTHWGYTGHESPEHWAELSPKFRICGEGKNQTPIDIKHTIDGKLAPIKLDYRPSNVEIVNNGHTIQVDFKEASNRMQLNGKTFTLKQFHFHVPSENLIRGKSFPMEAHFVHADNEGNLAVLGVLYVLSSENQRLAPIWQNFPQKAGEKYTLSTAFDPATLIPKKRDYYRFSGSLTTPPCSEGVNWLVLKHYDNISQSQVEAFATLMKGHNNRPVQPINARVIVE

SEQ ID NO: 19027 - protein, 200 aa, Galeocerdo cuvier
  unsure (1)..(200): unsure at all Xaa locations
EGTRQSPINQEAKFDSNLKPLDLXYDPAYVLTGGPLCGRQFHFHWGASDTHGSEHILDGKTYAAELHLVHEKYSDFAEALKAPDGLAVXGVMLXVCDSNPALKIVCSLESLKAKGDEFKDFSPCSLLPSCLQYWTYLGSLTTPPLESVIWLVIKEPISLGPDQLAKFRGRGLEFGPNEPMQNNYRPPQPLKGREIRKNFE

SEQ ID NO: 19028 - protein, 260 aa, Danio rerio
MAHAWGYGPADGPESWAESFPIANGPRQSPIDIVPTQAQHDPSLKHLKLKYDPATTKSILNNGHSFQVDFVDDDNSSTLAGGPITGIYRLRQFHFHWGSSDDKGSEHTIAGTKFPCELHLVHWNTKYPNFGEAASKPDGLAVVGVFLKIGAANPRLQKVLDALDDIKSKGRQTTFANFDPKTLLPASLDYWTYEGSLTTPPLLESVTWIVLKEPISVSPAQMAKFRSLLFSSEGETPCCMVDNYRPPQPLKGRKVRASFK

SEQ ID NO: 19029 - protein, 306 aa, Danio rerio
LPLSVYSTRQHKHTRTHISPHTPPHTPHLRSFDISHAAQRRGAMTGHHWGYGEDNGPSAWHKDYPIAEGNRQSPIDIVPSEAVFDAKLSPIALSYNNCTSLSISNNGHSVVVEFVDTDERSVITGGPLENMYRLKQFHFHWGSKGCCGSEHTVAGKTFVSELHLVHWNANKYKSFSEAAVAPDGLAVLGIFLETGDEHRALHQITDALYMVRFKGSLAEFKGFNPKCLLPNSLEYWTYPGSLTTPPLYESVTWIVLKEPIYVSEKQMGKFRTLLFNGEEEEDRNRMENNYRPPQPLKGRMVRASFK

SEQ ID NO: 19030 - protein, 260 aa, Xenopus laevis
MAHAWGYGPDNGPSTWHHAFPLAKGEYQSPINIVTAEAKHDHHLKPISIKYDPSTTKVILNNGHAFNVEFDDSENKSVLTGGALTEPYRLKQFHFHWGSCDGHGSEHTVNGVKYEAELHLVHWNTKYGSMAEAVKHCDGLAVVGVFLKVGEAHPGLQKVLDTLNQIPNKGNEAAFNDFDPSVLLPKSLDFWTYKGSLTTPPLLQCVMWHVLKEPITVSNQQLTQLRSLFFNAEGDTPCSMVDNFRPTQPLKGRHIRASFQ

SEQ ID NO: 19031 - protein, 260 aa, Xenopus laevis
MAHAWGYGPDNGPSTWHHAFPLANGEYQSPINIVPAEAKYDQHLKPISIKYDPSTAKVILNNGHAFNVEFDDSENRSVLSGGALSEPYRLKQFHFHWGSCEGHGSEHTVNGVKCEAELHLVHWNTKYGSMAEAVKHCDGLAVVGVFLKVGEAHPGLQKVLDALKLIPNKGNEAHFSDFDPSVLLPNSLDFWTYKGSLTTPPLLQCVLWHVLKEPIAVSKQQLSQLRSLFFNAEGDTPCSMVDNFRPAQPLKGRDVRASFQ

SEQ ID NO: 19032 - protein, 2271 aa, Xenopus laevis
MVNPRCFLVCLQLFSVWQVGLPFSYYRPQRKLTEEIDWSYTETLNQENWAKKYPACNGAKQSPINIDEDLTQLNTNLKKLHFEGWHEESSAYTLIRNTGKTVEINLTDDYFLSGGALDSQYKASWITFHWGKCNATSDGSEHSLEGQKFPLEMQIFCFNHKEFENIDEAISANGKIKALSILFKVGQEDNVHYNTIIDGVNNVHRFGRKVALEPFILSDLLPDYTDKYYTYNGSLTTPPCSESVEWIVFKDTVTISESQLEMFCEILTMQQSGYVMVMDYLQNNYRHQQYTFSGQVFSSYTGTEEIPEPVCSSEPEDVRADSKNNTSLLITWRRPRVVYDAVIERYLVFYQRLEGEDQTKHEYLTDGYQDLGAIIYNVLPNTSYVLQVVAICTNGLYGKRSDQVIVDMTLDPQGTDPFTDFTETEEDIEDSEEVEEEKENESTRISLSTVSNTNQIQAQGGQATTSSYSEGNAYIITEKTADDKIQKHRDGLKAYLYPTLQTTTKTMRDTTLDYSGKSMKDAVMPQSVSEATTNLSNDFKSRVEIWMLNISDSTKGITEEDEQTSADSELHATTTSWKRRILIPTRNPKPVSDHSTVSTAPTVSATYFSEITSQGNTESSDLPYSDINDAFTSTSEDISKVKAPVTEFELYNIPTSTSKSNVPVVTEEEHTTNSINLHMDELLSTSFSRQTTVLQATASSLEDVNKATLPGQEMPLVSNITFSTPKVLLESVSASFGHHDSELSVTEVLSQATLSQTTQPVSNGEIPLQPSFTSEVFPLVTPPRSDTKLLKATPATSDIDLILHATPVFPSVDVSVEPSLSSYDGTPLLAFSSASSASKVSRHLYTVSELFTQVPTDTLSLHASLVLTESNALLQPSHTYYSDVKPHQTIYGASETLTFDHGGHTFKKSNKLISHLESPNTELNMHALSTVSELTSPLSSDMASSESFVHDTVAIFHQGSIIKNLGTEVFYRPSTVSVQDISLQPTQSILSNEDSSDTFSGSGFFNYGIDDLKEQEMVSSVSAFGDVFKTNEFIENKTVNKTDYTGESNTGLQTVSAYSPVTLHAGNEEVAGLSSSDDRDYIFKVEQSSQETPPLSFLTPRSIDADINAASENLLPVEQINTLPPTSGNISLKAMLPEASAVSVSSHMSLSPTQEFFYEVSDKPVSDFFFQNVLQSTDDVSISSNVTYAEFLNDASNSYNISSNIDSVLLPTPSDTTIQSLLHSTYVTPVGNALSPDFVESTVLQQSVSALHSHYVAPHLSATVNTGTSYANDKASQTLDIEPTFLHAVSTPVLPTNTLTQDTTLNNHLPSYPYATHGIPAASRENKDVSYSLSTDVTVNYLLLPTVYVSVTAGFPNSESPSTLTMLTATSQTSSDILPTVSSNTKMGPSVVDDGFIIASTYSTSHTEAQENVIADNSVHRTILKNKTLSEYSEQSEEGSAFSTAAVDSNIDSDMERGSFLSTTMPTSSTGQKHIQFTAPETRVQTRNTLLENTSESSSWAVLTDEESGSGPSTSDSLCDNETSTDFSFSDINDRDKNYEVAIQPGKADLTPGSEITSPPSVTSERSPVVNVSEADVSNQEASNSSHESRVGLAEGLESEKTVIPLVVVSSLTFICLVVLVGILIYWRKCFQTAHFYLEDNTSSRVIAGPPIPVFPVADDVEAIPLKQFHKHVEDLHSRNGFTDEFEEVQNCTTDLGITYENSNHPDNKNKNRYINIVAYDHSRVKLSQLAEKDGKATDYINANFVDGYNKQKAYIAAQGPLKSTAEDFWRMIWEHNVEVIVMITNLVEKGRRKCDQYWPSDGSEEYGAFLVTQKTIKVLAYYTVRTFTVRNNKIKKGSQKGRQNERAVVQYHYTQWPDMGVPEYTLPVLTFVRKASATKLNGPVVVHCSAGVGRTGTYIVLDSMLQQIQHEGTVNIFGFLKHIRSQRNYLVQTEEQYIFIHDALVEAILSRETEVPETHIHGYVNTLLTMGPSGKSRLETQFKLLSEPNILQCDYSTALKPQNRDKNRTSSVIPVERSRVGLSSLAGEGTDYINASYVMGYHESNQFIITQHPLLHTIKDFWRMMWDHNSQLIVMLPDMQNMAEDEFVYWPNKDQPIVCDTFTVTLVREDHVCLSNEENLIIQDFILEATQDDYVLEVRHFQCPKWPNPDSPISKTFELINLIKEEAANKDGTIIVHDEYGGVTAGTFCALYSLMHQLEQENSLDVYQVVKMINLMRPGIFTDIEQYQFLYKAMLSLVSTRQEEDSMVFMDTNGAPLPDGSTAESLESLV

SEQ ID NO: 19033 - protein, 1576 aa, Xenopus laevis
MVNPRCFLVCLQLFSVWQVGLPFSYYRPQRKLTEEIDWSYTETLNQENWAKKYPACNGAKQSPINIDEDLTQLNTNLKKLHFEGWHEESSAYTLIRNTGKTVEINLTDDYFLSGGALDSQYKASWITFHWGKCNATSDGSEHSLEGQKFPLEMQIFCFNHKEFENIDEAISANGKIKALSILFKVGQEDNVHYNTIIDGVNNVHRFGRKVALEPFILSDLLPDYTDKYYTYNGSLTTPPCSESVEWIVFKDTVTISESQLEMFCEILTMQQSGYVMVMDYLQNNYRHQQYTFSGQVFSSYTGTEEIPEPVCSSEPEDVRADSKNNTSLLITWRRPRVVYDAVIERYLVFYQRLEGEDQTKHEYLTDGYQDLGAIIYNVLPNTSYVLQVLAICTNGLYGKRSDQVIVDMTLDPQGTDPFTDFTETEEDIEDSEEVEEEKENESTRISLSTVSNTNQIQAQGGQATTSSYSEGNAYIITEKTADDKIQKHRDGLKAYLYPTLQTTTKTMRDTTLDYSGKSMKDGVMPQSVSEATTNLSNDFKSRVEIWMLNISDSTKGITKEDEQTSADSELHATTTSWKRRILIPTRNPKPVSDHSTVSTAPTVSATYFSEITSQGNTESSDLPYSDINDAFTSTSEDISKVKAPVTEFELYNIPTSTSKSNVPVVTEEEHTTNSINLHMDELLSTSFSRQTTVLQATASSLEDVNKATLPGQEMPLVSNITFSTPKVLLESVSASFGHHDSELSVTEVLSQATLSQTTQPVSNGEIPLQPSFTSEVFPLVTPPRSDTKLLKATPATSDIDLILHATPVFPSVDVSVEPSLSSYDGTPLLAFSSASSASKVSRHLYTVSELFTQVPTDTLSLHASLVLTESNALLQPSHTYYSDVKPHQTIYGASETLTFDHGGHTFKKSNKLISHLESPNTELNMHALSTVSELTSPLSSDMASSESFVHDTVAIFHQGSIIKNLGTEVFYRPSTVSVQDISLQPTQSILSNEDSSDTFSGSGFFNYGIDDLKEQEMVSSVSAFGDVFKTNEFIENKTVNKTDYTGESNTGLQTVSAYSPVTLHAGNEEVAGLSSSDDRDYIFKVEQSSQETPPLSFLTPRSIDADINAASENLLPVEQINTLPPTSGNISLKAMLPEASAVSVSSHMSLSPTQEFFYEVSDKPVSDFFFQNVLQSTDDVSISSNVTYAEFLNDASNSYNISSNIDSVLLPTPSDTTIQSLLHSTYVTPVGNALSPDFVESTVLQQSVSALHSHYVAPHLSATVNTGTSYANDKASQTLDIEPTFLHAVSTPVLPTNTLTQDTTLNNHLPSYPYATHGIPAASRENKDVSYSLSTDVTVNYLLLPTVYVSVTAGFPNSESPSTLTMLTATSQTSSDILPTVSSNTKMGPSVVDDGFIIASTYSTSHTEAQENVIADNSVHRTILKNKTLSEYSEQSEEGSAFSTAAVDSNIDSDMERGSFLSTTMPTSSTGQKHIQFTAPETRVQTRNTLLENTSESSSWAVLTDEESGSGPSTSDSLCDNETSTDFSFSDINDRDKNYEVAIQPGKADLTPGSEITSPPSVTSERSPVVNVSEAG

SEQ ID NO: 19034 - protein, 202 aa, Helicobacter pylori 26695
MKKTFLIALALTASLVGAENTKWDYKNKENGPHRWDKLHKDFEVCKSGKSQSPINIEHYYHTQDKADLQFKYAASKPKAVFFTHHTLKASFEPTNHINYRGHDYVLDNVHFHAPMEFLINNKTRPLSAHFVHKDAKGRLLVLAIGFEEGKENPNLDPILEGIQKKQNFKEVALDAFLPKSINYYHLTALSPLLLAQRGWHGL

SEQ ID NO: 19035 - protein, 247 aa, Helicobacter pylori J99
MKKTFLIALALTASLIGAENTKWDYKNKENGPHRWDKLHKDFEVCKSGKSQSPINIEHYYHTQDKADLQFKYAASKPKAVFFTHHTLKASFEPTNHINYRGHDYVLDNVHFHAPMEFLINNKTRPLSAHFVHKDAKGRLLVLAIGFEEGKENPNLDPILEGIQKKQNLKEVALDAFLPKSINYYHFNGSLTAPPCTEGVAWFVIEEPLEVSAKQLAEIKKRMKNSPNQRPVQPDYNTVIIKSSAETR

SEQ ID NO: 19036 - protein, 275 aa, Bacillus halodurans
MKKYLWGKTCLVVSLSVMVTACSSAPSTEPVDEPSETHEETSGGAHEVHWSYTGDTGPEHWAELDSEYGACAQGEEQSPINLDKAEAVDTDTEIQVHYEPSAFTIKNNGHTIQAETTSDGNTIEIDGKEYTLVQFHFHIPSEHEMEGKNLDMELHFVHKNENDELAVLGVLMKAGEENEELAKLWSKLPAEETEENISLDESIDLNALLPESKEGFHYNGSLTTPPCSEGVKWTVLSEPITVSQEQIDAFAEIFPDNHRPVQPWNDRDVYDVITE

SEQ ID NO: 19037 - protein, 260 aa, Gallus gallus
MSHHWGYDSHNGPAHWHEHFPIANGERQSPIAISTKAARYDPALKPLSFSYDAGTAKAIVNNGHSFNVEFDDSSDKSVLQGGALDGVYRLVQFHIHWGSCEGQGSEHTVDGVKYDAELHIVHWNVKYGKFAEALKHPDGLAVVGIFMKVGNAKPEIQKVVDALNSIQTKGKQASFTNFDPTGLLPPCRDYWTYPGSLTTPPLHECVIWHVLKEPITVSSEQMCKLRGLCFSAENEPVCRMVDNWRPCQPLKSREVRASFQ

SEQ ID NO: 19038 - protein, 260 aa, Gallus gallus
MSHHWGYDSHNGPAHWHEHFPIANGERQSPIAISTKAARYDPALKPLSFSYDAGTAKAIVNNGHSFNVEFDDSSDKSVLQGGALDGVYRLVQFHIHWGSCEGQGSEHTVDGVKYDAELHIVHWNVKYGKFAEALKHPDGLAVVGIFMKVGNAKPEIQKVVDALNSIQTKGKQASFTNFDPTGLLPPCRDYWTYPGSLTTPPLHECVIWHVLKEPITVSSEQMCKLRGLCFSAENEPVCRMVDNWRPCQPVKSREVRASFQ

SEQ ID NO: 19039 - protein, 256 aa, Gallus gallus
LGYDSHNGPAHWHEHFPIANGERQSPIAISTKAARYDPALKPLSFSYDAGTAKAIVNNGHSFNVEFDDSSDKSVLQGGALDGVYRLVQFHIHWGSCEGQGSEHTVDGVKYDAELHIVHWNVKYGKFAEALKHPDGLAVVGIFMKVGNAKPEIQKVVDALNSIQTKGKQASFTNFDPTGLLPPCRDYWTYPGSLTTPPLHECVIWHVLKEPITVSSEQMCKLRGLCFSAENEPVCRMVDNWRPCQPLKSREVRASFQ

SEQ ID NO: 19040 - protein, 252 aa, Gallus gallus
SHNGPAHWHEHFPIANGERQSPIAISTKAARYDPALKPLSFSYDAGTAKAIVNNGHSFNVEFDDSSDKSVLQGGALDGVYRLVQFHIHWGSCEGQGSEHTVDGVKYDAELHIVHWNVKYGKFAEALKHPDGLAVVGIFMKVGNAKPEIQKVVDALNSIQTKGKQASFTNFDPTGLLPPCRDYWTYPGSLTTPPLHECVIWHVLKEPITVSSEQMCKLRGLCFSAENEPVCRMVDNWRPCQPVKSREVRASFQ

SEQ ID NO: 19041 - protein, 1422 aa, Gallus gallus
MRRLLQPCWWIFFLKITSSVLHDVVCFPALTEGYVGSLHESRHGSSVQIRRRKASGDPYWGYSGTYGPEHWVTSSEKCGGSHQSPIDIVDHQAHVLYEYQELQLDGFDNESSNKTWMKNTGKTVAILLKDDYFVSGAGLPGRFKAEKVEFHWGQSNGSAGSEHSINGKRFPVEMQIYFYNPDDFDSFGTAVLENREVGAMAVFFQVSQRDNSALDPIIRGLKGVVHHEKETFLDPFVLRDLLPTSLGSYYRYTGSLTTPPCSEIVEWIIFRKPVPISYHQLEAFYSIFTTEQQDHVKSVEYLRNNFRPQQRLNNRKVSKSAVKDAWSQDMTDILENPLGTEASKACSTPPVNMKVQPVNRTALLVTWNQPETIYHPPIMNYMISYSWTKNEDEKEKTFTKDSDKDLKAIISHVSPDILYLFRVQAVCRNEMRSDFSQTMLFQANTTRIFEGTRIVKTGVPTASPASSADMAPISSGSSTWTSSGLPFSFVSMATGMGPSSSGSQATVASVVTSTLLAGLGFSGSSISSFPSSVWPTRLPTAAAPTKQAGRPVVATTEPAAASPGPERDSALTKDGEGAEEGEKDEKSESEDGEREHEEEDEKEAEKKEKSRATAAAEARNSTEPSVATASPNWTAEEEGNKTVSGEEPNQNVVPKAGRPEEESFTDADTQPQPLPSTQVPPAFTDELYLEKIPRRPETTRKPLPKDNRFLEEYPSDNKFITINPADKNSSSMATRPSPGKMEWIIPLIVVSALTFVCLILLIAVLVYWRKCFQTAHFYVEDSSSPRVVPNESIPIIPIPDDMEAIPVKQFVKHISELYSNNQHGFSEDFEEVQRCTADMNITAEHSNHPDNKHKNRYINILAYDHSRVKLRPLPGKDSKHSDYINANYVSGYNKAKAYIATQGPLKSTFEDFWRMIWAQHTGIIVMITNLVEKGRRKCDQYWPTENSEEYGNIIVTLKSTNIHACYTVRPLHGQEHKDEKGSERKPKGRQNERTVIQYHYTQWPDMGVPEYALPVLTFVRRSSAARTPHMGPVVVHCSAGVGRTGTYIVIDSMLQQIKDKSTVNVLGFLKHIRTQRNYLVQTEEQYIFIHDALLEAILGKETEVSANQLHSYVNSILIPGIGGKTRLEKQFKLVTQCNAKYVECFSAQKDCNKEKNRNSSVVPSERARVGLAPLPGMKGTDYINASYIMGYYRSNENVITQHPLPHTTKDFWRMIWDHNAQIIVMLPDNQSLAEDEFVYWPSREESMNCEAFTVTLISKDRLCLSNEEQIIIHDFILEATQDDYVLEVRHFQCPKWPNPDAPISSTFELINVIKEEALTRDGPTIVHDEYGAVSAGTLCALTTLSQQLENENAVDVFQVAKMINLMRPGVFTDIEQYQFLYKAMLSLVSTKENGNGPMTLDKNGAVMASDESDPAESMESLV

SEQ ID NO: 19042 - protein, 265 aa, Nitrosomonas europaea
MKTKILASLASIIFTGYVSIAASAPPHWSYDEEPIWGAIEDAALPVPLRYPYAECGIGQHQSPVDLADAKIVSAKPLNKLSAQYKTDTPTFFNTGHAIQVNTSKNFAGGLKVGKELLPLIQLHFHEPSEHVFGGKKFPAELHFVHINKDGRIAVLGVVINIGKENAVFQTILDNMPRHEGEANSPSRVRFNPAKLLPSGVNAANLKYLTLAGSLTTPPCSEGVQWYILTKSITISADQLEQMKSFYHDNARSAQSLNERSILSNQ

SEQ ID NO: 19043 - protein, 260 aa, Macaca mulatta
ASPDWGYDDKNGPEQWSKLYPIANGNNQSPVDIKTSEAKHDTSLKPISVSYNPATAKEIINVGHSFHVNFEDNDNRSVLKGGPFSDSYRLFQFHFHWGSSNEYGSEHTVDGVKYSSELHIVHWNSAKYSSLAEAVSKADGLAVIGVLMKVGEANPKLQKVLDALHAIKTKGKRAPFTNFDPSTLLPSSLDFWTYSGSLTHPPLYESVTWIICKESISVSSEQLAQFRSLLSNVEGSNPVPIQRNNRPTQPLKGRTVRASF

SEQ ID NO: 19044 - protein, 261 aa, Macaca nemestrina
MASPDWGYDDKNGPEQWSKLYPIANGNNQSPVDIKTSEAKHDTSLKPISVSYNPATAKEIINVGHSFHVNFEDNDNRSVLKGGPFSDSYRLFQFHFHWGSSNEYGSEHTVDGVKYSSELHIVHWNSAKYSSLAEAVSKADGLAVIGVLMKVGEANPKLQKVLDALHAIKTKGKRAPFTNFDPSTLLPSSLDFWTYSGSLTHPPLYESVTWIICKESISVSSEQLAQFRSLLSNVEGDNPVPSQRNNRPTQPLKGRTVRASF

SEQ ID NO: 19045 - protein, 261 aa, Gorilla gorilla
MASPDWGYDDKNGPEQWSKLYPIANGNNQSPVDIKTSETKHDTSLKPISVSYNPATAKEIINVGHSFHVTFEDNDNRSVLKGGPLSDSYRLFQFHFHWGSTNEHGSEHTVDGVKYSAELHLTHWNSAKYSSLAEAASKADGLAVIGVLMKVGEANPKLQKILDALQAIKTKGKRAPFTNFDPSTLLPSSLDFWTYPGSLTHPPLYESVTWIICKESISVSSEQLAQFRSLLSNVEGDNAVPMQHNNRPTQPLKGRTVRASF

SEQ ID NO: 19046 - protein, 261 aa, Pan troglodytes
MASPDWGYDDKNGPEQWSKLYPIANGNNQSPVDIKTSETKHDTSLKPISVSYNPATAKEIINVGHSFHVNFEDNDNRSVLKGGPFSDSYRLFQFHFHWGSTNEHGSEHTVDGVKYSAELHIAHWNSAKYSNLAEAASKADGLAVIGVLMKVGEANPKLQKVLDALQAIKTKGKRAPFTNFDPSTLLPSSLDFWTYPGSLTHPPLYESVTWIICKESISVSSEQLAQFRSLLSNVEGDNAVPMQHNNRPTQPLKGRTVRASF

SEQ ID NO: 19047 - protein, 260 aa, Homo sapiens
ASPDWGYDDKNGPEQWSKLYPIANGNNQSPVDIKTSETKHDTSLKPISVSYNPATAKEIINVGHSFHVNFEDNQDRSVLKGGPFSDSYRLFQFHFHWGSTNEHGSEHTVDGVKYSAELHVAHWNSAKYSSLAEAASKADGLAVIGVLMKVGEANPKLQKVLDALQAIKTKGKRAPFTNFDPSTLLPSSLDFWTYPGSLTHPPLYESVTWIICKESISVSSEQLAQFRSLLSNVEGDNAVPMQHNNRPTQPLKGRTVRASF

SEQ ID NO: 19048 - protein, 261 aa, Homo sapiens
  unsure (1)..(261): unsure at all Xaa locations
XASPDWGYDDKNGPEQWSKLYPIANGNNQSPVDIKTSETKHDTSLKPISVSYNPATAKEIINVGHSFHVNFEDNQDRSVLKGGPFSDSYRLFQFHFHWGSTNEHGSEHTVDGVKYSAELHVAHWNSAKYSSLAEAASKADGLAVIGVLMKVGEANPKLQKVLDALQAIKTKGKRAPFTNFDPSTLLPSSLDFWTYPGSLTHPPLYESVTWIICKESISVSSEQLAQFRSLLSNVEGDNAVPMQHNNRPTQPLKGRTVRASF

SEQ ID NO: 19049 - protein, 260 aa, Homo sapiens
ASPDWGYDDKNGPEQWSKLYPIANGNNQSPVDIKTSETKHDTSLKPISVSYNPATAKEIINVGHSFRVNFEDNDNRSVLKGGPFSDSYRLFQFHFHWGSTNEHGSEHTVDGVKYSAELHVAHWNSAKYSSLAEAASKADGLAVIGVLMKVGEANPKLQKVLDALQAIKTKGKRAPFTNFDPSTLLPSSLDFWTYPGSLTHPPLYESVTWIICKESISVSSEQLAQFRSLLSNVEGDNAVPMQHNNRPTQPLKGRTVRASF

SEQ ID NO: 19050 - protein, 261 aa, Homo sapiens
MASPDWGYDDKNGPEQWSKLYPIANGNNQSPVDIKTSETKHDTSLKPISVSYNPATAKEIINVGHSFHVNFEDNDNRSVLKGGPFSDSYRLFQFHFHWGSTNEHGSEHTVDGVKYSAELHVAHWNSAKYSSLAEAASKADGLAVIGVLMKVGEANPKLQKVLDALQAIKTKGKRAPFTNFDPSTLLPSSLDFWTYPGSLTHPPLYESVTWIICKESISVSSEQLAQFRSLLSNVEGDNAVPMQHNNRPTQPLKGRTVRASF

SEQ ID NO: 19051 - protein, 260 aa, Homo sapiens
ASPDWGYDDKNGPEQWSKLYPIANGNNQSPVDIKTSETKHDTSLKPISVSYNPATAKEIINVGHSFHVNFEDNDNRSVLKGGPFSDSYRLFQFHFHWGSTNEHGSEHTVDGVKYSAELHVAHWNSAKYSSLAEAASKADGLAVIGVLMKVGEANPKLQKVLDALQAIKTKGKRAPFTNFDPSTLLPSSLDFWTYPGSLTHPPLYESVTWIICKESISVSSEQLAQFRSLLSNVEGDNAVPMQHNNRPTQPLKGRTVRASF

SEQ ID NO: 19052 - protein, 258 aa, Homo sapiens
HHWGYGKHNGPEHWHKDFPIAKGERQSPVDIDTHTAKYDPSLKPLSVSYDQATSLRILNNGHTFNVEFDDSQDKAVLKGGPLDGTYRLIQFHFHWGSLDGQGSEHTVDKKKYAAELHLVHWNTKYGDFGKAVQQPDGLAVLGIFLKVGSAKPGLQKVVDVLDSIKTKGKSADFTNFDPRGLLPESLDYWTYPGSLTTPPLLECVTWIVLKEPISVSSEQVLKFRKLNFNGEGEPEELMVDNWRPAQPLKNRQIKASFK

SEQ ID NO: 19053 - protein, 258 aa, Homo sapiens
HHWGYGKHNGPEHWHKDFPIAKGERQSPVDIDTHTAKYDPSLKPLSVSYDQATSLRILNNGHSFNVEFDDSQDKAVLKGGPLDGTYRLIQFHFHWGSLDGQGSEHTVDKKKYAAELHLVHWNTKYGDFGKAVQQPDGLAVLGIFLKVGSAKPGLQKVVDVLDSIKTKGKSADFTNFDPRGLLPESLDYWTYPGSLTTPPLLECVTWIVLKEPISVSSEQVLKFRKLNFNGEGEPEELMVDNWRPAQPLKNRQIKASFK

SEQ ID NO: 19054 - protein, 260 aa, Homo sapiens
  unsure (1)..(260): unsure at all Xaa locations
XSHHWGYGKHNGPEHWHKDFPIAKGERQSPVDIDTHTAKYDPSLKPLSVSYDQATSLRILNNGHAFNVEFDDSQDKAVLKGGPLDGTYRLIQFHFHWGSLDGQGSEHTVDKKKYAAELHLVHWNTKYGDFGKAVQQPDGLAVLGIFLKVGSAKPGLQKVVDVLDSIKTKGKSADFTNFDPRGLLPESLDYWTYPGSLTTPPLLECVTWIVLKEPISVSSEQVLKFRKLNFNGEGEPEELMVDNWRPAQPLKNRQIKASFX

SEQ ID NO: 19055 - protein, 260 aa, Homo sapiens
  unsure (1)..(260): unsure at all Xaa locations
XSHHWGYGKHNGPEHWHKDFPIAKGERQSPVDIDTHTAKYDPSLKPLSVSYDQATSLRILNNGHAFNVEFDDSQDKAVLKGGPLDGTYRLIQFHFHWGSLDGQGSEHTVDKKKYAAELHLVHWNTKYGDFGKAVQQPDGLAVLGIFLKVGSAKPGLQKVVDVLDSIKTKGKSADFTNFDPRGLLPESLDYWTYPGSLTTPPLLECVTWIVLKEPISVSSEQVLKFRKLNFNGEGEPEELMVDNWRPAQPLKNRQIKASFK

SEQ ID NO: 19056 - protein, 259 aa, Homo sapiens
SHHWGYGKHNGPEHWHKDFPIAKGERQSPVDIDTHTAKYDPSLKPLSVSYDQATSLRILNNGHAFNVEFDDSQDKAVLKGGPLDGTYRLIQFHFHWGSLDGQGSEHTVDKKKYAAELHLVHWNTKYGDFGKAVQQPDGLAVLGIFLKVGSAKPGLQKVVDVLDSIKTKGKSADFTNFDPRGLLPESLDYWTYPGSLTTPPLLECVTWIVLKEPISVSSEQVLKFRKLNFNGEGEPEELMVDNWRPAQPLKNRQIKASFK

SEQ ID NO: 19057 - protein, 259 aa, Homo sapiens
SHHWGYGKHNGPEHWHKDFPIAKGERQSPVDIDTHTAKYDPSLKPLSVSYDQATSLRILNNGHAFNVEFDDSQDKAVLKGGPLDGTYRLIQFHFHWGSLDGQGSEHTVDKKKYAAELHLVHWNTKYGDVGKAVQQPDGLAVLGIFLKVGSAKPGLQKVVDVLDSIKTKGKSADFTNFDPRGLLPESLDYWTYPGSLTTPPLLECVTWIVLKEPISVSSEQVLKFRKLNFNGEGEPEELMVDNWRPAQPLKNRQIKASFK

SEQ ID NO: 19058 - protein, 260 aa, Homo sapiens
MSHHWGYGKHNGPEHWHKDFPIAKGERQSPVDIDTHTAKYDPSLKPLSVSYDQATSLRILNNGAAFNVEFDDSQDKAVLKGGPLDGTYRLIQFHFHWGSLDGQGSEHTVDKKKYAAELHLVHWNTKYGDFGKAVQQPDGLAVLGIFLKVGSAKPGLQKVVDVLDSIKTKGKSADFTNFDPRGLLPESLDYWTYPGSLTTPPLLECVTWIVLKEPISVSSEQVLKFRKLNFNGEGEPEELMVDNWRPAQPLKNRQIKASFK

SEQ ID NO: 19059 - protein, 260 aa, Homo sapiens
MSHHWGYGKHNGPEHWHKDFPIAKGERQSPVDIDTHTAKYDPSLKPLSVSYDQATSLRILNNGHAFNVEFDDSQDKAVLKGGPLDGTYRLIQFHFHWGSLDGQGSEHTVDKKKYAAELHLVHWNTKYGDFGKAVQQPDGLAVLGIFLKVGSAKPGLQKVVDVLDSIKTKGKSADFTNFDPRGLLPESLDYWTYPGSLTTPPLLECVTWIVLKEPISVSSEQVLKFRKLNFNGEGEPEELMVDNWRPAQPLKNRQIKASFK

SEQ ID NO: 19060 - protein, 258 aa, Homo sapiens
HHWGYGKHNGPEHWHKDFPIAKGERQSPVDIDTHTAKYDPSLKPLSVSYDQATSLRILNNGHLFNVEFDDSQDKAVLKGGPLDGTYRLIQFHFHWGSLDGQGSEHTVDKKKYAAELHLVHWNTKYGDFGKAVQQPDGLAVLGIFLKVGSAKPGLQKVVDVLDSIKTKGKSADFTNFDPRGLLPESLDYWTYPGSLTTPPLLECVTWIVLKEPISVSSEQVLKFRKLNFNGEGEPEELMVDNWRPAQPLKNRQIKASFK

SEQ ID NO: 19061 - protein, 258 aa, Homo sapiens
HHWGYGKHNGPEHWHKDFPIAKGERQSPVDIDTHTAKYDPSLKPLSVSYDQATSLRILNNGHHFNVEFDDSQDKAVLKGGPLDGTYRLIQFHFHWGSLDGQGSEHTVDKKKYAAELHLVHWNTKYGDFGKAVQQPDGLAVLGIFLKVGSAKPGLQKVVDVLDSIKTKGKSADFTNFDPRGLLPESLDYWTYPGSLTTPPLLECVTWIVLKEPISVSSEQVLKFRKLNFNGEGEPEELMVDNWRPAQPLKNRQIKASFK

SEQ ID NO: 19062 - protein, 258 aa, Homo sapiens
HHWGYGKHNGPEHWHKDFPIAKGERQSPVDIDTHTAKYDPSLKPLSVSYDQATSLRILNNGHGFNVEFDDSQDKAVLKGGPLDGTYRLIQFHFHWGSLDGQGSEHTVDKKKYAAELHLVHWNTKYGDFGKAVQQPDGLAVLGIFLKVGSAKPGLQKVVDVLDSIKTKGKSADFTNFDPRGLLPESLDYWTYPGSLTTPPLLECVTWIVLKEPISVSSEQVLKFRKLNFNGEGEPEELMVDNWRPAQPLKNRQIKASFK

SEQ ID NO: 19063 - protein, 258 aa, Homo sapiens
HHWGYGKHNGPEHWHKDFPIAKGERQSPVDIDTHTAKYDPSLKPLSVSYDQATSLRILNNGHFFNVEFDDSQDKAVLKGGPLDGTYRLIQFHFHWGSLDGQGSEHTVDKKKYAAELHLVHWNTKYGDFGKAVQQPDGLAVLGIFLKVGSAKPGLQKVVDVLDSIKTKGKSADFTNFDPRGLLPESLDYWTYPGSLTTPPLLECVTWIVLKEPISVSSEQVLKFRKLNFNGEGEPEELMVDNWRPAQPLKNRQIKASFK

SEQ ID NO: 19064 - protein, 260 aa, Homo sapiens
MSHHWGYGKHNGPEHWHKDFPIAKGERQSPVDIDTHTAKYDPSLKPLSVSYDQATSLRILNNGHAFNVEFDDSQDKAVLKGGPLDGTYRLIQFHFHWGSLDGQGSEHTVDKKKYAAELHLVHWNTKYGDFGKAVQQPDGLAVLGIFLKVGSAKPGLQKVVDVLDSIKTKGKSADFTNFDPRGLLPESLDYWTYPGSLPTPPLLESVTWIVLKEPISVSSEQVLKFRKLNFNGEGEPEELMVDNWRPAQPLKNRQIKASFK

SEQ ID NO: 19065 - protein, 260 aa, Homo sapiens
  unsure (1)..(260): unsure at all Xaa locations
XSHHWGYGKHNGPEHWHKDFPIAKGERQSPVDIDTHTAKYDPSLKPLSVSYDQATSLRILNNGHAFNVEFDDSQDKAVLKGGPLDGTYRLIQFHFHWGSLDGQGSQHTVDKKKYAAELHLVHWNTKYGDFGKAVQQPDGLAVLGIFLKVGSAKPGLQKVVDVLDSIKTKGKSADFTNFDPRGLLPESLDYWTYPGSLTTPPLLECVTWIVLKEPISVSSEQVLKFRKLNFNGEGEPEELMVDNWRPAQPLKNRQIKASFK

SEQ ID NO: 19066 - protein, 260 aa, Homo sapiens [sequence omitted]

SEQ ID NO: 19067 - protein, 259 aa, Homo sapiens
SHHWGYGKHNGPEHWHKDFPIAKGERQSPVDIDTHTAKYDPSLKPLSVSYDQATSLRILNNGHAFNVEFDDSQDKAVLKGGPLDGTYRLIQFHFHWGSLDGQGSEHTVDKKKYAAQLHLVHWNTKYGDFGKAVQQPDGLAVLGIFLKVGSAKPGLQKVVDVLDSIKTKGKSADFTNFDPRGLLPESLDYWTYPGSLTTPPLLECVTWIVLKEPISVSSEQVLKFRKLNFNGEGEPEELMVDNWRPAQPLKNRQIKASFK

SEQ ID NO: 19068 - protein, 259 aa, Homo sapiens
SHHWGYGKHNGPEHWHKDFPIAKGERQSPVDIDTHTAKYDPSLKPLSVSYDQATSLRILNNGHAFNVEFDDSQDKAVLKGGPLDGTYRLIEFHFHWGSLDGQGSEHTVDKKKYAAELHLVHWNTKYGDFGKAVQQPDGLAVLGIFLKVGSAKPGLQKVVDVLDSIKTKGKSADFTNFDPRGLLPESLDYWTYPGSLTTPPLLECVTWIVLKEPISVSSEQVLKFRKLNFNGEGEPEELMVDNWRPAQPLKNRQIKASFK

SEQ ID NO: 19069 - protein, 260 aa, Homo sapiens
  unsure (1)..(260): unsure at all Xaa locations
XSHHWGYGKHNGPEHWHKDFPIAKGERQSPVDIDTHTAKYDPSLKPLSVSYDQATSLRILNNGHAFNVEFDDSQDKAVLKGGPLDGTYRLIQFHFHWGSLDGQGSDHTVDKKKYAAELHLVHWNTKYGDFGKAVQQPDGLAVLGIFLKVGSAKPGLQKVVDVLDSIKTKGKSADFTNFDPRGLLPESLDYWTYPGSLTTPPLLECVTWIVLKEPISVSSEQVLKFRKLNFNGEGEPEELMVDNWRPAQPLKNRQIKASFK

SEQ ID NO: 19070 - protein, 259 aa, Homo sapiens
SHHWGYGKHNGPEHWHKDFPIAKGERQSPVDIDTHTAKYDPSLKPLSVSYDQATSLRILNNGHAFNVEFDDSQDKAVLKGGPLDGTYRLIQFHFHWGSLDGQGSEHTVDKKKYAAELHLVHWNTKYGDFGKAVQQPDGLAVLGIFLKVGSAKPGLQKVVDVLDSIKTKGKSADFTNFDPRGLLPESLDYWTYPGSFTTPPLLECVTWIVLKEPISVSSEQVLKFRKLNFNGEGEPEELMVDNWRPAQPLKNRQIKASFK

SEQ ID NO: 19071 - protein, 260 aa, Homo sapiens
MSHHWGYGKHNGPEHWHKDFPIAKGERQSPVDIDTHTAKYDPSLKPLSVSYDQATSLRILNNGHAFNVEFDDSQDKAVLKGGPLDGTYRLIQFHFHWGSLDGQGSEHTVDKKKYAAELHLVHWNTKYGDFGKAVQQPDGLAVLGIFLKVGSAKPGLQKVVDVLDSIKTKGKSADFTNFDPRGLLPESLDYWTYPGSLTSPPLLECVTWIVLKEPISVSSEQVLKFRKLNFNGEGEPEELMVDNWRPAQPLKNRQIKASFK

SEQ ID NO: 19072 - protein, 260 aa, Homo sapiens
MSHHWGYGKHNGPEHWHKDFPIAKGERQSPVDIDTHTAKYDPSLKPLSVSYDQATSLRILNNGHAFNVEFDDSQDKAVLKGGPLDGTYRLIQFHFHWGSLDGQGSEHTVDKKKYAAELHLAHWNTKYGDFGKAVQQPDGLAVLGIFLKVGSAKPGLQKVVDVLDSIKTKGKSADFTNFDPRGLLPESLDYWTYPGSLTTPPLLECVTWIVLKEPISVSSEQVLKFRKLNFNGEGEPEELMVDNWRPAQPLKNRQIKASFK

SEQ ID NO: 19073 - protein, 260 aa, Homo sapiens
MSHHWGYGKHNGPEHWHKDFPIAKGERQSPVDIDTHTAKYDPSLKPLSVSYDQATSLRILNNGHAFNVEFDDSQDKAVLKGGPLDGTYRLIQFHFHWGSLDGQGSEHTVDKKKYAAELHLVHWNTKYGDFGKAVQQPDGLAFLGIFLKVGSAKPGLQKVVDVLDSIKTKGKSADFTNFDPRGLLPESLDYWTYPGSLTTPPLLECVTWIVLKEPISVSSEQVLKFRKLNFNGEGEPEELMVDNWRPAQPLKNRQIKASFK

SEQ ID NO: 19074 - protein, 260 aa, Homo sapiens
  unsure (1)..(260): unsure at all Xaa locations
XSHHWGYGKHNGPEHWHKDFPIAKGERQSPVDIDTHTAKYDPSLKPLSVSYDQATSLRILNNGHAFNVEFDDSQDKAVLKGGPLDGTYRLIQFHFHWGSLDGQGSEHTVDKKKYAAELHLVHWNTKYGDFGKAVQQPDGLAVLGIFLKVGSAKPGLQKVVDVLDSIKTKGKSADFTNFDPRGLLPESLDYWTYPGSLATPPLLECVTWIVLKEPISVSSEQVLKFRKLNFNGEGEPEELMVDNWRPAQPLKNRQIKASFK

SEQ ID NO: 19075 - protein, 260 aa, Homo sapiens
MSHHWGYGKHNGPEHWHKDFPIAKGERQSPVDIDTHTAKYDPSLKPLSVSYDQATSLRILNNGHAFNVEFDDSQDKAVLKGGPLDGTYRLIQFHFHWGSLDGQGSEHTVDKKKYAAELHLVHWNTKYGDFGKAVQQPDGLAYLGIFLKVGSAKPGLQKVVDVLDSIKTKGKSADFTNFDPRGLLPESLDYWTYPGSLTTPPLLECVTWIVLKEPISVSSEQVLKFRKLNFNGEGEPEELMVDNWRPAQPLKNRQIKASFK

SEQ ID NO: 19076 - protein, 260 aa, Homo sapiens
MSHHWGYGKHNGPEHWHKDFPIAKGERQSPVDIDTHTAKYDPSLKPLSVSYDQATSLRILNNGHAFNVEFDDSQDKAVLKGGPLDGTYRLIQFHFHWGSLDGQGSEHTVDKKKYAAELHLVHWNTKYGDFGKAVQQPDGLAVLGIFLKVGSAKPGLQKVVDVLDSIKTKGKSADFTNFDPRGLLPESLDYWTYPGSATTPPLLECVTWIVLKEPISVSSEQVLKFRKLNFNGEGEPEELMVDNWRPAQPLKNRQIKASFK

SEQ ID NO: 19077 - protein, 260 aa, Homo sapiens
MSHHWGHGKHNGPEHWHKDFPIAKGERQSPVDIDTHTAKYDPSLKPLSVSYDQATSLRILNNGHAFNVEFDDSQDKAVLKGGPLDGTYRLIQFHFHWGSLDGQGSEHTVDKKKYAAELHLVHWNTKYGDFGKAVQQPDGLAVLGIFLKVGSAKPGLQKVVDVLDSIKTKGKSADFTNFDPRGLLPESLDYWTYPGSLTTPPLLECVTWIVLKEPISVSSEQVLKFRKLNFNGEGEPEELMVDNWRPAQPLKNRQIKASFK

SEQ ID NO: 19078 - protein, 259 aa, Homo sapiens
SHHWGYGKHNGPEHWHKDFPIAKGERQSPVDIDTHTAKYDPSLKPLSVSYDQATSLRILNNGHAFNVEFDDSQDKAVLKGGPLDGTYRLINFHFHWGSLDGQGSEHTVDKKKYAAELHLVHWNTKYGDFGKAVQQPDGLAVLGIFLKVGSAKPGLQKVVDVLDSIKTKGKSADFTNFDPRGLLPESLDYWTYPGSLTTPPLLECVTWIVLKEPISVSSEQVLKFRKLNFNGEGEPEELMVDNWRPAQPLKNRQIKASFK

SEQ ID NO: 19079 - protein, 259 aa, Homo sapiens
SHHWGYGKHNGPEHWHKDFPIAKGERQSPVDIDTHTAKYDPSLKPLSVSYDQATSLRILNNGHAFNVEFDDSQDKAVLKGGPLDGTYRLIQFHFHWGSLDGQGSEHTVDKKKYAAELHLVHWNTKYGDFGKAVQQPDGLAVLGIFLKVGSAKPGLQKVVDVLDSIKTKGKSADFTNFDPRGLLPESLDYWTYPGSLVTPPLLECVTWIVLKEPISVSSEQVLKFRKLNFNGEGEPEELMVDNWRPAQPLKNRQIKASFK

SEQ ID NO: 19080 - protein, 259 aa, Homo sapiens
SHHWGYGKHNGPEHWHKDFPIAKGERQSPVDIDTHTAKYDPSLKPLSVSYDQATSLRILNNGHAFNVEFDDSQDKAVLKGGPLDGTYRLIAFHFHWGSLDGQGSEHTVDKKKYAAELHLVHWNTKYGDFGKAVQQPDGLAVLGIFLKVGSAKPGLQKVVDVLDSIKTKGKSADFTNFDPRGLLPESLDYWTYPGSLTTPPLLECVTWIVLKEPISVSSEQVLKFRKLNFNGEGEPEELMVDNWRPAQPLKNRQIKASFK

SEQ ID NO: 19081 - protein, 260 aa, Homo sapiens
MSHHWGYGKHNGPEHWHKDFPIAKGERQSPVDIDTHTAKYDPSLKPLSVSYDQATSLRILNNGHAFNVEFDDSQDKAVLKGGPLDGTYRLIQFHFHWGSLDGQGSEHTVDKKKYAAELHLVHWNTKYGDFGKAVQQPDGLAVLGIFLKVGSAKPGLQKVVDVLDSIKTKGKSADFTNFDPRGLLPESLDYWTYPGSRTTPPLLECVTWIVLKEPISVSSEQVLKFRKLNFNGEGEPEELMVDNWRPAQPLKNRQIKASFK

SEQ ID NO: 19082 - protein, 260 aa, Homo sapiens
MSHHWGYGKHNGPEHWHKDFPIAKGERQSPVDIDTHTAKYDPSLKPLSVSYDQATSLRILNNGHAFNVEFDDSQDKAVLKGGPLDGTYRLIQFHFHWGSLDGQGSEHTVDKKKYAAELHLVHWNTKYGDFGKAVQQPDGLAVLGIFLKVGSAKPGLQKVVDVLDSIKTKGKSADFTNFDPRGLLPESLDYWTYPGSLCTPPLLECVTWIVLKEPISVSSEQVLKFRKLNFNGEGEPEELMVDNWRPAQPLKNRQIKASFK

SEQ ID NO: 19083 - protein, 259 aa, Homo sapiens
SHHWGYGKHNGPEHWHKDFPIAKGERQSPVDIDTHTAKYDPSLKPLSVSYDQATSLRILNNGHAFNVEFDDSQDKAVLKGGPLDGTYRLIQFHFHWGSLDGQGSEHTVDKKKYAAELHLVHWNTKYGDFGKAVQQPDGLAVLGIFLKVGSAKPGLQKVVDVLDSIKTKGKSADFTNFDPRGLLPESLDYWTYPGSLDTPPLLECVTWIVLKEPISVSSEQVLKFRKLNFNGEGEPEELMVDNWRPAQPLKNRQIKASFK

SEQ ID NO: 19084 - protein, 259 aa, Homo sapiens
SHHWGYGKHNGPEHWHKDFPIAKGERQSPVDIDTHTAKYDPSLKPLSVSYDQATSLRILNNGHAFNVEFDDSQDKAVLKGGPLDGTYRLIQFHFHWGSLDGQGSEHTVDKKKYAAELHLVHWNTKYGDFGKAVQQPDGLAVLGIFLKVGSAKPGLQKVVDVLDSIKTKGKSADFTNFDPRGLLPESLDYWTYPGSRTTPPLLECVTWIVLKEPISVSSEQVLKFRKLNFNGEGEPEELMVDNWRPAQPLKNRQIKASFK

SEQ ID NO: 19085 - protein, 259 aa, Homo sapiens
SHHWGYGKHNGPEHWHKDFPIAKGERQSPVDIDTHTAKYDPSLKPLSVSYDQATSLRILNNGHAFNVEFDDSQDKAVLKGGPLDGTYRLIQFHFHWGSLDGQGSEHTVDKKKYAAELHLVHWNTKYGDFGKAVQQPDGLAVLGIFLKVGSAKPGLQKVVDVLDSIKTKGKSADFTNFDPRGLLPESLDYWTYPGSLETPPLLECVTWIVLKEPISVSSEQVLKFRKLNFNGEGEPEELMVDNWRPAQPLKNRQIKASFK

SEQ ID NO: 19086 - protein, 260 aa, Homo sapiens
  unsure (1)..(260): unsure at all Xaa locations
XSHHWGYGKHNGPEHWHKDFPIAKGERQSPVDIDTHTAKYDPSLKPLSVSYDQATSLRILNNGHAFNVEFDDSQDKAVLKGGPLDGTYRLIQFHFHWGSLDGQGSAHTVDKKKYAAELHLVHWNTKYGDFGKAVQQPDGLAVLGIFLKVGSAKPGLQKVVDVLDSIKTKGKSADFTNFDPRGLLPESLDYWTYPGSLTTPPLLECVTWIVLKEPISVSSEQVLKFRKLNFNGEGEPEELMVDNWRPAQPLKNRQIKASFK

SEQ ID NO: 19087 - protein, 260 aa, Homo sapiens
MSHHWGYGKHNGPEHWHKDFPIAKGERQSPVDIDTHTAKYDPSLKPLSVSYDQATSLRILNNGHAFNVEFDDSQDKAVLKGGPLDGTYRLIQFHMHVGSLDGQGSEHTVDKKKYAAELHLVHWNTKYGDFGKAVQQPDGLAVLGIFLKVGSAKPGLQKVVDVLDSIKTKGKSADFTNFDPRGLLPESLDYWTYPGSLTTPPLLECVTWIVLKEPISVSSEQVLKFRKLNFNGEGEPEELMVDNWRPAQPLKNRQIKASFK

SEQ ID NO: 19088 - protein, 259 aa, Homo sapiens
SHHWGYGKHNGPEHWHKDFPIAKGERQSPVDIDTHTAKYDPSLKPLSVSYDQATSLRILNNGHAFNVEFDDSQDKAVLKGGPLDGTYRLIQFHFHWGSLDGQGSEHTVDKKKYAAALHLVHWNTKYGDFGKAVQQPDGLAVLGIFLKVGSAKPGLQKVVDVLDSIKTKGKSADFTNFDPRGLLPESLDYWTYPGSLTTPPLLECVTWIVLKEPISVSSEQVLKFRKLNFNGEGEPEELMVDNWRPAQPLKNRQIKASFK

SEQ ID NO: 19089 - protein, 260 aa, Homo sapiens
MSHHWGYGKHNGPEHWHKDFPIAKGERQSPVDIDTHTAKYDPSLKPLSVSYDQATSLRILNNGHAFNVEFDDSQDKAVLKGGPLDGTYRLIQFHFHWGSLDGQGSEHTVDKKKYAAELHLVHWNTKYGDFGKAVQQPDGLAVLGIFLKVGSAKPGLQKVVDVLDSIKTKGKSADFTNFDPRGLLPESLDYWTYPGSHTTPPLLECVTWIVLKEPISVSSEQVLKFRKLNFNGEGEPEELMVDNWRPAQPLKNRQIKASFK

SEQ ID NO: 19090 - protein, 260 aa, Homo sapiens
MSHHWGYGKHNGPEHWHKDFPIAKGERQSPVDIDTHTAKYDPSLKPLSVSYDQATSLRILNNGHAFNVEFDDSQDKAVLKGGPLDGTYRLIQFHFHWGSLDGQGSEHTVDKKKYAAELHLVHWNTKYGDFGKAVQQPDGLAGLGIFLKVGSAKPGLQKVVDVLDSIKTKGKSADFTNFDPRGLLPESLDYWTYPGSLTTPPLLECVTWIVLKEPISVSSEQVLKFRKLNFNGEGEPEELMVDNWRPAQPLKNRQIKASFK

SEQ ID NO: 19091 - protein, 260 aa, Homo sapiens
  unsure (1)..(260): unsure at all Xaa locations
XSHHWGYGKHNGPEHWHKDFPIAKGERQSPVDIDTHTAKYDPSLKPLSVSYDQATSLRILNNGHAFNVEFDDSQDKAVLKGGPLDGTYRLIQFHFHWGSLDGQGSEHTVDKKKYAAELHLVHWNTKYGDFGKAVQQPDGLAVLGIFLKVGSAKPGLQKVVDVLDSIKTKGKSADFTNFDPRGLLPESLDYWTYPGSLTHPPLLECVTWIVLKEPISVSSEQVLKFRKLNFNGEGEPEELMVDNWRPAQPLKNRQIKASFK

SEQ ID NO: 19092 - protein, 260 aa, Homo sapiens
MSHHWGYGKHNGPEHWHKDFPIAKGERQSPVDIDTHTAKYDPSLKPLSVSYDQATSLRILNNGHAFNVEFDDSQDKAVLKGGPLDGTYRLIQFHFHWGSLDGQGSEHTVDKKKYAAELHLVHWNTKYGDFGKAVQQPDGLAVLGIFLKVGSAKPGLQKVVDVLDSIKTKGKSADFTNFDPRGLLPESLDYWTYPGSETTPPLLECVTWIVLKEPISVSSEQVLKFRKLNFNGEGEPEELMVDNWRPAQPLKNRQIKASFK

SEQ ID NO: 19093 - protein, 260 aa, Homo sapiens
MSHHWGYGKHNGPEHWHKDFPIAKGERQSPVDIDTHTAKYDPSLKPLSVSYDQATSLRILNNGHAFNVEFDDSQDKAVLKGGPLDGTYRLIQFHFHWGSLDGQGSEHTVDKKKYAAELHLVHWNTKYGDFGKAVQQPDGLAHLGIFLKVGSAKPGLQKVVDVLDSIKTKGKSADFTNFDPRGLLPESLDYWTYPGSLTTPPLLECVTWIVLKEPISVSSEQVLKFRKLNFNGEGEPEELMVDNWRPAQPLKNRQIKASFK

SEQ ID NO: 19094 - protein, 259 aa, Homo sapiens
SHHWGYGKHNGPEHWHKDFPIAKGERQSPVDIDTHTAKYDPSLKPLSVSYDQATSLRILNNGHAFNVEFDDSQDKAVLKGGPLDGTYRLILFHFHWGSLDGQGSEHTVDKKKYAAELHLVHWNTKYGDFGKAVQQPDGLAVLGIFLKVGSAKPGLQKVVDVLDSIKTKGKSADFTNFDPRGLLPESLDYWTYPGSLTTPPLLECVTWIVLKEPISVSSEQVLKFRKLNFNGEGEPEELMVDNWRPAQPLKNRQIKASFK

SEQ ID NO: 19095 - protein, 259 aa, Homo sapiens
SHHWGYGKHNGPEHWHKDFPIAKGERQSPVDIDTHTAKYDPSLKPLSVSYDQATSLRILNNGHAFNVEFDDSQDKAVLKGGPLDGTYRLIQFHFHWGSLDGQGSEHTVDKKKYAAELHLVHWNTKYGDFGKAVQQPDGLAVLGIFLKVGSAKPGLQKVVDVLDSIKTKGKSADFTNFDPRGLLPESLDYWTYPGSLHTPPLLECVTWIVLKEPISVSSEQVLKFRKLNFNGEGEPEELMVDNWRPAQPLKNRQIKASFK

SEQ ID NO: 19096 - protein, 259 aa, Homo sapiens
SHHWGYGKHNGPEHWHKDFPIAKGERQSPVDIDTHTAKYDPSLKPLSVSYDQATSLRILNNGHAFNVEFDDSQDKAVLKGGPLDGTYRLIQFNFHWGSLDGQGSEHTVDKKKYAAELHLVHWNTKYGDFGKAVQQPDGLAVLGIFLKVGSAKPGLQKVVDVLDSIKTKGKSADFTNFDPRGLLPESLDYWTYPGSLTTPPLLECVTWIVLKEPISVSSEQVLKFRKLNFNGEGEPEELMVDNWRPAQPLKNRQIKASFK

SEQ ID NO: 19097 - protein, 259 aa, Homo sapiens
SHHWGYGKHNGPEHWHKDFPIAKGERQSPVDIDTHTAKYDPSLKPLSVSYDQATSLRILNNGHAFNVEFDDSQDKAVLKGGPLDGTYRLIQFHFHWGSLDGQGSEHTVDKKKYAAELNLVHWNTKYGDFGKAVQQPDGLAVLGIFLKVGSAKPGLQKVVDVLDSIKTKGKSADFTNFDPRGLLPESLDYWTYPGSLTTPPLLECVTWIVLKEPISVSSEQVLKFRKLNFNGEGEPEELMVDNWRPAQPLKNRQIKASFK

SEQ ID NO: 19098 - protein, 259 aa, Homo sapiens
SHHWGYGKHNGPEHWHKDFPIAKGERQSPVDIDTHTAKYDPSLKPLSVSYDQATSLRILNNGHAFNVEFDDSQDKAVLKGGPLDGTYRLIQFHFHWGSLDGQGSEHTVDKKKYAAELHLVHWNTKYGDFGKAVQQPDGLAVLGIFLKVGSAKPGLQKVVDVLDSIKTKGKSADFTNFDPRGLLPESLDYWTYPGSETTPPLLECVTWIVLKEPISVSSEQVLKFRKLNFNGEGEPEELMVDNWRPAQPLKNRQIKASFK

SEQ ID NO: 19099 - protein, 259 aa, Homo sapiens
SHHWGYGKHNGPEHWHKDFPIAKGERQSPVDIDTHTAKYDPSLKPLSVSYDQATSLRILNNGHAFNVEFDDSQDKAVLKGGPLDGTYRLIQFHFHWGSLDGQGSEHTVDKKKYAAELQLVHWNTKYGDFGKAVQQPDGLAVLGIFLKVGSAKPGLQKVVDVLDSIKTKGKSADFTNFDPRGLLPESLDYWTYPGSLTTPPLLECVTWIVLKEPISVSSEQVLKFRKLNFNGEGEPEELMVDNWRPAQPLKNRQIKASFK

SEQ ID NO: 19100 - protein, 256 aa, Homo sapiens
HWGYGKHNGPEHWHKDFPIAKGERQSPVDIDTHTAKYDPSLKPLSVSYDQATSLRILNNGHAFNVEFDDSQDKAVLKGGPLDGTYRLIQFHFHWGSLDGQGSEHTVDKKKYAAELHLVHWNTKYGDFGKAVQQPDGLAVLGIFLKVGSAKPGLQKVVDVLDSIKTKGKSADFTNFDPRGLLPESLDYWTYPGSLTTPALLECVTWIVLKEPISVSSEQVLKFRKLNFNGEGEPEELMVDNWRPAQPLKNRQIKASF

SEQ ID NO: 19101 - protein, 259 aa, Homo sapiens
SHHWGYGKHNGPEHWHKDFPIAKGERQSPVDIDTHTAKYDPSLKPLSVSYDQATSLRILNNGHAFNVEFDDSQDKAVLKGGPLDGTYRLIQFHFHWGSLDGQGSEHTVDKKKYAAELDLVHWNTKYGDFGKAVQQPDGLAVLGIFLKVGSAKPGLQKVVDVLDSIKTKGKSADFTNFDPRGLLPESLDYWTYPGSLTTPPLLECVTWIVLKEPISVSSEQVLKFRKLNFNGEGEPEELMVDNWRPAQPLKNRQIKASFK

SEQ ID NO: 19102 - protein, 259 aa, Homo sapiens
SHHWGYGKHNGPEHWHKDFPIAKGERQSPVDIDTHTAKYDPSLKPLSVSYDQATSLRILNNGHAFNVEFDDSQDKAVLKGGPLDGTYRLIQFDFHWGSLDGQGSEHTVDKKKYAAELHLVHWNTKYGDFGKAVQQPDGLAVLGIFLKVGSAKPGLQKVVDVLDSIKTKGKSADFTNFDPRGLLPESLDYWTYPGSLTTPPLLECVTWIVLKEPISVSSEQVLKFRKLNFNGEGEPEELMVDNWRPAQPLKNRQIKASFK

SEQ ID NO: 19103 - protein, 257 aa, Homo sapiens
  unsure (1)..(257): unsure at all Xaa locations
HWGYGKHNGPEHWHKDFPIAKGERQSPVDIDTHTAKYDPSLKPLSVSYDQATSLRILNNGHAFNVEFDDSQDKAVLKGGPLDGTYRLIQFHFHWGSLDGQGSEHTVDKKKYAAELHLVHWNTKYGDFGKAVQQPDGLAVLGIFLKVGSAKPGLQKVVDVLDSIKTKGKSADFTNFDPRGLLPESLDYWTYPGSLTTPPLLECXVTWIVLKEPISVSSEQVLKFRKLNFNGEGEPEELMVDNWRPAQPLKNRQIKASF

SEQ ID NO: 19104 - protein, 259 aa, Homo sapiens
SHHWGYGKHNGPEHWHKDFPIAKGERQSPVDIDTHTAKYDPSLKPLSVSYDQATSLRILNNGHAFNVEFDDSQDKAVLKGGPLDGTYRLIQFAFHWGSLDGQGSEHTVDKKKYAAELHLVHWNTKYGDFGKAVQQPDGLAVLGIFLKVGSAKPGLQKVVDVLDSIKTKGKSADFTNFDPRGLLPESLDYWTYPGSLTTPPLLECVTWIVLKEPISVSSEQVLKFRKLNFNGEGEPEELMVDNWRPAQPLKNRQIKASFK

SEQ ID NO: 19105 - protein, 259 aa, Homo sapiens
SHHWGYGKHNGPEHWHKDFPIAKGERQSPVDIDTHTAKYDPSLKPLSVSYDQATSLRILNNGHAFNVEFDDSQDKAVLKGGPLDGTYRLIQFCFHWGSLDGQGSEHTVDKKKYAAELHLVHWNTKYGDFGKAVQQPDGLAVLGIFLKVGSAKPGLQKVVDVLDSIKTKGKSADFTNFDPRGLLPESLDYWTYPGSLTTPPLLECVTWIVLKEPISVSSEQVLKFRKLNFNGEGEPEELMVDNWRPAQPLKNRQIKASFK

SEQ ID NO: 19106 - protein, 260 aa, Homo sapiens
MSHHWGYGKHNGPEHWHKDFPIAKGERQSPVDIDTHTAKYDPSLKPLSVSYDQATSLRILNNGHAFNVEFDDSQDKAVLKGGPLDGTYRLIQFCFHWGSLDGQGSEHTVDKKKYAAELHLVHWNTKYGDFGKAVQQPDGLAVLGIFLKVGSAKPGLQKVVDVLDSIKTKGKSADFTNFDPRGLLPESLDYWTYPGSLTTPPLLECVTWIVLKEPISVSSEQVLKFRKLNFNGEGEPEELMVDNWRPAQPLKNRQIKASFK

SEQ ID NO: 19107 - protein, 255 aa, Homo sapiens
WGYGKHNGPEHWHKDFPIAKGERQSPVDIDTHTAKYDPSLKPLSVSYDQATSLRILNNGHAFNVEFDDSQDKAVLKGGPLDGTYRLIQFHFCWGSLDGQGSEHTVDKKKYAAELHLVHWNTKYGDFGKAVQQPDGLAVLGIFLKVGSAKPGLQKVVDVLDSIKTKGKSADFTNFDPRGLLPESLDYWTYPGSLTTPPLLECVTWIVLKEPISVSSEQVLKFRKLNFNGEGEPEELMVDNWRPAQPLKNRQIKASF

SEQ ID NO: 19108 - protein, 260 aa, Homo sapiens
MSHHWGYGKHNGPEHWHKDFPIAKGERQSPVDIDTHTAKYDPSLKPLSVSYDQATSLRILNNGHAFNVEFDDSQDKAVLKGGPLDGTYRLIQIHMHVGSLDGQGSEHTVDKKKYAAELHLVHWNTKYGDFGKAVQQPDGLAVLGIFLKVGSAKPGLQKVVDVLDSIKTKGKSADFTNFDPRGLLPESLDYWTYPGSLTTPPLLECVTWIVLKEPISVSSEQVLKFRKLNFNGEGEPEELMVDNWRPAQPLKNRQIKASFK

SEQ ID NO: 19109 - protein, 255 aa, Homo sapiens
WGYGKHNGPEHWHKDFPIAKGERQSPVDIDTHTAKYDPSLKPLSVSYDQATSLRILNNGHAFNVEFDDSQDKAVLKGGPLDGTYRLIQFHFHWGSLDGQGSEHTVDKKKYAAELCLVHWNTKYGDFGKAVQQPDGLAVLGIFLKVGSAKPGLQKVVDVLDSIKTKGKSADFTNFDPRGLLPESLDYWTYPGSLTTPPLLECVTWIVLKEPISVSSEQVLKFRKLNFNGEGEPEELMVDNWRPAQPLKNRQIKASF

SEQ ID NO: 19110 - protein, 260 aa, Homo sapiens [sequence omitted]

SEQ ID NO: 19111 - protein, 259 aa, Homo sapiens [sequence omitted]

SEQ ID NO: 19112 - protein, 260 aa, Homo sapiens
MSHHWGYGKHNGPEHWHKDFPIAKGERQSPVDIDTHTAKYDPSLKPLSVSYDQATSLRILNNGHAFNVEFDDSQDKAVLKGGPLDGTYRLIQSHLHMGSLDGQGSEHTVDKKKYAAELHLVHWNTKYGDFGKAVQQPDGLAVLGIFLKVGSAKPGLQKVVDVLDSIKTKGKSADFTNFDPRGLLPESLDYWTYPGSLTTPPLLECVTWIVLKEPISVSSEQVLKFRKLNFNGEGEPEELMVDNWRPAQPLKNRQIKASFK

SEQ ID NO: 19113 - protein, 260 aa, Homo sapiens
MAKEWGYASHNGPDHWHELFPNAKGENQSPVELHTKDIRHDPSLQPWSVSYDGGSAKTILNNGKTCRVVFDDTYDRSMLRGGPLPGPYRLRQFHLHWGSSDDHGSEHTVDGVKYAAELHLVHWNPKYNTFKEALKQRDGIAVIGIFLKIGHENGEFQIFLDALDKIKTKGKEAPFTKFDPSCLFPACRDYWTYQGSFTTPPCEECIVWLLLKEPMTVSSDQMAKLRSLLSSAENEPPVPLVSNWRPPQPINNRVVRASFK

SEQ ID NO: 19114 - protein, 264 aa, Homo sapiens [sequence omitted]

SEQ ID NO: 19115 - protein, 262 aa, Homo sapiens
MSRLSWGYREHNGPIHWKEFFPIADGDQQSPIEIKTKEVKYDSSLRPLSIKYDPSSAKIISNSGHSFNVDFDDTENKSVLRGGPLTGSYRLRQVHLHWGSADDHGSEHIVDGVSYAAELHVVHWNSDKYPSFVEAAHEPDGLAVLGVFLQIGEPNSQLQKITDTLDSIKEKGKQTRFTNFDLLSLLPPSWDYWTYPGSLTVPPLLESVTWIVLKQPINISSQQLAKFRSLLCTAEGEAAAFLVSNHRPPQPLKGRKVRASFH

SEQ ID NO: 19116 - protein, 305 aa, Homo sapiens
MLGRNTWKTSAFSFLVEQMWAPLWSRSMRPGRWCSQRSCAWQTSNNTLHPLWTVPVSVPGGTRQSPINIQWRDSVYDPQLKPLRVSYEAASCLYIWNTGYLFQVEFDDATEASGISGGPLENHYRLKQFHFHWGAVNEGGSEHTVDGHAYPAELHLVHWNSVKYQNYKEAVVGENGLAVIGVFLKLGAHHQTLQRLVDILPEIKHKDARAAMRPFDPSTLLPTCWDYWTYAGSLTTPPLTESVTWIIQKEPVEVAPSQLSAFRTLLFSALGEEEKMMVNNYRPLQPLMNRKVWASFQATNEGTRS

SEQ ID NO: 19117 - protein, 317 aa, Homo sapiens
MVVMNSLRVILQASPGKLLWRKFQIPRFMPARPCSLYTCTYKTRNRALHPLWESVDLVPGGDRQSPINIRWRDSVYDPGLKPLTISYDPATCLHVWNNGYSFLVEFEDSTDKSVIKGGPLEHNYRLKQFHFHWGAIDAWGSEHTVDSKCFPAELHLVHWNAVRFENFEDAALEENGLAVIGVFLKLGKHHKELQKLVDTLPSIKHKDALVEFGSFDPSCLMPTCPDYWTYSGSLTTPPLSESVTWIIKKQPVEVDHDQLEQFRTLLFTSEGEKEKRMVDNFRPLQPLMNRTVRSSFRHDYVLNVQAKPKPATSQATP

SEQ ID NO: 19118 - protein, 343 aa, Homo sapiens
MPRRSLHAAAVLLLVILKEQPSSPAPVNGSKWTYFGPDGENSWSKKYPSCGGLLQSPIDLHSDILQYDASLTPLEFQGYNLSANKQFLLTNNGHSVKLNLPSDMHIQGLQSRYSATQLHLHWGNPNDPHGSEHTVSGQHFAAELHIVHYNSDLYPDASTASNKSEGLAVLAVLIEMGSFNPSYDKIFSHLQHVKYKGQEAFVPGFNIEELLPERTAEYYRYRGSLTTPPCNPTVLWTVFRNPVQISQEQLLALETALYCTHMDDPSPREMINNFRQVQKFDERLVYTSFSQGIILSLALAGILGICIVVVVSIWLFRRKSIKKGDNKGVIYKPATKMETEAHA

SEQ ID NO: 19119 - protein, 354 aa, Homo sapiens
MPRRSLHAAAVLLLVILKEQPSSPAPVNGSKWTYFGPDGENSWSKKYPSCGGLLQSPIDLHSDILQYDASLTPLEFQGYNLSANKQFLLTNNGHSVKLNLPSDMHIQGLQSRYSATQLHLHWGNPNDPHGSEHTVSGQHFAAELHIVHYNSDLYPDASTASNKSEGLAVLAVLIEMGSFNPSYDKIFSHLQHVKYKGQEAFVPGFNIEELLPERTAEYYRYRGSLTTPPCNPTVLWTVFRNPVQISQEQLLALETALYCTHMDDPSPREMINNFRQVQKFDERLVYTSFSQVQVCTAAGLSLGIILSLALAGILGICIVVVVSIWLFRRKSIKKGDNKGVIYKPATKMETEAHA

SEQ ID NO: 19120 - protein, 263 aa, Homo sapiens
ASKWTYFGPDGENSWSKKYPSCGGLLQSPIDLHSDILQYDASLTPLEFQGYNLSANKQFLLTNNGHSVKLNLPSDMHIQGLQSRYSATQLHLHWGNPNDPHGSEHTVSGQHFAAELHIVHYNSDLYPDASTASNKSEGLAVLAVLIEMGSFNPSYDKIFSHLQHVKYKGQEAFVPGFNIEELLPERTAEYYRYRGSLTTPPCNPTVLWTVFRNPVQISQEQLLALETALYCTHMDDPSPREMINNFRQVQKFDERLVYTSFSQ

SEQ ID NO: 19121 - protein, 208 aa, Homo sapiens
MSLSITNNGHSVQVDFNDSDDRTVVTGGPLEGPYRLKQFHFHWGKKHDVGSEHTVDGKSFPSELHLVHWNAKKYSTFGEAASAPDGLAVVGVFLETGDEHPSMNRLTDALYMVRFKGTKAQFSCFNPKCLLPASRHYWTYPGSLTTPPLSESVTWIVLREPICISERQMGKFRSLLFTSEDDERIHMVNNFRPPQPLKGRVVKASFRA

SEQ ID NO: 19122 - protein, 337 aa, Homo sapiens
MLFSALLLEVIWILAADGGQHWTYEGPHGQDHWPASYPECGNNAQSPIDIQTDSVTFDPDLPALQPHGYDQPGTEPLDLHNNGHTVQLSLPSTLYLGGLPRKYVAAQLHLHWGQKGSPGGSEHQINSEATFAELHIVHYDSDSYDSLSEAAERPQGLAVLGILIEVGETKNIAYEHILSHLHEVRHKDQKTSVPPFNLRELLPKQLGQYFRYNGSLTTPPCYQSVLWTVFYRRSQISMEQLEKLQGTLFSTEEEPSKLLVQNYRALQPLNQRMVFASFIQAGSSYTTGEMLSLGVGILVGCLCLLLAVYFIARKIRKKRLENRKSVVFTSAQATTEA

SEQ ID NO: 19123 - protein, 290 aa, Homo sapiens
MADLSFIEDTVAFPEKEEDEEEEEEGVEWGYEEGVEWGLVFPDANGEYQSPINLNSREARYDPSLLDVRLSPNYVVCRDCEVTNDGHTIQVILKSKSVLSGGPLPQGHEFELYEVRFHWGRENQRGSEHTVNFKAFPMELHLIHWNSTLFGSIDEAVGKPHGIAIIALFVQIGKEHVGLKAVTEILQDIQYKGKSKTIPCFNPNTLLPDPLLRDYWVYEGSLTIPPCSEGVTWILFRYPLTISQLQIEEFRRLRTHVKGAELVEGCDGILGDNFRPTQPLSDRVIRAAFQ

SEQ ID NO: 19124 - protein, 337 aa, Homo sapiens [sequence omitted]

SEQ ID NO: 19125 - protein, 289 aa, Homo sapiens
ADLSFIEDTVAFPEKEEDEEEEEEGVEWGYEEGVEWGLVFPDANGEYQSPINLNSREARYDPSLLDVRLSPNYVVCRDCEVTNDGHTIQVILKSKSVLSGGPLPQGHEFELYEVRFHWGRENQRGSEHTVNFKAFPMELHLIHWNSTLFGSIDEAVGKPHGIAIIALFVQIGKEHVGLKAVTEILQDIQYKGKSKTIPCFNPNTLLPDPLLRDYWVYEGSLTIPPCSEGVTWILFRYPLTISQLQIEEFRRLRTHVKGAELVEGCDGILGDNFRPTQPLSDRVIRAAFQ

SEQ ID NO: 19126 - protein, 308 aa, Homo sapiens
MRALVLLLSLFLLGGQAQHVSDWTYSEGALDEAHWPQHYPACGGQRQSPINLQRTKVRYNPSLKGLNMTGYETQAGEFPMVNNGHTVQISLPSTMRMTVADGTVYIAQQMHFHWGGASSEISGSEHTVDGIRHVIEIHIVHYNSKYKSYDIAQDAPDGLAVLAAFVEVKNYPENTYYSNFISHLANIKYPGQRTTLTGLDVQDMLPRNLQHYYTYHGSLTTPPCTENVHWFVLADFVKLSRTQVWKLENSLLDHRNKTIHNDYRRTQPLNHRVVESNFPNQEYTLGSEFQFYLHKIEEILDYLRRALN

SEQ ID NO: 19127 - protein, 459 aa, Homo sapiens
MAPLCPSPWLPLLIPAPAPGLTVQLLLSLLLLMPVHPQRLPRMQEDSPLGGGSSGEDDPLGEEDLPSEEDSPREEDPPGEEDLPGEEDLPGEEDLPEVKPKSEEEGSLKLEDLPTVEAPGDPQEPQNNAHRDKEGDDQSHWRYGGDPPWPRVSPACAGRFQSPVDIRPQLAAFCPALRPLELLGFQLPPLPELRLRNNGHSVQLTLPPGLEMALGPGREYRALQLHLHWGAAGRPGSEHTVEGHRFPAEIHVVHLSTAFARVDEALGRPGGLAVLAAFLEEGPEENSAYEQLLSRLEEIAEEGSETQVPGLDISALLPSDFSRYFQYEGSLTTPPCAQGVIWTVFNQTVMLSAKQLHTLSDTLWGPGDSRLQLNFRATQPLNGRVIEASFPAGVDSSPRAAEPVQLNSCLAAGDILALVFGLLFAVTSVAFLVQMRRQHRRGTKGGVSYRPAEVAETGA

SEQ ID NO: 19128 - protein, 308 aa, Homo sapiens
MRALVLLLSLFLLGGQAQHVSDWTYSEGALDEAHWPQHYPACGGQRQSPINLQRTKVRYNPSLKGLNMTGYETQAGEFPMVNNGHTVQIGLPSTMRMTVADGIVYIAQQMHFHWGGASSEISGSEHTVDGIRHVIEIHIVHYNSKYKTYDIAQDAPDGLAVLAAFVEVKNYPENTYYSNFISHLANIKYPGQRTTLTGLDVQDMLPRNLQHYYTYHGSLTTPPCTENVHWFVLADFVKLSRTQVWKLENSLLDHRNKTIHNDYRRTQPLNHRVVESNFPNQEYTLGSEFQFYLHKIEEILDYLRRALN

SEQ ID NO: 19129 - protein, 308 aa, Homo sapiens [sequence omitted]

SEQ ID NO: 19130 - protein, 308 aa, Homo sapiens
MRALVLLLSLFLLGGQAQHVSDWTYSEGALDEAHWPQHYPACGGQRQSPINLQRTKVRYNPSLKGLNMTGYETQAGEFPMVNNGHTVQIGLPSTMRMTVADGIVYIAQQMHFHWGGASSEISGSEHTVDGIRHVIEIHIVHYNSKYKTYDIAQDAPDGLAVLAAFVEVKNYPENTYYSNFISHLANIKYPGQRTTLTGLDVQDMLPRNLQHYYTYHGSLTTPPCTENVHWFVLADFVKLSRTQVWKLENSLLDHRNKTIHNDYRRTQPLKHRVVESNFPNQEYTLGSEFQFYLHKIEEILDYLRRALN

SEQ ID NO: 19131 - protein, 328 aa, Homo sapiens
MEIVWEVLFLLQANFIVCISAQQNSPKIHEGWWAYKEVVQGSFVPVPSFWGLVNSAWNLCSVGKRQSPVNIETSHMIFDPFLTPLRINTGGRKVSGTMYNTGRHVSLRLDKEHLVNISGGPMTYSHRLEEIRLHFGSEDSQGSEHLLNGQAFSGEVQLIHYNHELYTNVTEAAKSPNGLVVVSIFIKVSDSSNPFLNRMLNRDTITRITYKNDAYLLQGLNIEELYPETSSFITYDGSMTIPPCYETASWIIMNKPVYITRMQMHSLRLLSQNQPSQIFLSMSDNFRPVQPLNNRCIRTNINFSLQGKDCPNNRAQKLQYRVNEWLLK

SEQ ID NO: 19132 - protein, 267 aa, Homo sapiens
GPPFWGLVNAAWSLCAVGKRQSPVDVELKRVLYDPFLPPLRLSTGGEKLRGTLYNTGRHVSFLPAPRPVVNVSGGPLLYSHRLSELRLLFGARDGAGSEHQINHQGFSAEVQLIHFNQELYGNFSAASRGPNGLAILSLFVNVASTSNPFLSRLLNRDTITRISYKNDAYFLQDLSLELLFPESFGFITYQGSLSTPPCSETVTWILIDRALNITSLQMHSLRLLSQNPPSQMFQSLSGNSRPLQPLAHRALRGNRDPRHPERRCRG

SEQ ID NO: 19133 - protein, 1445 aa, Homo sapiens
  unsure (1)..(1445): unsure at all Xaa locations
MRRLLEPCWWILFLKITSSVLHYVVCFPALTEGYVGALHENRHGSAVQIRRRKASGDPYWAYSGAYGPEHWVTSSVSCGGRHQSPIDILDQHARVGEEYQELQLDGFDNESSNKTWMKNTGKTVAILLKDDYFVSGAGLPGRFKAEKVEFHWGHSNGSAGSEHSINGRRFPVEMQIFFYNPDDFDSFQTAISENRIIGAMAIFFQVSPRDNSALDPIIHGLKGVVHHEKETFLDPFVLRDLLPASLGSYYRYTGSLTTPPCSEIVEWIVFRRPVPISYHQLEAFYSIFTTEQQDHVKSVEYLRNNFRPQQRLHDRVVSKSAVRDSWNHDMTDFLENPLGTEASKVCSSPPIHMKVQPLNQTALQVSWSQPETIYHPPIMNYMISYSWTKNEDEKEKTFTKDSDKDLKATISHVSPDSLYLFRVQAVCRNDMRSDFSQTMLFQANTTRIFQGTRIVKTGVPTASPASSADMAPISSGSSTWTSSGIPFSFVSMATGMGPSSSGSQATVASVVTSTLLAGLGFGGGGISSFPSTVWPTRLPTAASASKQAVRPVLATTEALASPGPDGDSSPTKDGEGTEEGEKDEKSESEDGEREHEEDGEKDSEKKEKSGVTHAAEERNQTEPSPTPSSPNRTAEGGHQTIPGHEQDHTAVPTDQTGGRRDAGPGLDPDMVTSTQVPPTATEEQYAGSDPKRPEMPSKKPMSRGDRFSEDSRFITVNPAEKNTSGMISRPAPGRMEWIIPLIVVSALTFVCLILLTAVLVYWRGCNKIKSKGFPRRFREVPSSGERGEKGSRKCFQTAHFYVEDSSSPRVVPNESIPIIPIPDDMEAIPVKQFVKHIGELYSNNQHGFSEDFEEVQRCTADMNITAEHSNHPENKHKNRYINILAYDHSRVKLRPLPGKDSKHSDYINANYVDGYNKAKAYIATQGPLKSTFEDFWRMIWEQNTGIIVMITNLVEKGRRKCDQYWPTENSEEYGNIIVTLKSTKIHACYTVRRFSIRNTKVKKGQKGNPKGRQNERVVIQYHYTQWPDMGVPEYALPVLTFVRRSSAARMPETGPVLVHCSAGVGRTGTYIVIDSMLQQIKDKSTVNVLGFLKHIRTQRNYLVQTEEQYIFIHDALLEAILGKETEVSSNQLHSYVNSILIPGVGGKTRLEKQFKLVTQCNAKYVECFSAQKECNKEKNRNSXVVPSERARVGLAPLPGMKGTDYINASYIMGYYRSNEFIITQHPLPHTTKDFWRMIWDHNAQIIVMLPDNQSLAEDEFVYWPSREESMNCEAFTVTLISKDRLCLSNEEQIIIHDFILEATQDDYVLEVRHFQCPKWPNPDAPISSTFELINVIKEEALTRDGPTIVHDEYGAVSAGMLCALTTLSQQLENENAVDVFQVAKMINLMRPGVFTDIEQYQFIYKARLSLVSTKENGNGPMTVDKNGAVLIADESDPAESMESLV

SEQ ID NO: 19134 - protein, 328 aa, Homo sapiens [sequence omitted]

SEQ ID NO: 19135 - protein, 328 aa, Homo sapiens
MGAAARLSAPRALVLWAALGAAAHIGPAPDPEDWWSYKDNLQGNFVPGPPFWGLVNAAWSLCAVGKRQSPVDVELKRVLYDPFLPPLRLSTGGEKLRGTLYNTGRHVSFLPAPRPVVNVSGGPLLYSHRLSELRLLFGARDGAGSEHQINHQGFSAEVQLIHFNQELYGNFSAASRGPNGLAILSLFVNVASTSNPFLSRLLNRDTITRISYKNDAYFLQDLSLELLFPESFGFITYQGSLSTPPCSETVTWILIDRALNITSLQMHSLRLLSQNPPSQIFQSLSGNSRPLQPLAHRALRGNRDPRHPERRCRGPNYRLHVDGVPHGR

SEQ ID NO: 19136 - protein, 328 aa, Homo sapiens [sequence omitted]

SEQ ID NO: 19137 - protein, 1445 aa, Homo sapiens
MRRLLEPCWWILFLKITSSVLHYVVCFPALTEGYVGALHENRHGSAVQIRRRKASGDPYWAYSGAYGPEHWVTSSVSCGSRHQSPIDILDQYARVGEEYQELQLDGFDNESSNKTWMKNTGKTVAILLKDDYFVSGAGLPGRFKAEKVEFHWGHSNGSAGSEHSINGRRFPVEMQIFFYNPDDFDSFQTAISENRIIGAMAIFFQVSPRDNSALDPIIHGLKGVVHHEKETFLDPFVLRDLLPASLGSYYRYTGSLTTPPCSEIVEWIVFRRPVPISYHQLEAFYSIFTTEQQDHVKSVEYLRNNFRPQQRLHDRVVSKSAVRDSWNHDMTDFLENPLGTEASKVCSSPPIHMKVQPLNQTALQVSWSQPETIYHPPIMNYMISYSWTKNEDEKEKTFTKDSDKDLKATISHVSPDSLYLFRVQAVCRNDMRSDFSQTMLFQANTTRIFQGTRIVKTGVPTASPASSADMAPISSGSSTWTSSGIPFSFVSMATGMGPSSSGSQATVASVVTSTLLAGLGFGGGGISSFPSTVWPTRLPTAASASKQAARPVLATTEALASPGPDGDSSPTKDGEGTEEGEKDEKSESEDGEREHEEDGEKDSEKKEKSGVTHAAEERNQTEPSPTPSSPNRTAEGGHQTIPGHEQDHTAVPTDQTGGRRDAGPGLDPDMVTSTQVPPTATEEQYAGSDPKRPEMPSKKPMSRGDRFSEDSRFITVNPAEKNTSGMISRPAPGRMEWIIPLIVVSALTFVCLILLIAVLVYWRGCNKIKSKGFPRRFREVPSSGERGEKGSRKCFQTAHFYVEDSSSPRVVPNESIPIIPIPDDMEAIPVKQFVKHIGELYSNNQHGFSEDFEEVQRCTADMNITAEHSNHPENKHKNRYINILAYDHSRVKLRPLPGKDSKHSDYINANYVDGYNKAKAYIATQGPLKSTFEDFWRMIWEQNTGIIVMITNLVEKGRRKCDQYWPTENSEEYGNIIVTLKSTKIHACYTVRRFSIRNTKVKKGQKGNPKGRQNERVVIQYHYTQWPDMGVPEYALPVLTFVRRSSAARMPETGPVLVHCSAGVGRTGTYIVIDSMLQQIKDKSTVNVLGFLKHIRTQRNYLVQTEEQYIFIHDALLEAILGKETEVSSNQLHSYVNSILIPGVGGKTRLEKQFKLVTQCNAKYVECFSAQKECNKEKNRNSSVVPSERARVGLAPLPGMKGTDYINASYIMGYYRSNEFIITQHPLPHTTKDFWRMIWDHNAQIIVMLPDNQSLAEDEFVYWPSREESMNCEAFTVTLISKDRLCLSNEEQIIIHDFILEATQDDYVLEVRHFQCPKWPNPDAPISSTFELINVIKEEALTRDGPTIVHDEYGAVSAGMLCALTTLSQQLENENAVDVFQVAKMINLMRPGVFTDIEQYQFIYKARLSLVSTKENGNGPMTVDKNGAVLIADESDPAESMESLV

SEQ ID NO: 19138 - protein, 312 aa, Homo sapiens
MRMLLALLALSAARPSASAESHWCYEVQAESSNYPCLVPVKWGGNCQKDRQSPINIVTTKAKVDKKLGRFFFSGYDKKQTWTVQNNGHSVMMLLENKASISGGGLPAPYQAKQLHLHWSDLPYKGSEHSLDGEHFAMEMHIVHEKEKGTSRNVKEAQDPEDEIAVLAFLVEAGTQVNEGFQPLVEALSNIPKPEMSTTMAESSLLDLLPKEEKLRHYFRYLGSLTTPTCDEKVVWTVFREPIQLHREQILAFSQKLYYDKEQTVSMKDNVRPLQQLGQRTVIKSGAPGRPLPWALPALLGPMLACLLAGFLR

SEQ ID NO: 19139 - protein, 266 aa, Homo sapiens
AESHWCYEVQAESSNYPCLVPVKWGGNCQKDRQSPINIVTTKAKVDKKLGRFFFSGYDKKQTWTVQNNGHSVMMLLENKASISGGGLPAPYQAKQLHLHWSDLPYKGSEHSLDGEHFAMEMHIVHEKEKGTSRNVKEAQDPEDEIAVLAFLVEAGTQVNEGFQPLVEALSNIPKPEMSTTMAESSLLDLLPKEEKLRHYFRYLGSLTTPTCDEKVVWTVFREPIQLHREQILAFSQKLYYDKEQTVSMKDNVRPLQQLGQRTVIKS

SEQ ID NO: 19140 - protein, 294 aa, Homo sapiens
MRMLLALLALSAARPSASAVPVKWGGNCQKDRQSPINIVTTKAKVDKKLGRFFFSGYDKKQTWTVQNNGHSVMMLLENKASISGGGLPAPYQAKQLHLHWSDLPYKGSEHSLDGEHFAMEMHIVHEKEKGTSRNVKEAQDPEDEIAVLAFLVEAGTQVNEGFQPLVEALSNIPKPEMSTTMAESSLLDLLPKEEKLRHYFRYLGSLTTPTCDEKVVWTVFREPIQLHREQILAFSQKLYYDKEQTVSMKDNVRPLQQLGQRTVIKSGAPGRPLPWALPALLGPMLACLLAGFLR

SEQ ID NO: 19141 - protein, 1445 aa, Homo sapiens
MRRLLEPCWWILFLKITSSVLHYVVCFPALTEGYVGALHENRHGSAVQIRRRKASGDPYWAYSGAYGPEHWVTSSVSCGSRHQSPIDILDQYARVGEEYQELQLDGFDNESSNKTWMKNTGKTVAILLKDDYFVSGAGLPGRFKAEKVEFHWGHSNGSAGSEHSINGRRFPVEMQIFFYNPDDFDSFQTAISEWRIIGAMAIFFQVSPRDNSALDPIIHGLKGVVHHEKETFLDPFVLRDLLPASLGSYYRYTGSLTTPPCSEIVEWIVFRRPVPISYHQLEAFYSIFTTEQQDHVKSVEYLRNNFRPQQRLHDRVVSKSAVRDSWNHDMTDFLENPLGTEASKVCSSPPIHMKVQPLNQTALQVSWSQPETIYHPPIMNYMISYSWTKNEDEKEKTFTKDSDKDLKATISHVSPDSLYLFRVQAVCRNDMRSDFSQTMLFQANTTRIFQGTRIVKTGVPTASPASSADMAPISSGSSTWTSSGIPFSFVSMATGMGPSSSGSQATVASVVTSTLLAGLGFGGGGISSFPSTVWPTRLPTAASASKQAARPVLATTEALASPGPDGDSSPTKDGEGTEEGEKDEKSESEDGEREHEEDGEKDSEKKEKSGVTHAAEERNQTEPSPTPSSPNRTAEGGHQTIPGHEQDHTAVPTDQTGGRRDAGPGLDPDNVTSTQVPPTATEEQYAGSDPKRPEMPSKKPMSRGDRFSEDSRFITVNPAEKNTSGMISRPAPGRMEWIIPLIVVSALTFVCLILLIAVLVYWRGCNKIKSKGFPRRFREVPSSGERGEKGSRKCFQTAHFYVEDSSSPRVVPNESIPIIPIPDDMEAIPVKQFVKHIGELYSNNQHGFSEDFEEVQRCTADMNITAEHSNHPENKHKNRYINILAYDHSRVKLRPLPGKDSKHSDYINANYVDGYNKAKAYIATQGPLKSTFEDFWRMIWEQNTGIIVMITNLVEKGRRKCDQYWPTENSEEYGNIIVTLKSTKIHACYTVRRFSIRNTKVKKGQKGNPKGRQNERVVIQYHYTQWPDMGVPEYALPVLTFVRRSSAARMPETGPVLVHCSAGVGRTGTYIVIDSMLQQIKDKSTVNVLGFLKHIRTQRNYLVQTEEQYIFIHDALLEAILGKETEVSSNQLHSYVNSILIPGVGGKTRLEKQFKLVTQCNAKYVECFSAQKECNKEKNRNSSVVPSERARVGLAPLPGMKGTDYINASYIMGYYRSNEFIITQHPLPHTTKDFWRMIWDHNAQIIVMLPDNQSLAEDEFVYWPSREESMNCEAFTVTLISKDRLCLSNEEQIIIHDFILEATQDDYVLEVRHFQCPKWPNPDAPISSTFELINVIKEEALTRDGPTIVHDEYGAVSAGMLCALTTLSQQLENENAVDVFQVAKMINLMRPGVFTDIEQYQFIYKARLSLVSTKENGNGPMTVDKNGAVLIADESDPAESMESLV

SEQ ID NO: 19142 - protein, 222 aa, Homo sapiens
MMLLENKASISGGGLPAPYQAKQLHLHWSDLPYKGSEHSLDGEHFAMEMHIVHEKEKGTSRNVKEAQDPEDEIAVLAFLVEAGTQVNEGFQPLVEALSNIPKPEMSTTMAESSLLDLLPKEEKLRHYFRYLGSLTTPTCDEKVVWTVFREPIQLHREQILAFSQKLYYDKEQTVSMKDNVRPLQQLGQRTVIKSGAPGRPLPWALPALLGPMLACLLAGFLR

SEQ ID NO: 19143 - protein, 130 aa, Homo sapiens
MVSVIGVFLKLGAHHQMLQRLVDVLLEVKHKDARAAMRPFDPSALLPTCWDYWTYVGSLTTPPLTESVTWIIQKEPVEVAPSQLSAFRTLLFSALGEEKKMTVNNYRPLQPLMNWKVWASFQATNEGTRS

SEQ ID NO: 19144 - protein, 130 aa, Homo sapiens
MLSVIGVFLKLGAHHQMLQRLVDILLEVKHKDAQAAMRPFDPSALLPTCWDYWTYVGSLTTPPLTESVTWIIQKEPVEVAPSQLSAFRTLLFSALGEEKKMMVNNYRPLQPLMNWKVWASFQATNEGTRS

SEQ ID NO: 19145 - protein, 1005 aa, Homo sapiens
MRILKRFLACIQLLCVCRLDWANGYYRQQRKLVEEIGWSYTGALNQKNWGKKYPTCNSPKQSPINIDEDLTQVNVNLKKLKFQGWDKTSLENTFIHNTGKTVEINLTNDYRVSGGVSEMVFKASKITFHWGKCNMSSDGSEHSLEGQKFPLEMQIYCFDADRFSSFEEAVKGKGKLRALSILFEVGTEENLDFKAIIDGVESVSRFGKQAALDPFILLNLLPNSTDKYYIYNGSLTSPPCTDTVDWIVFKDTVSISESQLAVFCEVLTMQQSGYVMLMDYLQNNFREQQYKFSRQVFSSYTGKEEIHEAACRSEPENVQADPENYTSLLVTWERPRVVYDTMIEKFAVLYQQLDGEDQTKHEFLTDGYQDLGAILNNLLPNMSYVLQIVAICTNGLYGKYSDQLIVDMPTDNPELDLFPELIGTEEIIKEEEEGKDIEEGAIVNPGRDSATNQIRKKEPQISTTTHYNRIGTKYNEAKTNRSPTRGSEFSGKGDVPNTSLNSTSQPVTKLATEKDISLTSQTVTELPPHTVEGTSASLNDGSKTVLRSPHMNLSGTAESLNTVSITEYEEESLLTSFKLDTGAEDSSGSSPATSAIPFISENISQGYIFSSENPETITYDVLIPESARNASEDSTSSGSEESLKDPSMEGNVWFPSSTDITAQPDVGSGRESFLQTNYTEIRVDESEKTTKSFSAGPVMSQGPSVTDLEMPHYSTFAYFPTEVTPHAFTPSSRQQDLVSTVNVVYSQTTQPVYNGETPLQPSYSSEVFPLVTPLLLDNQILNTTPAASSSDSALHATPVFPSVDVSFESILSSYDGAPLLPFSSASFSSELFRHLHTVSQILPQVTSATESDKVPLHASLPVAGGDLLLEPSLAQYSDVLSTTHAASETLEFGSESGVLYKTLMFSQVEPPSSDAMMHARSSGPEPSYALSDNEGSQHIFTVSYSSAIPVHDSVGVTYQGSLFSGPSHIPIPKSSLITPTASLLQPTHALSGDGEWSGAEFDIKL

SEQ ID NO: 19146 - protein, 2314 aa, Homo sapiens
MRILKRFLACIQLLCVCRLDWANGYYRQQRKLVEEIGWSYTGALNQKNWGKKYPTCNSPKQSPINIDEDLTQVNVNLKKLKFQGWDKTSLENTFIHNTGKTVEINLTNDYRVSGGVSEMVFKASKITFHWGKCNMSSDGSEHSLEGQKFPLEMQIYCFDADRFSSFEEAVKGKGKLRALSILFEVGTEENLDFKAIIDGVESVSRFGKQAALDPFILLNLLPNSTDKYYIYNGSLTSPPCTDTVDWIVFKDTVSISESQLAVFCEVLTMQQSGYVMLMDYLQNNFREQQYKFSRQVFSSYTGKEEIHEAVCSSEPENVQADPENYTSLLVTWERPRVVYDTMIEKFAVLYQQLDGEDQTKHEFLTDGYQDLGAILNNLLPNMSYVLQIVAICTNGLYGKYSDQLIVDMPTDNPELDLFPELIGTEEIIKEEEEGKDIEEGAIVNPGRDSATNQIRKKEPQISTTTHYNRIGTKYNEAKTNRSPTRGSEFSGKGDVPNTSLNSTSQPVTKLATEKDISLTSQTVTELPPHTVEGTSASLNDGSKTVLRSPHMNLSGTAESLNTVSITEYEEESLLTSFKLDTGAEDSSGSSPATSAIPFISENISQGYIFSSENPETITYDVLIPESARNASEDSTSSGSEESLKDPSMEGNVWFPSSTDITAQPDVGSGRESFLQTNYTEIRVDESEKTTKSFSAGPVMSQGPSVTDLEMPHYSTFAYFPTEVTPHAFTPSSRQQDLVSTVNVVYSQTTQPVYNGETPLQPSYSSEVFPLVTPLLLDNQILNTTPAASSSDSALHATPVFPSVDVSFESILSSYDGAPLLPFSSASFSSELFRHLHTVSQILPQVTSATESDKVPLHASLPVAGGDLLLEPSLAQYSDVLSTTHAASETLEFGSESGVLYKTLMFSQVEPPSSDAMMHARSSGPEPSYALSDNEGSQHIFTVSYSSAIPVHDSVGVTYQGSLFSGPSHIPIPKSSLITPTASLLQPTHALSGDGEWSGASSDSEFLLPDTDGLTALNISSPVSVAEFTYTTSVFGDDNKALSKSEIIYGNETELQIPSFNEMVYPSESTVMPNMYDNVNKLNASLQETSVSISSTKGMFPGSLAHTTTKVFDHEISQVPENNFSVQPTHTVSQASGDTSLKPVLSANSEPASSDPASSEMLSPSTQLLFYETSASFSTEVLLQPSFQASDVDTLLKTVLPAVPSDPILVETPKVDKISSTMLHLIVSNSASSENMLHSTSVPVFDVSPTSHMHSASLQGLTISYASEKYEPVLLKSESSHQVVPSLYSNDELFQTANLEINQAHPPKGRHVFATPVLSIDEPLNTLINKLIHSDEILTSTKSSVTGKVFAGIPTVASDTFVSTDHSVPIGNGHVAITAVSPHRDGSVTSTKLLFPSKATSELSHSAKSDAGLVGGGEDGDTDDDGDDDDDRDSDGLSIHKCMSCSSYRESQEKVMNDSDTHENSLMDQNNPISYSLSENSEEDNRVTSVSSDSQTGMDRSPGKSPSANGLSQKHNDGKEENDIQTGSALLPLSPESKAWAVLTSDEESGSGQGTSDSLNENETSTDFSFADTNEKDADGILAAGDSEITPGFPQSPTSSVTSENSEVFHVSEAEASNSSHESRIGLAEGLESEKKAVIPLVIVSALTFICLVVLVGILIYWRKCFQTAHFYLEDSTSPRVISTPPTPIFPISDDVGAIPIKHFPKHVADLHASSGFTEEFETLKEFYQEVQSCTVDLGITADSSNHPDNKHKNRYINIVAYDHSRVKLAQLAEKDGKLTDYINANYVDGYNRPKAYIAAQGPLKSTAEDFWRMIWEHNVEVIVMITNLVEKGRRKCDQYWPADGSEEYGNFLVTQKSVQVLAYYTVRNFTLRNTKIKKGSQKGRPSGRVVTQYHYTQWPDMGVPEYSLPVLTFVRKAAYAKRHAVGPVVVHCSAGVGRTGTYIVLDSMLQQIQHEGTVNIFGFLKHIRSQRNYLVQTEEQYVFIHDTLVEAILSKETEVLDSHIHAYVNALLIPGPAGKTKLEKQFQLLSQSNIQQSDYSAALKQCNREKNRTSSIIPVERSRVGISSLSGEGTDYINASYIMGYYQSNEFIITQHPLLHTIKDFWRMIWDHNAQLVVMIPDGQNMAEDEFVYWPNKDEPINCESFKVTLMAEEHKCLSNEEKLIIQDFILEATQDDYVLEVRHFQCPKWPNPDSPISKTFELISVIKEEAANRDGPMIVHDEHGGVTAGTFCALTTLMHQLEKENSVDVYQVAKMINLMRPGVFADIEQYQFLYKVILSLVSTRQEENPSTSLDSNGAALPDGNIAESLESLV

SEQ ID NO: 19147 - protein, 2307 aa, Homo sapiens
MRILKRFLACIQLLCVCRLDWANGYYRQQRKLVEEIGWSYTGALNQKNWGKKYPTCNSPKQSPINIDEDLTQVNVNLKKLKFQGWDKTSLENTFIHNTGKTVEINLTNDYRVSGGVSEMVFKASKITFHWGKCNMSSDGSEHSLEGQKFPLEMQIYCFDADRFSSFEEAVKGKGKLRALSILFEVGTEENLDFKAIIDGVESVSRFGKQAALDPFILLNLLPNSTDKYYIYNGSLTSPPCTDTVDWIVFKDTVSISESQLAVFCEVLTMQQSGYVMLMDYLQNNFREQQYKFSRQVFSSYTGKEEIHEAVCSSEPENVQADPENYTSLLVTWERPRVVYDTMIEKFAVLYQQLDGEDQTKHEFLTDGYQDLGAILNNLLPNMSYVLQIVAICTNGLYGKYSDQLIVDMPTDNPELDLFPELIGTEEIIKEEEEGKDIEEGAIVNPGRDSATNQIRKKEPQISTTTHYNRIGTKYNEAKTNRSPTRGSEFSGKGDVPNTSLNSTSQPVTKLATEKDISLTSQTVTELPPHTVEGTSASLNDGSKTVLRSPHMNLSGTAESLNTVSITEYEEESLLTSFKLDTGAEDSSGSSPATSAIPFISENISQGYIFSSENPETITYDVLIPESARNASEDSTSSGSEESLKDPSMEGNVWFPSSTDITAQPDVGSGRESFLQTNYTEIRVDESEKTTKSFSAGPVMSQGPSVTDLEMPHYSTFAYFPTEVTPHAFTPSSRQQDLVSTVNVVYSQTTQPVYNGETPLQPSYSSEVFPLVTPLLLDNQILNTTPAASSSDSALHATPVFPSVDVSFESILSSYDGAPLLPFSSASFSSELFRHLHTVSQILPQVTSATESDKVPLHASLPVAGGDLLLEPSLAQYSDVLSTTHAASETLEFGSESGVLYKTLMFSQVEPPSSDAMMHARSSGPEPSYALSDNEGSQHIFTVSYSSAIPVHDSVGVTYQGSLFSGPSHIPIPKSSLITPTASLLQPTHALSGDGEWSGASSDSEFLLPDTDGLTALNISSPVSVAEFTYTTSVFGDDNKALSKSEIIYGNETELQIPSFNEMVYPSESTVMPNMYDNVNKLNASLQETSVSISSTKGMFPGSLAHTTTKVFDHEISQVPENNFSVQPTHTVSQASGDTSLKPVLSANSEPASSDPASSEMLSPSTQLLFYETSASFSTEVLLQPSFQASDVDTLLKTVLPAVPSDPILVETPKVDKISSTMLHLIVSNSASSENMLHSTSVPVFDVSPTSHMHSASLQGLTISYASEKYEPVLLKSESSHQVVPSLYSNDELFQTANLEINQAHPPKGRHVFATPVLSIDEPLNTLINKLIHSDEILTSTKSSVTGKVFAGIPTVASDTFVSTDHSVPIGNGHVAITAVSPHRDGSVTSTKLLFPSKATSELSHSAKSDAGLVGGGEDGDTDDDGDDDDDRDSDGLSIHKCMSCSSYRESQEKVMNDSDTHENSLMDQNNPISYSLSENSEEDNRVTSVSSDSQTGMDRSPGKSPSANGLSQKHNDGKEENDIQTGSALLPLSPESKAWAVLTSDEESGSGQGTSDSLNENETSTDFSFADTNEKDADGILAAGDSEITPGFPQSPTSSVTSENSEVFHVSEAEASNSSHESRIGLAEGLESEKKAVIPLVIVSALTFICLVVLVGILIYWRKCFQTAHFYLEDSTSPRVISTPPTPIFPISDDVGAIPIKHFPKHVADLHASSGFTEEFEEVQSCTVDLGITADSSNHPDNKHKNRYINIVAYDHSRVKLAQLAEKDGKLTDYINANYVDGYNRPKAYIAAQGPLKSTAEDFWRMIWEHNVEVIVMITNLVEKGRRKCDQYWPADGSEEYGNFLVTQKSVQVLAYYTVRNFTLRNTKIKKGSQKGRPSGRVVTQYHYTQWPDMGVPEYSLPVLTFVRKAAYAKRHAVGPVVVHCSAGVGRTGTYIVLDSMLQQIQHEGTVNIFGFLKHIRSQRNYLVQTEEQYVFIHDTLVEAILSKETEVLDSHIHAYVNALLIPGPAGKTKLEKQFQLLSQSNIQQSDYSAALKQCNREKNRTSSIIPVERSRVGISSLSGEGTDYINASYIMGYYQSNEFIITQHPLLHTIKDFWRMIWDHNAQLVVMIPDGQNMAEDEFVYWPNKDEPINCESFKVTLMAEEHKCLSNEEKLIIQDFILEATQDDYVLEVRHFQCPKWPNPDSPISKTFELISVIKEEAANRDGPMIVHDEHGGVTAGTFCALTTLMHQLEKENSVDVYQVAKMINLMRPGVFADIEQYQFLYKVILSLVSTRQEENPSTSLDSNGAALPDGNIAESLESLV

SEQ ID NO: 19148 - protein, 260 aa, Equus caballus
AHSDWGYDSPBGPZEWVKLYPIABGBBQSPIDIKTSETKHDTSLKPFSVSYDPATAKEIVNVGHSFQVKFEDSDNRSVLKDGPLPGSYRLVQFHFHWGSTDDYGSEHTVDGVKYSAELHLVHWNSSKYSSFDEASSQADGLAILGVLMKVGEANPKLQKVLDALNEVKTKGKKAPFKNFDPSSLLPSSPDYWTYSGSLTHPPLYESVTWIVCKENISISSQQLSQFRSLLSNVEGGKAVPIQHNNRPPQPLKGRTVRAFF

SEQ ID NO: 19149 - protein, 259 aa, Equus caballus
SHHWGYGEHDGPKHWHKDFPIAKGERQSPVDIDTKAAVHDAALKPLAVHYQEATSRRIVNNGHSFNVEFDDSEDKAVLEGGPLTGTYRLIQFHFHWGSSNGQGSEHTVDKKKYAAELHLVHWNTKYGDFGKAVQEPDGLAVVGVFLKVGGAKPGLQKVLDVLDSIKTKGKSADFTNFDPRGLLPESLDYWTYPGSLTTPPLLECVTWIVLREPISVSSEQLLKFRSLNFNAEGKPEDPMVDNWRPAQPLNNRQIRASFK

SEQ ID NO: 19150 - protein, 259 aa, Equus caballus
AKEWGYADHNGPDHWHEFYPIAKGDNQSPIELHTKDINHDPSLKAWTASYDPGSAKTILNNGRTCRVVFDDTYDRSMLRGGPLTAPYRLRQFHLHWGSSDDHGSEHTVDGVKYAAELHLVHWNPKYNTYGGALKQPDGIAVVGVFLKIGREKGEFQLFLDALDKIKTKGKEAPFTNFDPSCLFPTCRDYWTYRGSFTTPPCEECIVWLLLKEPITVSSDQVAKLRSLFSSAENEPPVPLVRNWRPPQPLKGRVVRASFK

SEQ ID NO: 19151 - protein, 331 aa, Sus scrofa
MGGAARLSAPRALVLWAVLGAAAHIGPAPDPEDWWSYKDNLQGNFVPGPPFWGLVNAAWSLCAVGKRQSPVDVELKRVLYDPFLPPLRLSTGGEKLRGTLYNTGRHVSFLPAPRPVVNVSGGPLLYSHRLSELLLLFGAHDGAGSEHQINHQGFSAEVQLIHFNQELYGNLSAASRGPNGLAILSLFVNVSQVAGNSNPFLSRLLNRDTITRISYKNDAYFLQDLSLELLFPESFGFITYQGSLSTPPCSETVTWILIDRALNITSLQMHSLRLLSQNPPSQIFQSLSGNGRPLQPLAHRALRGNRDPRHPERRCRGPNYRLHVDGAPHGR

SEQ ID NO: 19152 - protein, 260 aa, Bos taurus
MSHHWGYGKHNGPEHWHKDFPIANGERQSPVDIDTKAVVQDPALKPLALVYGEATSRRMVNNGHSFNVEYDDSQDKAVLKDGPLTGTYRLVQFHFHWGSSDDQGSEHTVDRKKYAAELHLVHWNTKYGDFGTAAQQPDGLAVVGVFLKVGDANPALQKVLDALDSIKTKGKSTDFPNFDPGSLLPNVLDYWTYPGSLTTPPLLESVTWIVLKEPISVSSQQMLKFRTLNFNAEGEPELLMLANWRPAQPLKNRQVRGFPK

SEQ ID NO: 19153 - protein, 259 aa, Bos taurus
SHHWGYGKHBGPZHWHKDFPIANGERQSPVNIDTKAVVQDPALKPLALVYGEATSRRMVNNGHSFNVEYDDSQDKAVLKDGPLTGTYRLVQFHFHWGSSBBQGSEHTVDRKKYAAELHLVHWNTKYGDFGTAAQQPDGLAVVGVFLKVGDANPALQKVLDALDSIKTKGKSTDFPNFDPGSLLPNVLDYWTYPGSLTTPPLLESVTWIVLKEPISVSSQQMLKFRTLNFNAEGEPELLMLANWRPAQPLKNRQVRGFPK

SEQ ID NO: 19154 - protein, 319 aa, Bos taurus
MITLLFLLVVGAQAQHEWTYSEGVLDEKHWRLQYPDCGGTRQSPIDLKMKKVRYNPSLRALNLTGYGLRQGEFPMTNNGHTVQISLPSSMRMTTSDGSQYLAKQMHFHWGGDSSEISGSEHTVDGMRYIIEIHVVHYHSKYGSYEEAQNEPDGLAVLAALVEVKDYAENTYYSNFISHLEDIRYAGQSTVLRDLDIQDMLPGDLRYYYSYLGSLTTPSCTENVHWFVVADTVKLSKTQIEKLENSLLNHQNETIQNNYRSTQPLNHRVVEANFVSHPHQEYTLGSKLHFYLNNIDQNLEYLRRFIEQKITKRKKEKYWP

SEQ ID NO: 19155 - protein, 312 aa, Bos taurus
MRLLLALLVLAAAPPQARAASHWCYQIQVKPSNYTCLEPDEWEGSCQNNRQSPVNIVTAKTQLDPNLGRFSFSGYNMKHQWVVQNNGHTVMVLLENKPSIAGGGLSTRYQATQLHLHWSRAMDRGSEHSFDGERFAMEMHIVHEKEKGLSGNASQNQFAEDEIAVLAFMVEDGSKNVNFQPLVEALSDIPRPNMNTTMKEGVSLFDLLPEEESLRHYFRYLGSLTTPTCDEKVVWTVFQKPIQLHRDQILAFSQKLFYDDQQKVNMTDNVRPVQSLGQRQVFRSGAPGLLLAQPLPTLLAPVLACLTVGFLR

SEQ ID NO: 19156 - protein, 328 aa, Bos taurus
MGAAARLSAPRALVLWAALGAAAHIGPAPDPEDWWSYKDNLQGNFVPGPPFWGLVNAAWSLCVVGKRQSPVDVELKRVLYDPFLPPLRLSTGGEKLRGTLYNTGRHVSFLPAPRPVVNVSGGPLLYSHRLSELRLLFGARDGAGSEHQINHQGFSAEVQLIHFNQELYGNLSAATRGPNGLAILSLFVNVAGSSNPFLSRLLNRDTITRISYKNDAYFLQDLSLELLFPESFGFITYQGSLSTPPCSETVTWILIDRALNITSLQMHSLRLLSQNPPSQIFQSLSGNGRPLQPLAHRALRGNRDPRHPERRCRGPNYRLHVDGAPHGR

SEQ ID NO: 19157 - protein, 261 aa, Ovis aries
MASPDWGYDGENGPEHWCKLHPIANGNNQSPIDIKTSETKRDPSLKPLSISYNPATAKEIVNVGHSFHVNFEDSDNRSVLKGGPLPESYRLRQFHFHWGSTDDCGSEHLVDGATFSAELHLVHWNSAKYPSFADAASQADGLVVVGVLMKVGQANPNLQKVLDALKTVKTKNKKAPFTNFDPSVLLPSCPDYWAYFGSLTHPPLHESVTWIIFKETISVSAEQLAQFRSLLANAEGDKEVCIKQNYRPPQPLKGRTVKASF

SEQ ID NO: 19158 - protein, 259 aa, Ovis aries
SHHWGYGEHNGPEHWHKDFPIADGERQSPVDIDTKAVVPDPALKPLALLYEQAASRRMVNNGHSFNVEFDDSQDKAVLKDGPLTGTYRLVQFHFHWGSSDDQGSEHTVDRKKYAAELHLVHWNTKYGDFGTAAQQPDGLAVVGVFLKVGDANPALQKVLDVLDSIKTKGKSADFPNFDPSSLLKRALNYWTYPGSLTNPPLLESVTWVVLKEPTSVSSQQMLKFRSLNFNAEGEPELLMLANWRPAQPLKNRQVRVFPK

SEQ ID NO: 19159 - protein, 307 aa, Ovis aries
GHGVEWTYSEGMLDEAHWPLEYPKCGGRRQSPIDLQMKKVQYNPSLRALNLTGYGLWHGEFPVTNNGHTVQISLPSTMSMTTSDGTQYLAKQMHFHWGGASSEISGSEHTVDGMRYVIEIHVVHYNSKYNSYEEAQKEPDGLAVLAALVEVKDYTENAYYSKFISHLEDIRYAGQSTVLRGLDIEDMLPGDLRYYYSYLGSLTTPPCTENVHWFVVADTVKLSKTQVEKLENSLLNHQNKTIQNDYRRTQPLNHRVVEANFMSRPHQEYTLASKLHFYLNNIDQTLEYLRRFIEQKIPKRKKQENWP

SEQ ID NO: 19160 - protein, 307 aa, Ovis aries
GHGVEWTYSEGMLDEAHWPLEYPKCGGRRQSPIDLQMKKVQYNPSLRALNLTGYGLWHGEFPVTNNGHTVQISLPSTMSMTTSDGTQYLAKQMHFHWGGASSEISGSEHTVDGMRYVIEIHVVHYNSKYNSYEEAQKEPDGLAVLAALVEVKDYTENAYYSKFISHLEDIRYAGQSTVLRGLDIEDMLPGDLRYYYSYLGSLTTPPCTENVHWFVVADTVKLSKTQVEKLENSLLNHQNKTIQNDYRRTQPLNHRVVEANFMSRPHQEYTLASKLHFYLNNIDQTLEYLRRFIEQKMPKRKKQENWP

SEQ ID NO: 19161 - protein, 328 aa, Ovis aries
MGAAPRLSAPRVLVLWAALGAAAHIGPAPDPEDWWSYKDNLQGNFVPGPPFWGLVNAAWSLCAVGKRQSPVDVDLKRVLYDPFLPPLRLSTGGEKLRGTLYNTGRHVSFLPAPRPVVNVSGGPLLYSHRLSELRLLFGARDGAGSEHQINHQGFSAEVQLIHFNQELYGNLSAATRGPNGLAILSLFVNVAGSSNPFLSRLLNRDTITRISYKNDAYFLQDLSLELLFPESFGFITYQGSLSTPPCSETVTWILIDRALNITSLQMHSLRLLSQNPPSQIFQSLSGNGRPLQPLAHRALRGNRDPRHPERRCRGPNYRLHVDDVPHGL

SEQ ID NO: 19162 - protein, 259 aa, Oryctolagus cuniculus
SHHWGYGKHNGPEHWHKDFPIADGERQSPIDIDTDAAKHDPSLKPLRVSYEHPISRRIINNGHSFNVEFDDSHDKSVLKEGPLEGTYRLIQFHFHWGSSDGEGSEHTVNKKKYAAELHLVHWNTKYGDFGKAVKHPDGLAVLGIFLKIGSATPGLQKVVDTLSSIKTKGKSVDFTNFDPRGLLPESLDYWTYPGSLTTPPLLQCVTWIVLKEPITVSSEQMLKFRNLNFNKEAEPEEPMVDNWRPTQPLKGRQVKASFV

SEQ ID NO: 19163 - protein, 259 aa, Oryctolagus cuniculus
SHHWGYGKHNGPEHWHKDFPIANGERQSPIDIDTNAAKHDPSLKPLRVCYEHPISRRIINNGHSFNVEFDDSHDKTVLKEGPLEGTYRLIQFHFHWGSSDGQGSEHTVNKKKYAAELHLVHWNTKYGDFGKAVKHPDGLAVLGIFLKIGSATPGLQKVVDTLSSIKTKGKSVDFTDFDPRGLLPESLDYWTYPGSLTTPPLLECVTWIVLKEPITVSSEQMLKFRNLNFNKEAEPEEPMVDNWRPTQPLKGRQVKASFV

SEQ ID NO: 19164 - protein, 235 aa, Oryctolagus cuniculus
GNKQSPVDIKSSEVKHDTSLKPFSVSYNPASAKEIINVGHSFHVNFEDDSQSVLKGGPLSDNYRLSQFHFHWGKTDDYGSEHTVDGAKFSAELHLVHWNSGKYPNIADSVSKADGLAIVAVFLKVGQANPKLQKVLDALSAVKTKGKKASFTNFDPSTLLPPSLDYWTYSGSLTHPPLHESVTWLICKDSISISSEQLAQFRSLLSNAEGEAAVPILHNNRPPQPLKGRTVKASF

SEQ ID NO: 19165 - protein, 235 aa, Oryctolagus cuniculus
  unsure (1)..(235): unsure at all Xaa locations
GXKQSPVDIKSSEVKHDTSLKPFSVSYNPASAKEIINVGHSFHVNFEDDSQSVLKGGPLSDNYRLSQFHFHWGKTDDYGSEHTVDGAKFSAELHLVHWNSGKYPNIADSVSKADGLAIVAVFLKVGQANPKLQKVLDALSAVKTKGKKASFTNFDPSTLLPPSLDYWTYSGSLTHPPLHESVTWLICKDSISISSEQLAQFRSLLSNAEGEAAVPILHNNRPPQPLKGRTVKASF

SEQ ID NO: 19166 - protein, 232 aa, Oryctolagus cuniculus
GKHNGPEHWHKDFPIANGERQSPIDIDTNAAKHDPSLKPLRVCYEHPISRRIINNGHSFNVEFDDSHDKTVLKEGPLEGTYRLIQFHFHWGSSDGQGSEHTVNKKKYAAELHLVHWNTKYGDFGKAVKHPDGLAVLGIFLKIGSATPGLQKVVDTLSSIKTKGKSVDFTDFDPRGLLPESLDYWTYPGSLTTPPLLECVTWIVLKEPITVSSEQMLKFRNLNFNKEAEPEEP

SEQ ID NO: 19167 - protein, 355 aa, Oryctolagus cuniculus
MPVGSLRAAAVLLLGIAQLPPSSAAPRNGSKWTYVGADGERSWFKKYPSCGGRLQSPIDLHGDTLQYDASLTPLEFQGYNVSADKQFNLTNDGHSVRLNLPPDMYLQGLPSRYTATQLHLHWGNRNDPYGSEHTVGGKQFAAELHIVHYNSDSYPDISTASNKSEGLAVLAVLIEKGYFNPYYDRIFSFLRYVKYKGQNVRIPTFNIEELLPEKPAEYYRYRGSLTTPPCYPSVLWTVFRNPVTISQEQLLALQTALYFTRADDPAPREMINNFRPIQNFGVRLVHASFQEVQILPGTGLSVGIILSVALAGVLGICIVLAVCIWFFRRKKGSKKGDNKGVIYNPAIKMETEAHA

SEQ ID NO: 19168 - protein, 308 aa, Oryctolagus cuniculus
MQLLFALLALGALRPLAGEELHWCYEIQASNYSCLGPDKWQEDCQKSRQSPINIVTTKAEVDHSLGRFHFSGYDQREARLVENNGHSVMVSLGDEISISGGGLPARYRATQLHLHWSQELDRGSEHSLDGERSAMEMHIVHQKETGTSGNEVQDSDDSIAVLAFLVEAGPTMNEGFQPLVTALSAISIPGTNTTMAPSSLWDLLPAEEELRHYFRYMGSLTTPACSETVVWTVFQEPIRLHRDQILEFSSKLYYDQERKMNMKDNVRPLQRLGDRSVFKSQAAGQLLPLPLPTLLVPTLACVMAGLLR

SEQ ID NO: 19169 - protein, 307 aa, Mesocricetus auratus
MVNPTTSEVHPTMGVKIFSAGVAACLADIITFPLDTAKVRLQIQGEGQISSTIRYKGVLGTITTLAKTEGLPKLYSGLPAGIQRQISFASLRIGLYDTVQEYFSSGKETPPTLGNRISAGLMTGGVAVFIGQPTEVVKVRLQAQSHLHGIKPRYTGTYNAYRIIATTESFSTLWKGTTPNLLRNVIINCVELVTYDLMKGALVNNQILADDVPCHLLSAFVAGFCTTFLASPADVVKTRFINSLPGQYPSVPSCAMTMLTKEGPTAFFKGFVPSFLRLASWNVIMFVCFEQLKKELSKSRQTVDCTT

SEQ ID NO: 19170 - protein, 309 aa, Phodopus sungorus
MVGFKATDVPPTATVKFLGAGTAACIADLITFPLDTAKVRLQVQGESQGLARTAANAQYRGVLGTILTMVRTEGPRSLYNGLVAGLQRQMSFASVRIGLYDSVKQFYTKGSEHAGIGSRLLAGSTTGALAVAVAQPTDVVKVRFQAQARAGGGRRYQSTVEAYKTIAREEGIRGLWKGTSPNVARNAIVNCAELVTYDLIKDTLLKANLMTDDLPCHFTSAFGAGFCTTVIASPVDVVKTRYMNSALGQYHSAGHCALTMLRKEGPRAFYKGFMPSFLRLGSWNVVMFVTYEQLKRALMAAYESREAPF

SEQ ID NO: 19171 - protein, 299 aa, Phodopus sungorus
MVGLQPSEVPPTTVVKFLGAGTAACFADLLTFPLDTAKVRLQIQGENPGTQRVQYRGVLGTILTMVRTEGPCSPYSGLVAGLHRQMSFASIRIGLYDSVKQFYTPKGADHSSIAIRILAGCTTGAMAVTCAQPTDVVKVRFQAMIRLGTGGERKYKGTMDAYRTIAREEGIRGLWKGTWPNITRNAIVNCAEMVTYDIIKEKLLDSHLFTDNFPCHFVSAFGAGFCATVVASPVDVVKTRYMNAPPGRYLSPLHCMLKMVAQEGPTAFYKGFVPSFLRLGAWNVMMFVTYEQLKRALES

SEQ ID NO: 19172 - protein, 307 aa, Phodopus sungorus
MVSQTTSEVQPTMGVKIFSAGVAACLADIITFPLDTAKVRLQIQGEGQTSSTIRYKGVLGTITTLAKTEGLPKLYSGLPAGIQRQISFASLRIGLYDTVQEYFSSGKETPPTLVNRISAGLMTGGVAVFIGQPTEVVKVRLQAQSHLHGIKPRYTGTYNAYRIIATTESLSTLWKGTTPNLLRNVIINCTELVTYDLMKGALVNNQILADDVPCHLLSALVAGFCTTFLASPADVVKTRFINSLPGQYPSVPSCAMTMFTKEGPTAFFKGFVPSFLRLASWNVIMFVCFEQLKKELMKSRQTVDCTT

SEQ ID NO: 19173 - protein, 306 aa, Mus musculus
MALDFLAGCAGGVAGVIVGHPFDTVKVRLQVQSTEKPQYRGTLHCFQSIIKQESVLGLYKGLGSPLMGLTFINALVFGVQGNTLRALGQDSPLNQFLAGAAAGAIQCVICCPMELAKTRLQLQAVGPARTYKGSLDCLVQIYRHEGLRGINRGMVSTLLRETPSFGVYFLTYDVMTRAMGCEPGDRLLVPKLLLAGGTSGITSWLSTYPMDVVKSRLQADGLQGTPRYRGIVDCMRQSYQAEGWQVFTRGLASTLLRAFPVNAATFATVTVVLTYTRGEEAQVDSEAALGTSPTPAGSALAQPSSL

SEQ ID NO: 19174 - protein, 306 aa, Mus musculus
MALDFLAGCAGGVAGVIVGHPFDIVKVRLQVQSTEKPQYRGTLHCFQSIIKQESVLGLYKGLGSPLMGLTFINALVFGVQGNTLRALGQDSPLNQFLAGAAAGAIQCVICCPMELAKTRLQLQAVGPARTYKGSLDCLVQIYRHEGLRGINRGMVSTLLRETPSFGVYFLTYDVMTRAMGCEPGDRLLVPKLLLAGGTSGITSWLSTYPMDVVKSRLQADGLQGTPRYRGIVDCMRQSYQAEGWQVFTRGLASTLLRAFPVNAATFATVTVVLTYTRGEEAQVDSEAALGTSPTPAGSALAQPSSL

SEQ ID NO: 19175 - protein, 301 aa, Mus musculus
MADEPKPISPFKNLLAGGFGGMCLVFVGHPLDTVKVRLQTQPPSLSGQPPMYSGTLDCFRKTLMREGITGLYRGMAAPIIGVTPMFAVCFFGFGLGKKLQQKSPEDELSYPQLFTAGMLSGVFTTGIMTPGERIKCLLQIQASSGENKYSGTLDCAKKLYQEFGIRGFYKGTVLTLMRDVPASGMYFMTYEWLKNLFTPEGKSVSDLSVPRILVAGGFAGIFNWAVAIPPDVLKSRFQTAPPGKYPNGFRDVLRELIREEGVTSLYKGFNAVMIRAFPANAACFLGFEIAMKFLNWIAPNL

SEQ ID NO: 19176 - protein, 301 aa, Mus musculus
MKSNPAIQAAIDLTAGAAGGTACVLTGQPFDTMKVKMQTFPDLYRGLTDCCLKTYSQVGFRGFYKGTSPALIANIAENSVLFMCYGFCQQVVRKVVGLDQQAKLSDLQNAAAGSFASAFAALVLCPTELVKCRLQTMYEMETSGKIAASQNTVWSVVKEIFRKDGPLGFYHGLSSTLLREVPGYFFFFGGYELSRSFFASGRSKDELGPVPLMLSGGFGGICLWLAVYPVDCIKSRIQVLSMTGKQTGLVRTFLSIVKNEGITALYSGLKPTMIRAFPANGALFLAYEYSRKLMMNQLEAW

SEQ ID NO: 19177 - protein, 306 aa, Mus musculus
MGSFQLEDFVAGWIGGVASVIVGYPLDTVKTRLQAGVGYANTFNCIRMVYKRERVFGFFKGMSFPLASIAIYNSVVFGVFSNTQRFLSKYRCGELEAGPGRSLSDLLLASMLTGVVSVGLGGPVELIKIRLQMQTQPFREASHGLKSRAVAAYQGPVHCIATIVQMEGLTGLYRGASAMLLRDIPGYCFYFIPYVFLSEWITPEACTGPSPYAAWLAGGIAGAISWGTATPMDVVKSRIQADGVYLNKYRGVVDCISQSYQQEGFKVFFRGITVNAVRGFPMSAAMFLGYELSLKALRGEHTVRSE

SEQ ID NO: 19178 - protein, 306 aa, Mus musculus
MGSFQLEDFVAGWIGGVASVIVGYPLDTVKTRLQAGVGYANTFNCIRMVYKRERVFGFFKGMSFPLASIAIYNSVVFGVFSNTQRFLSKYRCGELEAGPGRSLSDLLLASMLTGVVSVGLGGPVELIKIRLQMQTQPFREASHGLKSRAVAAYQGPVHCIATIVQMEGLTGLYRGANAMLLRDIPGYCFYFIPYVFLSEWITPEACTGPSPYAAWLAGGIAGAISWGTATPMDVVKSRIQADGVYLNKYRGVVDCISQSYQQEGFKVFFRGITVNAVRGFPMSAAMFLGYELSLKALRGEHTVRSE

SEQ ID NO: 19179 - protein, 310 aa, Mus musculus
MDFVAGAIGGVCGVAVGYPLDTVKVRIQTEAKYAGIWHCIRDTYRQERVWGFYRGLSLPVCTVSLVSSVSFGTYHHCLAHICRFRYGSTDAKPTKADITLSGCASGLVRVFLTSPTEVAKVRLQTQTQAQTQQRRSSASWTSGAPALCPTPTACLEPRPKYSGPLHCLVTVAREEGLRGLYKGSSALLLREGHSFATYFLSYAMLCEWLTPAGHSQPDVLGVLVAGGCAGVLAWAVATPMDVIKSRLQADGQGQHRYRGLLHCVVTSVREEGPRVLFKGLALNCCRAFPVNMVVFVAYEAVLRLTQSLLT

SEQ ID NO: 19180 - protein, 294 aa, Mus musculus
PTRPQKMPVEEFVAGWISGAVGLVLGHPFDTVKVRLQTQSTYQGIVDCVVKTYRHESVLGFFKGMSFPIASVALVNSVLFGVYSNTLLALTATSHQERRAQPPSYTNIFIAGCTGGLLQAYCLAPFDLIKVRLQNQTEPRMQISSSMPRYRGPVHCAASILREEGPQGLFRGSWALVLRDTPTLGMYFVTYEGLCRQYTPEGQNPSSATVLVAGGFAGIASWITATPFDVIKSRMQMDGLKGRKYGGMLDCMASSFRQEGIGVFFKGMTLNSARAFPVNAATFLSYEYLLRLWR

SEQ ID NO: 19181 - protein, 288 aa, Mus musculus
MPVEEFVAGWISGAVGLVLGHPFDTVKVRLQTQSTYQGIVDCVVKTYRHESVLGFFKGMSFPIASVALVNSVLFGVYSNTLLALTATSHQERRAQPPSYTNIFIAGCTGGLLQAYCLAPFDLIKVRLQNQTEPRMQISSSMPRYRGPVHCAASILREEGPQGLFRGSWALVLRDTPTLGMYFVTYEGLCRQYTPEGQNPSSATVLVAGGFAGIASWITATPFDVIKSRMQMDGLKGRKYGGMLDCMASSFRQEGIGVFFKGMTLNSARAFPVNAATFLSYEYLLRLWR

SEQ ID NO: 19182 - protein, 265 aa, Mus musculus
MQTFPQLYKGLADCFLKTYNQVGIRGLYRGTSPALLAYVTQGSVLFMCFGFCQQFVRKVARVEQNAELNDLETATAGSLASAFAALALCPTELVKCRLQTMYEMKMSGKIAQSYNTIWSMVKSIFMKDGPLGFYRGLSTTLAQEIPGYFFYFGGYEISRSFFASGGSKDELGPVPLMLSGGFAGICLWLIIFPVDCIKSRIQVLSMFGKPAGLIETFISVVRNEGISALYSGLKATLIRAIPSNAALFLVYEYSRKMMMNMVEEY

SEQ ID NO: 19183 - protein, 677 aa, Mus musculus
MAVKVHTTKRGDPHELRNIFLQYASTEVDGEHYMTPEDFVQRYLGLYNDPNSNPKIVQLLAGVADQTKDGLISYQEFLAFESVLCAPDSMFIVAFQLFDKSGNGEVTFENVKEIFGQTIIHHHIPFNWDCEFIRLHFGHNRKKHLNYVEFTQFLQELQLEHARQAFALKDKSKSGMISGLDFSDVMVTIRSHMLTPFVEENLVSAAGGGTSHQVSFSYFNAFNSLLNNMELVRKIYSTLAGTRKDIEVTKEEFAQSAIRYGQVTPLEIDILYQLADLYNASGRLTLADIERIAPLAEGALPYNLAELQRQQSPGLGRPIWLQIAESAYRFTLGSVAGAVGATAVYPIDLVKTRMQNQRGTGSVVGELMYKNSFDCFKKVLRYEGFFGLYRGLIPQLIGVAPEKAIKLTVNDFVRDKFTKRDGSIPLPAEILAGGCAGGSQVIFTNPLEIVKIRLQVAGEITTGPRVSALNVLQDLGLFGLYKGAKACFLRDIPFSAIYFPVYAHCKLLLADENGRVGGINLLTAGALAGVPAASLVTPADVIKTRLQVAARAGQTTYSGVVDCFRKILREEGPSAFWKGTAARVFRSSPQFGVTLVTYELLQRWFYIDFGGLKPSGSEPTPKSRIADLPPANPDHIGGYRLATATFAGIENKFGLYLPKFKSPSVAVAQPKAAAAAQ

SEQ ID NO: 19184 - protein, 409 aa, Mus musculus
MEVDILFQLADLYEPRGRMTLADIERIAPLEEGMLPFNLAEAQRQKASGDAARPFLLQLAESAYRFGLGSIAGAVGATAVYPIDLVKTRMQNQRSTGSFVGELMYKNSFDCFKKVLRYEGFFGLYRGLLPQLLGVAPEKAIKLTVNDFVRDKFMHKDGSVPLLAEIFAGGCAGGSQVIFTNPLEIVKIRLQVAGEITTGPRVSALSVVRDLGFFGIYKGAKACFLRDIPFSAIYFPCYAHVKASFANEDGQVSPGSLLLAGAIAGMPAASLVTPADVIKTRLQVAARAGQTTYNGVTDCFRKILREEGPKALWKGVAARVFRSSPQFGVTLLTYELLQRWFYVDFGGVKPVGSEPVPKSRITLPAPNPDHVGGYKLAVATFAGIENKFGLYLPLFKPSASTSKVTAGDS

SEQ ID NO: 19185 - protein, 676 aa, Mus musculus
MAAAKVALTKRADPAELKAIFLKYASIEKNGEFFMSPHDFVTRYLNIFGESQPNPKTVELLSGVVDQTKDGLISFQEFVAFESVLCAPDALFMVAFQLFDKAGKGEVTFEDVKQIFGQTTIHQHIPFNWDSEFVQLHFGKERKRHLTYAEFTQFLLEIQLEHAKQAFVQRDNAKTGKVSAIDFRDIMVTIRPHVLTPFVEECLVAAAGGTRSHQVSFSYFNGFNSLLNNMELIRKIYSTLAGNRKDVEVTKEEFALAAQKFGQVTPMEVDILFQLADLYEPRGRMTLADIERIAPLEEGMLPFNLAEAQRQQKASGDAARPFLLQLAESAYRFGLGSIAGAVGATAVYPIDLVKTRMQNQRSTGSFVGELMYKNSFDCFKKVLRYEGFFGLYRGLLPQLLGVAPEKAIKLTVNDFVRDKFMHKDGSVPLLAEIFAGGCAGGSQVIFTNPLEIVKIRLQVAGEITTGPRVSALSVVRDLGFFGIYKGAKACFLRDIPFSAIYFPCYAHVKASFANEDGQVSPGSLLLAGAIAGMPAASLVTPADVIKTRLQVAARAGQTTYNGVTDCFRKILREEGPKALWKGVAARVFRSSPQFGVTLLTYELLQRWFYVDFGGVKPVGSEPVPKSRITLPAPNPDHVGGYKLAVATFAGIENKFGLYLPLFKPSASTSKVTAGDS

SEQ ID NO: 19186 - protein, 675 aa, Mus musculus
MAAAKVALTKRADPAELKAIFLKYASIEKNGEFFMSPHDFVTRYLNIFGESQPNPKTVELLSGVVDQTKDGLISFQEFVAFESVLCAPDALFMVAFQLFDKAGKGEVTFEDVKQIFGQTTIHQHIPFNWDSEFVQLHFGKERKRHLTYAEFTQFLLEIQLEHAKQAFVQRDNAKTGKVSAIDFRDIMVTIRPHVLTPFVEECLVAAAGGTRSHQVSFSYFNGFNSLLNNMELIRKIYSTLAGNRKDVEVTKEEFALAAQKFGQVTPMEVDILFQLADLYEPRGRMTLADIERIAPLEEGMLPFNLAEAQRQKASGDAARPFLLQLAESAYRFGLGSIAGAVGATAVYPIDLVKTRMQNQRSTGSFVGELMYKNSFDCFKKVLRYEGFFGLYRGLLPQLLGVAPEKAIKLTVNDFVRDKFMHKDGSVPLLAEIFAGGCAGGSQVIFTNPLEIVKIRLQVAGEITTGPRVSALSVVRDLGFFGIYKGAKACFLRDIPFSAIYFPCYAHVKASFANEDGQVSPGSLLLAGAIAGMPAASLVTPADVIKTRLQVAARAGQTTYNGVTDCFRKILREEGPKALWKGVAARVFRSSPQFGVTLLTYELLQRWFYVDFGGVKPVGSEPVPKSRITLPAPNPDHVGGYKLAVATFAGIENKFGLYLPLFKPSASTSKVTAGDS

SEQ ID NO: 19187 - protein, 676 aa, Mus musculus
MAAAKVALTKRADPAELKAIFLKYASIEKNGEFFMSPHDFVTRYLNIFGESQPNPKTVELLSGVVDQTKDGLISFQEFVAFESVLCAPDALFMVAFQLFDKAGKGEVTFEDVKQIFGQTTIHQHIPFNWDSEFVQLHFGKERKRHLTYAEFTQFLLEIQLEHAKQAFVQRDNAKTGKVSAIDFRDIMVTIRPHVLTPFVEECLVAAAGGTRSHQVSFSYFNGFNSLLNNMELIRKIYSTLAGNRKDVEVTKEEFALAAQKFGQVTPMEVDILFQLADLYEPRGRMTLADIERIAPLEEGMLPFNLAEAQRQQKASGDAARPFLLQLAESAYRFGLGSIAGAVGATAVYPIDLVKTRMQNQRSTGSFVGELMYKNSFDCFKKVLRYEGFFGLYRGLLPQLLGVAPEKAIKLTVNDFVRDKFMHKDGSVPLLAEIFAGGCAGGFQVIFTNPLEIVKIRLQVAGEITTGPRVSALSVVRDLGFFGIYKGAKACFLRDIPFSAIYFPCYAHVKASFANEDGQVSPGSLLLAGAIAGMPAASLVTPADVIKTRLQVAARAGQTTYNGVTDCFRKILREEGPKALWKGVAARVFRSSPQFGVTLLTYELLQRWFYVDFGGVKPVGSEPVPKSRITLPAPNPDHVGGYKLAVATFAGIENKFGLYLPLFKPSASTSKVTAGDS

SEQ ID NO: 19188 - protein, 372 aa, Rattus norvegicus
MALDFLAGCAGAVRARLVTPRDLLEGCPDPGAQRYQCDALSCWKVQERRRRVYPVVKSVVMILQRSEALGHRYLSLPGVAGVIVGHPFDTVKVRLQVQNTEKPQYRGTLHCFQSIIKQESVLGLYKGLGSPLMGLTFINALVFGVQGNTLRALGQDSPLNQFLAGAAAGAIQCVICCPMELAKTRLQLQAAGPARAYKGSLDCLVQIYRHEGLRGINRGMVSTLLRETPSFGVYFLTYDVLTRAMGCEPGDRLLVPKLLLAGGTSGITSWLSTYPMDVVKSRLQADGLQGTPRYRGIVDCMRQSYQAEGWQVFTRGLASTLLRAFPVNAATFATVTVVLTYIRGEEDQPPGPKGFYGSTHVPQLFIIAPLRS

SEQ ID NO: 19189 - protein, 301 aa, Rattus norvegicus
MAEEPKPISPLKNLLAGGFGGVCLVFVGHPLDTVKVRLQTQPPSLPGQPPMYSGTIDCFRKTLFREGITGLYRGMAAPIIGVTPMFAVCFFGFGLGKRLQQKSPEDELTYPQLFTAGMLSGVFTTGIMTPGERIKCLLQIQASSGKNKYSGTLDCAKKLYQEFGIRGFYKGTALTLMRDVPASGMYFMTYEWLKNLFTPQGKSVHDLSVPRVLVAGGFRGIFNWVVAIPPDVLKSRFQTAPPGKYPNGFRDVLRELIREEGVTSLYKGFNAVMIRAFPANAACFLGFEIPMKILNWIAPNL

SEQ ID NO: 19190 - protein, 301 aa, Rattus norvegicus
MKSNPAIQAAIDLTAGAAGGTACVLTGQPFDTMKVKMQTFPDLYRGLTDCCLRTYSQVGFRGFYKGTSPALIANIAENSVLFMCYGFCQQVVRKVVGLDRQAKLSDLQNAAAGSFASAFAALVLCPTELVKCRLQTMYEMETSGKIAASQNTVWSVVKEIFRKDGPLGFYHGLSSTLLREVPGYFFFFGGYELSRSFFASGRSKDELGPIPLMLSGGFGGICLWLAVYPVDCIKSRIQVLSMTGKQTGLIRTFLSIVKNEGITALYSGLKPTMIRAFPANGALFLAYEYSRKLMMSQLEAC

SEQ ID NO: 19191 - protein, 319 aa, Rattus norvegicus
MGAYRDLASGDTLGSVEEHEIHPAIQAAIDLTAGAAGAAACVLTGQPFDTVKVKMQTFPYMYKGLADCFLKTYNQVGVHGLYRGTSPALLAYVAQGSVLFLCYGFCQQFVRKVARVEQSAELNDFETATAGSLASAFAALVLCPTELVKCRLQTMHEMRVAGKTKHSHNTIWSMVKSIFMKDGPLGFYRGLSTTLAQEIPGYFFYFGGYEISRSFFASGGSKDELGPVPLMLSGSFAGVCLWLIIFPVDCIKSRIQVLSMFGKPAGLIKTFINVVRNEGILALYSGLKATLIRAIPSNAALFVVYEYSRKMMMNVVEEY

SEQ ID NO: 19192 - protein, 342 aa, Rattus norvegicus
MNIKVFKEQDLQEPVSAAHTARPEPFLLPTLSMDFVAGAIGGVCGVAVGYPLDTVKVKIQTEAKYTSIWHCVRDTYRQERLWGFYRGLSLPVCTVSLVSSVSFGTYHHCLAHICRFRYGSTDVKPTKADITLSGCASGLVRVFLTSPTEVAKVRLQTQAQSQTQQRRPSASWTSVAPALCPAPTACLEPRPKYSGPLHCLVTVAREEGLRGLYKGSSALLLREGHSFATYFLSYAVLSEWLTPAGQSQPDVLGVLVAGGCAGVLAWAVATPMDVIKSRLQADGQGQQRYRGLLHCVVTSVREEGPRVLFKGLALNCCRAFPVNMVVFVAYEAVLRLTQGLLT

SEQ ID NO: 19193 - protein, 1031 aa, Rattus norvegicus
MQLKLLSEQENLAREMLRSVERVRLCSRWTTGSLGTVQTSSIKPHELLLGKRDWHRNWRKENAKGLGNIFLPTWKQAVDFALRDRKCTAAMFRKGHGGVPQPWSKETEKLEVRGVEIHTVLASSLSALLSVDRTTETFVFFTPGLLLGEDLECLYQQLRDTSLQDREPLGSPSLSFCTYEQPTAFEELAQQAAVGPGPEAGWSGQGGLFFEDSAPPSGFFPYYRSQEEHLPSATVPQGCCWCLASRDLFPGSETQDGCHKVTARDGCLKPRREARHQSRASLLGAGELTRVTPTWWCAGVKAAGTSCSKTSWSVKDKGNRNGGPYSSCHLPWDHSWPNQISQPVPTCVHQLRGKSEESQAVLGPRNLVQKKVQELQDPALAFWEMFLLLRGACLRILAEKNVAICGFRSGSCLAGGNASQLYHLSSCEKAPNTGAAIQARPIHKKGLCAHIRGDAGVSFWRRLREAEAHTASAMGSFQLEDFAAGWIGGECACESPPHHRANCLAVPCQLFAPGVASVIVGYPLDTVKELMSCCGPKSRQTRLQAGVGYANTFNCIRMVYKRESVFGFFKGMSFPLASVAIYNSVVFGVFSNTQRFLSQYRCRELEDCPGRSLSDLLLASMVTGMVSVGLGGPVDLIKIRLQMQTQPFQEGGSEMPTGSGGWGTGSLEVEEGGLRGCALSINTLVKVACVGASHGLKSRAVAAYQGPVHCFATIVRTEGLTGLYRGASAMLLRDIPGYCFYFIPYVFLRAISWGTATPMDVVKSRIQADGVYLNKYRGVLDCISQSYQQEGFKVFFRGITVNAVRGFPMSAAMFLGYELSLKALRGDHTVWSRPQSMWQSHELSEDVNNNASLLIWSPKWRRQCISDNPGTLTAGPKKWHRLKGRVEELRQSFRASLLDSLTGRGWPNPHFSITGRILSAKLLSKKIPEARDSVVKSRELYIQRSVPSSPQVYPPHPRCALLAPGVPSSPQVYPPHPRCTLLTPGVPSSPQVVPPIAARLQTSQGSSLQFWAQAYDTVYYQVFERWTLYLL

SEQ ID NO: 19194 - protein, 322 aa, Hordeum vulgare subsp. vulgare
MDTSTRAAKIPSLPQQTEINWDNLDMTKLYVVGAGMFSCVTVALYPVSVIKTRMQVASGEAMRRNALATFKNILKVDGVPGLYRGFGTVITGAIPARIIFLTALEKTKATSLKLVEPLQLSESMEAALANGLGGLTASLCSQAVFVPIDVVSQKLMVQGYSGHVRYKGGIDVVQKIMKADGPRGLYRGFGLSVMTYAPSSAVWWASYGFSQRVIWSALGRLDDKEDTPSQLKIVGVQATGGMVAGAVTSCVSTPLDTIKTRLQVNINKPKASEVVRRLIAEDGWKGFYRGLGPRFFSSSAWGTSMIVCYEYLKRVCAKVEEA

SEQ ID NO: 19195 - protein, 295 aa, Gibberella moniliformis
MSLYDKSVTATRSAHRTSDTLHSLVAGSSDTVAKTRLQLNQVSGRNKQNVPWPRFGLQWYSGCIPFLIGNSVKTSIRFVSFDGYQKLLADDDGNISRFGILLAGFGAGATESLLAVTPSERIKTIIIEDRRLEKPRIRNSFHAMSIIARDHGLSGFFQGFWPTTARQSAGSAIRLGSYTFLKQVVQSRTPQGGKIGTVKTFIIGSLAGLITVYLTQPLDTIKTRMQRLEARTRYGNAFICARGILEQEGFTAFWSGAVARSLRLVMSGGIVFMVYEKVVEGLDVISPAKRYEIAA

SEQ ID NO: 19196 - protein, 224 aa, Pagrus major
YRGVFGTISTMIKTEGPRSLYNGLVAGLQRQMCFASIRIGLYDNVKNFYTGGKDNPNVLIRILAGCTTGAMAVSFAQPTDVVKVRFQAQSNLDGVARRYTGTMQAYKHIFQNEGMRGLWKGTLPNITRNALVNCTELVTYDLIKEAILKHNLLSDNLPCHFVSAFGAGFVTTVIASPVDVVKTRYMNSPPGQYKSAINCAWTMMTKEGPTAFYKGFVPSFLRLG

SEQ ID NO: 19197 - protein, 304 aa, Eupetomena macroura
MVALKSQEMPPTAAIKFFSAGTAACFADLCTFPLDTAKVRLQLQGEVRIPRVSGAVEYRGVLGTLSTMVRTEGARSLYRGLAAGLQRQMSFASIRIGLYDSVKQLYTPKGAESTGLAPRLLAGCTTGAVAVACAQPTDVVKVRFQAHGAMPESTRRYNGTLDAYRTIAREEGVRGLWRGTLPNIARNAVINCGELVTYDLIKDALLREHLMADDVPCHFVAAFGAGFCATVVASPVDVVKTRYMNAGPGQYRNALSCLLALLMQDGITGFYKGFVPSFLRLGSWNVVMFICYEQLQRAAVLALS

SEQ ID NO: 19198 - protein, 326 aa, Emericella nidulans
MSAAESPASDAVQETVKAAETKAVNQTAAQIRSFAAGGVGGVCAVIVGHPFDLVKVRMQTAAQGVYSGAIDVVKKTVAREGLVRGLYAGVSAPLVGVTPMFAVSFWGYDLGKTLVSNLSEVEVKNNTPQYSIAQVSAAGFFSAIPMTLITAPFERVKVLLQIQGQNPPPPGQKPKYSGGVDVVRQLYKEGGIRSVFRGSAMTLARDGPGSAAYFAAYEYIKRSLTPKDANGNATGDLSLPAVLAAGGAAGIAMWIPVFPVDTVKSRLQSAPGKPTISGTIRTVYAAGGFKAFFPGFGPALARAVPANAATFAGVELAHQFMNKLFD

SEQ ID NO: 19199 - protein, 326 aa, Emericella nidulans
MAATESALTIHNDISMELPELAPNQGLEAFKDIVFGSAAGMIGKVIEYPFDTVKVRLQSQPDHLPLRYNGPLDCFRQSFQAEGLRGLYRGISAPMAGAAVENSCLFFSYRVVQELLQASYYSSTEPLPLTALVFSGAASGSITSLALTPIELIKCKMQVPSEPSSARVGPLKIIVSVFRQDGVLGFWRGQLGTLIRETGGGAAWFGGYEGVSALFRSYHYSPSTTFSSEVESGSLPLYQQMLAGAAAGVSYNFLFYPADTIKSRLQTEDINNTSSKRQTFGGAARALWHQQGLRGLYRGCGITCARSAPSSAFIFTVFEGLRSYFG

SEQ ID NO: 19200 - protein, 385 aa, Emericella nidulans
MAATESALTIHNDISMELPELAPNQGLEAFKDILFGSAAGMIGKVIEYPFDTVKVRLQSQPDHLPLRYNGPLDCFRQSFQAEGLRGLYRGISAPMAGAAVENSCLFFSYRVVQELLQASYYSSTEPLPLTALVFSGAASGSITSLALTPIELIKCKMQVPSEPSSARVGPLKIIVSVFRQDGVLGFWRGQLGTLIRETGGGAAWFGGYEGVSALFRSYHYSPSTTFSSEVESGSLPLYQQMLAGAAAGVSYNFLFYPADTIKSRLQTEDINNTSSKRQTFGGAARLSGMSKDFAAYIEAVVSLVRGLPQARHSFLHYLKAYGVTLDERIRYVIRFDFDSRRFFGPFLLIDDTYDLSRLRFSCLIIRLFNQLALGPRSKVRWRKET

SEQ ID NO: 19201 - protein, 418 aa, Anopheles gambiae str. PEST
TAYCQQLIFNLGSMALDFAAGCLGGCAGVLVGFPFDTVKVHLQTQNHRNPLYRGTYDCFRKIVVREGVHGLYRGMSSPMAGVAVVNAIVFGVYGNIQRRTANPDSLYSHFLAGSAAGLAQSIVCSPMELIKTRLQLQDNLPRAAERFSGPMDCTRAIWRREGYRGIFRGLGITAARDMPGFSSYFVAYEYMVRCVANPSPFVILMAGGLAGTFSWLVTFPLDVVKSRLQADGISGKPQYNGLIDCVRKSHAAEGWAFLSRGLASTLLRAFPMNAVCFLVVSYTMKLFDDPKVSSVVEELGATAATVETPLLIVPTVVPQVPIATAPKLSVPAPAYNKRASHHDHDSHLLSIKQNTYRFLRSLGAFSEAVCCAEMGELTDDLYDRDEAEQRRASYAKLNELLLSTDPEDSSNRYPFLGD

SEQ ID NO: 19202 - protein, 304 aa, Anopheles gambiae str. PEST
CHAMSENKSPIKYFLSGGFGGICTVLAGHPLDTIKVRLQTMPLPAAGQAPLYAGTLDCAKKTIAREGFRGLYKGMSAPITGVAPIFAVSFFGFGLGKRLQQKTPDEELNYTQLFAAGAFSGIFTTTVMAPGERIKCLLQIQQGGNSPQKYSGMVDCAKQLYAEGGMRSIYKGAFATLLRDVPASGMYFLTYEYIQRALAPKAGEQKDASIGLLGTIFAGGMAGIANWAIGMPADVLKSRLQTAPEGTYPNGIRDVFRELMRREGPLALYKGVTPVMLRAFPANAACFIGVEVFMKFLNVVAPGL

SEQ ID NO: 19203 - protein, 299 aa, Anopheles gambiae str. PEST
MHGAGESSSLKTGMIDFIAGTLGGVALVYVSQPMDTVKVKMQTFPGLYKGLVNCTLQTFRRDGIVRGLYAGTLPAVVANVAENSVLFAAYGCQQAVGRLVHKPAVADLSALENATAGFLAAFFSSFTLCPTELIKCKLQALRETAGGGKGRPTISSYALVSQILRTEGVPGMFRGLTSTFAREMPGYFFFFGGYEQTRALLARPGQSKDEIGPVRTMVAGAVGGVALWTVIFPADVIKSRIQVYSMRASMTQVGLDIFRKEGALAFYNGLLPTIVRTIPATAVLFVVYEYTKKTLTKLL

SEQ ID NO: 19204 - protein, 731 aa, Anopheles gambiae str. PEST
ASCVRYRAKTGQEGTRYAAAQQKHLLQSPNISEHTTTGSDDTAITMKLESRPITEVTGTREERVVGARGNKVTNPMHIKRASTEKLREIFGKYATQQINGEPYMTSADFVRSFLGQSYNEESIKLIAGIADTSKDGLISFAEFQAFEGLLCTPDALYKTAFQLFDRNGNGSVTYSEFVDVFKKTDLHAKIPFKLDGPFIQLYFGKDRQRVINYVEFSQFLHDFHEECAMEAFRLKDTSGSGFISALDFQDIMVNVKKHLLTSEVRDNLIAVTEGHRVSFPYFMAFNSLLNNMELIKRIYLNATSGNRAEPITKDELLHSAQTMSQITPLEIDILFQLTGVIHQSGRIVYNDLSNIAPEHYIKNITHRLAEIKAVESPADRSFLIQMLESTYRFTLGSVAGAVGATAVYPIDLVKTRMQNQRTGSFIGEVAYRNSWDCCKKVIRHEGFLGLYRGLVPQLMGVAPEKAIKLTVNDFVRDKLTDKQGNIPRWGEVLAGACAGGSQVIFTNPLEIVKIRLQVAGEIAGGAKVRALSVVRELGLFGLYKGARACLLRDVPFSAIYFPMYAHTKAAFADEEGYNHPLTLLAAGAIAGIPAASLVTPADVIKTRLQVVARSGQTTYSGVMDAARKIMAEEGPRAFWKGTVARVFRSSPQFGVTLVTYELLQRMLYVDFGGSRPAGSDVAKAKVDVARVNPDHIGGYQAALPMLNGIETKFGLSLPRFGAPAAVKRQAS

SEQ ID NO: 19205 - protein, 297 aa, Anopheles gambiae str. PEST
RMNPVLCDFIAGSFGGACGLLVGHPMDTIKAWQQNSNYGMGSAMYNIIIRNNGLRGFYRGMYFPLLSNGALNSVVFAVYGSHLRYLQKHTRSDRLRKAYWRKHVFFAGSMAGLAQVFLACPIEVVKVRLQTLSFIGHPWACLKDIFRREGFSGIYRGITPMMFRDVLPYGVYMYVYEYMLEIEERLHRLSKERLTGVPVGGALQASLIATAGAVAGVASWMFIVPFDVVKTVMQAETDPTVHKSMMHCFRSMIKKHGWRSLFRGSLVIIARAAPVNSATFLGYEYCLEKCQHLLDEK

SEQ ID NO: 19206 - protein, 302 aa, Anopheles gambiae str. PEST
MDGTDFLLGGVGSMAATLITNPLEVVKTRMQLQGELAAKGTYHKPYRSVVDAFITIAKNDGYAALQKGLAPSLCFQFILNSCRLGIYNTANEHGWTKQSNGNQSILKSAFWGAAGGFVGSALASPFFMLRTHLQSQAKAEIAVGYQHQHSGMISAMKDIFRKHGVQGLYRGVAVTMPRALLGSGGQLAAFGYTKDFLVRHPVSAQQSDTFVSTVAGAVGGTVMAITMTPPDVIATRLYNQGVDAKGRGIYYNGVVDCFVKILKAEGVAGLYKGFWPHYMRIGPHATLVLLFFDELKTMRRKY

SEQ ID NO: 19207 - protein, 426 aa, Anopheles gambiae str. PEST
SPNFESQTRARSLAHQPIPRAFRLAVRAIPRLLPALERIHSPQRNISHNDALSRVRNEPLPNELPDRRAPTHQAHSRQHSSPIGETTILQNKPPKPTMDRLGLLATAYGQPNKHSSQFRNPFGGRPWMEQSGAAAAAPGAKGLKGIVAGGITGGIEICITFPTEYVKTQLQLDEKGATKQYNGIMDCVKKTVKTNGVLGLYRGLSVLLYGSIPKSAVRFGAFESLKGRLMDSNGQLSTSGKLLAGLGAGVAEAILAVTPMETVKVKFINDQRSGTPKYKGFFHGVGMIVRQEGLSGVYKGLTATILKQGSNQAIRFYVMETLKDMYKGDDPSKPVPKMMVGAFGAVAGAASVFGNTPIDVVKTRMQGLEAAKYKNTADCALQIWKNEGPMAFYKGTVPRLSRVCLDVAITFMIYDSFMDLFNKFWR

SEQ ID NO: 19208 - protein, 344 aa, Anopheles gambiae str. PEST
RSVGVRTTSDPNYTRSHPGARSHRVRSVPLLKCVSEMSDKKRPVYVQYVLGGLSGIGATCVVQPLDLVKTRMQISGMGGAAKEYNNTFDAIGKIMRREGVLAMYKGLSAAIMRQATYTTTRLGVYTSLNDAYKQKTNKTPNLLASMAMGMTAGAIGSFVGNPSELILIRMTADGRLPVDERRNYTGFFNALFRIAREEGVLSLWRGCVPTMGRAMVVNAAQLASYSQAKAYLVSSQLLQEGIGLHFTASMFSGLITTAASLPVDIAKTRIQNMKVAPGEVPPYKSTVDVIVKVIRHEGLFALWKGFTAYYGRLGPHTVLTFIILEQLNGLYNKHMGVEGSKSGL

SEQ ID NO: 19209 - protein, 343 aa, Anopheles gambiae str. PEST
PSTGEAAAAASDGDTTMQQTAAATGRTEMRPVKYHYADSFWCTYLVSVFAASIAETVTYPLDLTKTRLQIQGEAAATAVDAEGAVKKLKYRGMFATATGIIREEGALKLWQGITPALYRHLVYSGVRIVTYDALRKKLRNGKETFSLWQSALSGVGAGALAQWLASPADLVKVHVQMEGKRRAMGLEPRVHSAAHAFREIVSRGGVFGLWKGSVPNVQRAALVNLGDLTTYDTVKHFIMHKTGLPDCHVVHIMSSICAGLVAATMGTPADVVKTRIMNQPTDSSGRGLLYKGSIDCLQQTIGKEGFFALYKGFLPVWIRMAPWSLTFWLSFEQIRASLGASGY

SEQ ID NO: 19210 - protein, 306 aa, Anopheles gambiae str. PEST
AEMEFLLGGASSMCAVLFTNPFDVLKTRQQLEGELIAKQNLKERAYKGIRQSVLTVVRTDGLRGLQKGLPAALLYQFSMNGVRLGTYQTAENLGWTKSTSNPSLTPLLSVFWGGCAGLASATASCPFYVVKTQLQAVTSGSYTARFQHHHSGTLSAFVNIYRQSGVRGLFRGYTATLARLVVGSSVQMSSFSACKEFFLRYQVFQESIVLTALASSTVAGFLTSVLMSPCDVVTTRMTNQAVSANGKGLLYTNIFDCFLKIYRSEGIHGYYKGFVPMYLRVAPHTMLNLTFWEFFKGLHDRYGKQH

SEQ ID NO: 19211 - protein, 304 aa, Helicodiceros muscivorus
MGGHDSGRSDISFGGRFASSAFAACFAELCTIPLDTAKVRLQLQKKSVAGDGVSLPKYRGMLGTVATIAREEGLSALWKGIVPGLHRQCLFGGLRIGLYEPVKSFYVGEGFVGDVPLSKKILAGLTTGALAITVANPTDLVKVRLQAEGKLSPGIPRRYSGALNAYSTIVKQEGLGALWTGLGPNIARNAIINAAELASYDQVKQTILKIPGFSDNIFTHILAGLGAGFVAVCIGSPVDVVKSRMMGDSTYKSTLDCFIKTFKNDGPLAFYKGFIPNFGRLGSWNVIMFLTLEQVKKVFIKEAP

SEQ ID NO: 19212 - protein, 303 aa, Symplocarpus foetidus
MGDHGPRTEISFAGSSRAAFAACFAELCTIPLDTAKVRLQLQKKAVTGDVVALPKYRGMLGTVATIAREEGLSALWKGIVPGLHRQCLFGGLRIGLYEPVKSFYVGDNFVGDIPLSKKILAGLTTGALAIIVANPTDLVKVRLQSEGKLPPGVPRRYSGALNAYSTIVKKEGLGALWTGLGPNIARNAIINAAELASYDQVKQTILKLPGFSDNIFTHILAGLGAGFFAVCIGSPVDVMKSRMMGDSAYKSTFDCFIKTLKNDGLLAFYKGFIPNFGRLGSWNVIMFLTLEQVKKFFIKEVPN

SEQ ID NO: 19213 - protein, 305 aa, Kluyveromyces lactis
MSTDKKQSNFAIDFLMGGVSAAVSKTAAAPIERVKLLIQNQDEMIKQGSLDRRYTGIVECFKRTAADEGVASFWRGNTANVIRYFPTQALNFAFKDKIKAMFGFKKEEGYAKWFAGNLASGGLAGGLSLLFVYSLDYARTRLAADSKSAKKGGERQFNGLVDVYKKTLASDGVAGLYRGFLPSVVGIVVYRGLYFGLYDSLKPLLLTGSLENSFLASFLLGWAVTTGASTASYPLDTVRRRMMMTSGQAVKYDGAFDAFRKIVAAEGIKSLFKGCGANILRGVAGAGVISMYDQLQVILFGKTFK

SEQ ID NO: 19214 - protein, 242 aa, Mangifera indica
RLQLQKKGVGGDGLVLPKYKGLLGTVGTIAREEGLAALWKGIVPGLHRQCLFGGLRIGLYEPVKTFYVGSDFVGDVPLSKKILAAFTTGAIGITIANPTDLVKVRLQAEGKLPPGVPRRYSGALNAYSTIVRQEGLGALWTGLGPNVARNAIINAAELASYDQVKQTILKIPGFTDNVVTHLLSGLGAGFFAVCIGSPVDVVKSRMMGDSAYKSTLDCFIKTLKNDGPLAFYKGFIPNFGRL

SEQ ID NO: 19215 - protein, 339 aa, Chlorella kessleri
MLSSALYQQAGLSGLLRASAMGPQTPFIASPKETQADPMAFVKDLLAGGTAGAISKTAVAPIERVKLLLQTQDSNPMIKSGQVPRYTGIVNCFVRVSSEQGVASFWRGNLANVVRYFPTQAFNFAFKDTIKGLFPKYSPKTDFWRFFVVNLASGGLAGAGSLLIVYPLDFARTRLAADVGSGKSREFTGLVDCLSKVVKRGGPMALYQGFGVSVQGIIVYRGAYFGLYDTAKGVLFKDERTANFFAKWAVAQAVTAGAGVLSYPFDTVRRRLMMQSGGERQYNGTIDCWRKVAQQEGMKAFFKGAWSNVLRGAGGAFVLVLYDEIKKFINPNAVSSASE

SEQ ID NO: 19216 - protein, 301 aa, Aspergillus terreus
MESKVQTNVPLPKAPLTQKARGKRTKGIPALVAGACAGAVEISITYPFESAKTRAQLKRRNHDVAAIKPGIRGWYAGYGATLVGTTLKASVQFASFNIYRSALSGPNGELSTGASVLAGFGAGVTEAVLAVTPAEAIKTKIIDARKVGNAELSTTFGAIAGILRDRGPLGFFSAVGPTILRQSSNAAVKFTVYNELIGLARKYSKNGEDVHPLASTLVGSVTGVCCAWSTQPLDVIKTRMQSLQARQLYGNTFNCVKTLLRNEGIGVFWSGVWFRTGRLSLTSAIMFPVYEKVYKFLTQPN

SEQ ID NO: 19217 - protein, 300 aa, Arabidopsis thaliana
MADAWKDLASGTVGGAAQLVVGHPFDTIKVKLQSQPTPAPGQLPRYTGAIDAVKQTVASEGTKGLYKGMGAPLATVAAFNAVLFTVRGQMEGLLRSEAGVPLTISQQFVAGAGAGFAVSFLACPTELIKCRLQAQGALAGASTTSSVVAAVKYGGPMDVARHVLRSEGGARGLFKGLFPTFAREVPGNATMFAAYEAFKRFLAGGSDTSSLGQGSLIMAGGVAGASFWGIVYPTDVVKSVLQVDDYKNPRYTGSMDAFRKILKSEGVKGLYKGFGPAMARSVPANAACFLAYEMTRSSLG

SEQ ID NO: 19218 - protein, 294 aa, Arabidopsis thaliana
MADAWKDLASGTVGGAAQLVVGHPFDTIKVKLQSQPTPAPGQLPRYTGAIDAVKQTVASEGTKGLYKGMGAPLATVAAFNAVLFTVRGQMEGLLRSEAGVPLTISQQFVAGAGAGFAVSFLACPTELIKCRLAGASTTSSVVAAVKYGGPMDVARHVLRSEGGARGLFKGLFPTFAREVPGNATMFAAYEAFKRFLAGGSDTSSLGQGSLIMAGGVAGASFWGIVYPTDVVKSVLQVDDYKNPRYTGSMDAFRKILKSEGVKGLYKGFGPAMARSVPANAACFLAYEMTRSSLG

SEQ ID NO: 19219 - protein, 296 aa, Arabidopsis thaliana
MDFWPEFMATSWGREFVAGGFGGVAGIISGYPLDTLRIRQQQSSKSGSAFSILRRMLAIEGPSSLYRGMAAPLASVTFQNAMVFQIYAIFSRSFDSSVPLVEPPSYRGVALGGVATGAVQSLLLTPVELIKIRLQLQQTKSGPITLAKSILRRQGLQGLYRGLTITVLRDAPAHGLYFWTYEYVRERLHPGCRKTGQENLRTMLVAGGLAGVASWVACYPLDVVKTRLQQGHGAYEGIADCFRKSVKQEGYTVLWRGLGTAVARAFVVNGAIFAAYEVALRCLFNQSPSPDIVTGD

SEQ ID NO: 19220 - protein, 296 aa, Arabidopsis thaliana
MDFWPEFMATSWGREFVAGGFGGVAGIISGYPLDTLRIRQQQSSKSGSAFSILRRMLAIEGPSSLYRGMAAPLASVTFQNAMVFQIYAIFSRSFDSSVPLVEPPSYRGVALGGVATGAVQSLLLTPVELIKIRLQLQQTKSGPITLAKSILRRQGLQGLYRGLTITVLRDAPAHGLYFWTYEYVRERLHPGCRKTGQENLRTMLVAGGLAGVASWVACYPLDVVKTILQQGHGAYEGIADCFRKSVKQEGYTVLWRGLGTAVARAFVVNGAIFAAYEVALRCLFNQSPSPDIVTGD

SEQ ID NO: 19221 - protein, 311 aa, Arabidopsis thaliana
MGESKTTTGEGFGFYKEYVAGMMAGLATVAVGHPFDTVKVKLQKHNTDVQGLRYKNGLHCASRILQTEGVKGLYRGATSSFMGMAFESSLMFGIYSQAKLFLRGTLPDDGPRPEIIVPSAMFGGAIISFVLCPTELVKCRMQIQGTDSLVPNFRRYNSPLDCAVQTVKNDGVTGIFRGGSATLLRECTGNAVFFTVYEYLRYHIHSRLEDSKLKDGYLVDMGIGVLTGGLGGIACWSAVLPFDVAKTIIQTSSEKATERNPFKVLSSIHKRAGLKGCYAGLGPTIVRAFPANAAAIVAWEFSMKMLGIKRD

SEQ ID NO: 19222 - protein, 306 aa, Arabidopsis thaliana
MVAAGKSDLSLPKTFACSAFAACVGEVCTIPLDTAKVRLQLQKSALAGDVTLPKYRGLLGTVGTIAREEGLRSLWKGVVPGLHRQCLFGGLRIGMYEPVKNLYVGKDFVGDVPLSKKILAGLTTGALGIMVANPTDLVKVRLQAEGKLAAGAPRRYSGALNAYSTIVRQEGVRALWTGLGPNVARNAIINAAELASYDQVKETILKIPGFTDNVVTHILSGLGAGFFAVCIGSPVDVVKSRMMGDSGAYKGTIDCFVKTLKSDGPMAFYKGFIPNFGRLGSWNVIMFLTLEQAKKYVRELDASKRN

SEQ ID NO: 19223 - protein, 339 aa, Arabidopsis thaliana
MIPTTATVDDEPGQIKRALIDASAGAISGGVSRSVTSPLDVIKIRFQVQLEPTTSWGLVRGNLSGASKYTGMVQATKDIFREEGFRGFWRGNVPALLMVMPYTSIQFTVLHKLKSFASGSTKTEDHIHLSPYLSFVSGALAGCAATLGSYPFDLLRTILASQGEPKVYPTMRSAFVDIIQSRGIRGLYNGLTPTLVEIVPYAGLQFGTYDMFKRWMMDWNRYKLSSKIPINVDTNLSSFQLFICGLGAGTSAKLVCHPLDVVKKRFQIEGLQRHPRYGARVERRAYRNMLDGLRQIMISEGWHGLYKGIVPSTVKAAPAGAVTFVAYEFTSDWLESISW

SEQ ID NO: 19224 - protein, 306 aa, Arabidopsis thaliana
MVAAGKSDLSLPKTFACSAFAACVGEVCTIPLDTAKVRLQLQKSALAGDVTLPKYRGLLGTVGTIAREEGLRSLWKGVVPGLHRQCLFGGLRIGMYEPVKNLYVGKDFVGDVPLSKKILAGLTTGALGIMVANPTDLVKVRLQAEGKLAAGAPRRYSGALNAYSTIVRQEGVRALWTVLGPNVARNAIINAAELASYDQVKETILKIPGFTDNVVTHILSGLGAGFFAVCIGSPVDVVKSRMMGDSGAYKGTIDCFVKTLKSDGPMAFYKGFIPNFGRLGSWNVIMFLTLEQAKKYVRELDASKRN

SEQ ID NO: 19225 - protein, 300 aa, Glycine max
  unsure (1)..(300): unsure at all Xaa locations
MGDVAKDLAAGTVGGAAQLICGHPFDTIKVKLQSQPAPLPGXQLPKYSGAFDXAVKQTIAAEGPRGLYKGMGAPLATVAAFNAVLFTVRGQMETLVRSNPGAPLTVDQQFVCGAGAGVAVSILACPTELIKCRLQAQSALAGSETATVAVKYGGPMDVARHVLRSEGGVKGLFKGLVPTMGREIPGNAVMFGVYEALKRKFAGGTDTSXGLGRGSLMFSGGLAGAAFWLSVYPTDVVKSVIQVDDYKNPKFSGSIDAFRKISASEGIKGLYKGFGPAMARSVPANAACFLAYEMTRSALG

SEQ ID NO: 19226 - protein, 249 aa, Glycine max
  unsure (1)..(249): unsure at all Xaa locations
XHEVLSRAFDSSVSAKDPPSYKGVALGGTGTGAIQSLLISPVELTKVRLQLQNAGQMTETAKGPLMLAKNIWRKEGLRGIYRGLGVTVMRDGPSHGLYFWTYEYMREQLHPGCRKSGEESLNTMLIAGGLAGVTSWISCYPFDVVKTRLQAQTPSSIKYKGIIDCFKKSVNEEGYGVLWRGLGTTVARAFLVNGAIFSAYEISLRLLFNNGNIQMQETLXQKIKHHSNSSWCAENNQNSAFIFNNHYKM

SEQ ID NO: 19227 - protein, 315 aa, Glycine max
  unsure (1)..(315): unsure at all Xaa locations
QSSSYVADYGGDFKFRXYKEYAAGLFAGVAAVATGHPFDTVKVMLQKHNAEAHKIQYKNGWHCTARILKTEGIKGLYRGATSSFVGMAVEGSLFFGIYSQTKVYLQGGVQSGEPRPQVIIPSAAYSGAIISFVLGPTELIKCRMQIQGTDSLVPKSSRYNSPLDCALKTVKTEGVXXGIFRGGCATLLRESIGNAVFFSVYEYVRYYMHSNIKAASSDYTNLVDIGIGIVSGGLGGVAFWLTVLPLDVAKTLIQTNPDKNCPRNPFRVLSSIYQRAGFKGCYTGLGPTVSRAFPANAATIVAWELALKMLGIKHD

SEQ ID NO: 19228 - protein, 424 aa, Glycine max
  unsure (1)..(424): unsure at all Xaa locations
QLRSPPPPIPSKWGPLGSVTTPCCHDNTTRPRSALLLLLLSFCSEAFTFNFSSQPSPIDRLSCAIPCDQKPRASPPSSSLISLTTTTTPTSPWTPRPHPRSSTHRLHRRLSSPKTEQIASQSTEALKDIVFGSIAGMLGKIVEYPFDTVKVRLQSQPDHLPLRYAGPLDCFRQSIHQDGVRGLYRGVSAPLLGAAAETSCLFFSYRVAQDVIRATKSKADDKLPLPQLVAAGAMSGAVTSLILTPIELVKCRMQVPLTSSMDPTLRNASIGPAAVIRDVYRREGIAGFWRGQLGTLLRETGGGAAWFGCYETFSLFFRQXXAQAATGEKDPTLPIWQSMLAGAGAGLGYNFSFYPADTIKSKMQTGDLSSIGAKRQTFFGVGRALFHTHGLKGLYRGCGITLLRSGPSSALIFTIYESLRTYFG

SEQ ID NO: 19229 - protein, 364 aa, Glycine max
  unsure (1)..(364): unsure at all Xaa locations
PYNLSTFQSNQFQCRLSSPSSSHPAEKGGESVCVAAMEEPSKLKRAMIDSWAGAISGGISRTVTSPLDVIKIRFQVQLEPTSSWALLRKDLAAASKYTGMFQATKDILREEGVQGFWRGNVPALLMVMPYTAIQFTVLHKLKTFASGSSKSENHINLSPCLSYLSGALAGCAATLGSYPFDLLRTILASQGEPKVYPNMRSAFMDIIHTRGFQGLYAGLSPTLVEIIPYAGLQFGTYDTFKRWTMAWNQRQYSNXXTAESLSSFQLFLCGLAAGTCAKLVCHPLDVVKKRFQIEGLQRHPRYGARVEHRAYKNMLDAMKRILQMEGWAGLYKGILPSTVKAAPAGAVTFVAYELTVDWLESFLT

SEQ ID NO: 19230 - protein, 368 aa, Glycine max
  unsure (1)..(368): unsure at all Xaa locations
EPSFFSKNLFKTLEERSQLVTCSMAVQSSTSSESQASENVMHRHFFLWREFLWGAVAGAFGEGMMHPVDTVKTRLQSQAILNGIQNQKNILQMVRYVWQVDGLKGFYRGVTPGIIGSLATGATYFGVIESTKKWIEDSHPSLGGHWAHFFAGGVGDTLGSFVYVPCEAMKHRMQIQGTIASPGTQIYGDYTGMLHAGCSIWKAQGLKGLYAGYLSTLARDVPFAGLMVVFYEALKDAKDYVEQRCPNWHVNNSVEGLVLGGLAGGLSAYLPTPLDVVKTRLQVQGSTLRKKGWLDAIRNIWATEGMKGMFRGSVPRITWYIPASALTFMAVEFLRDHFYERVPNDNLXEDVGRLSVDHKSAGGLKVSH

SEQ ID NO: 19231 - protein, 342 aa, Glycine max
KGKGGERVFAAMEEPSKLKRAMIDSLAGAISGGISRTVTSPLDVIKIRFQVQLEPTSSWALLRKDLASATAAASKYTGMLQATKDILREEGVQGFWRGNVPALLMVMPYTAIQFTVLHKLKTFASGSSKTENHINLSPYLSYISGALAGCAATVGSYPFDLLRTILASQGEPKVYPNMRSAFMDIVHTRGFQGLYSGLSPTLVEIIPYAGLQFGTYDTFKRWGMAWNHRYSNTAAEDNLSSFQLFLCGLAAGTCAKLVCHPLDVVKKRFQIEGLQRHPRYGARVEHRAYRNMLDAMQRILQLEGWAGLYKGIIPSTVKAAPAGAVTFVAYELTSDWLESTFN

SEQ ID NO: 19232 - protein, 334 aa, Glycine max
VFSRGDQREEEGKDSNLHTQPLVPFPTLTMVADSKSNSDLSFGKIFASSAFSACFAEVCTIPLDTAKVRLQLQKQAVAGDVVSLPKYKGMLGTVGTIAREEGLSALWKGIVPGLHRQCLYGGLRIGLYEPVKTFYVGKDHVGDVPLSKKILAAFTTGAFAIAVANPTDLVKVRLQAEGKLPPGVPRRYSGSLNAYSTIVRQEGVGALWTGLGPNIARNGIINAAELASYDQVKQTILKIPGFTDNVVTHLLAGLGAGFFAVCIGSPVDVVKSRMMGDSSYKNTLDCFIKTLKNDGPLAFYKGFLPNFGRLGSWNVIMFLTLEQTKKFVKSLESS

SEQ ID NO: 19233 - protein, 347 aa, Glycine max
FNFAADPGGESVCVAAMEEPSKLKRAMIDSWAGAISGGISRTVTSPLDVIKIRFQVQLEPTSSWALLRKDLASATAAASKYTGMLQATKDILREEGVQGFWRGNVPALLMVMPYTAIQFTVLHKLKTFASGSSKTENHINLSPYLSYISGALAGCAATVGSYPFDLLRTILASQGEPKVYPNMRSAFMDIIHTRGFQGLYSGLSPTLVEIIPYAGLQFGTYDTFKRWGMAWNHRYSNTSAEDNLSSFQLFLCGLAAGTCAKLVCHPLDVVKKRFQIEGLQRHPRYGARVEHRAYRNMPDAMQRIFRLEGWAGLYKGIIPSTVKAAPAGAVTFVAYELTSDWLESTFN

SEQ ID NO: 19234 - protein, 364 aa, Glycine max
  unsure (1)..(364): unsure at all Xaa locations
PYNLSTFQSNQFQCRLSSPSSSHPAEKGGESVCVAAMEEPSKLKRAMIDSWAGAISGGISRTVTSPLDVIKIRFQVQLEPTSSWALLRKDLAAASKYTGMFQATKDILREEGVQGFWRGNVPALLMVMPYTAIQFTVVHKLKTFASGSSKSENHINLSPCLSYLSGALAGCAATVGSYPFDLLRTILASQGEPKVYPNMRAALVDILQTRGFRGLYAGLSPTLVEIIPYAGLQFGTYDTFKRWTMAWNQRQYSNXXTAESLSSFQLFLCGLAAGTCAKLVCHPLDVVKKRFQVDGRLWHPSSPPRVEHRAYKNMLDAMQRILQLEGWAGLYKGILPSTVKAAPAGAVTLGAYELTAHWLEYTNN

SEQ ID NO: 19235 - protein, 314 aa, Glycine max
  unsure (1)..(314): unsure at all Xaa locations
PLVPFPTLTMVADSKSKSDLSFGKTFASSAFSACFAEVCTIPLDTAKVRLQLQKQAATGDVVSLPKYKGMLGTVATIAREEGLSALWKGIVPGLHRQCLYGGLRIGLYDPVKTFYVGKDHVGDVPLSKKILAAFTTGAFAIAVANPTDLVKVRLQAEGKLPPGVPRRYSGSLNAYSTIVRQEGVGALWTGLXPHIARNGIINAAELAAYDQVKQTILKIPGFTDNVVTHLLAGLGAGFFAVCVGSPVDVVKSRMMGDSSYKSTLDCFVKTLKNDGPFAFYKGFIPNFGRLGSWNVIMFLTLEQAKKFVKTLESA

SEQ ID NO: 19236 - protein, 317 aa, Glycine max
MTADTHAAPNINPKGLLCNAAAGASAGVIAATFVCPLDVIKTRFQVHGVPQLAHRSAKGSIIVASLEQVFHKEGLRGMYRGLAPTVLALLPNWAVYFSAYEQLKSLLQSDDSHHLSIGANMIAASGAGAATTMFTNPLWVVKTRLQTQGMRPGVVPYRGTLSALRRIAHEEGIRGLYSGLVPALAGISHVAIQFPTYETIKFYLANQDDTAMEKLGARDVAIASSVSKIFASTLTYPHEVVRSRLQEQGHHSEKRYSGVIDCIRKVFHQEGVSGFYRGCATNLLRTTPAAVITFTSFEMIHRFLVSYFPSDPRPHIL

SEQ ID NO: 19237 - protein, 316 aa, Oryza sativa (japonica cultivar-group)
MGDVAKDLTAGTVGGAAQLVVGHPFDTIKVKLQSQPTPPPGQPPKFAGAMDAVKQTLAAEGPRGLYKGMGAPLATVAAFNALLFTVRGQMEAVLRSEPGAPLTVSQQVVAGAGAGVAVSFLACPTELIKCRLQAQSALASAAPAAAAAAASPVGGGAATATASVAAVKYGGPVDVAKQVLRSEGGVGGLFKGLGPTLAREVPGNALMFGVYEAIKQYLAGGQDTSSLGRGSLVVAGGLAGASFWGSVYPTDVVKSVIQVDDYKNPKYSGSMDAFRKILAADGVKGLYKGFGPAMARSVPANAACFLAYEVTRSALG

SEQ ID NO: 19238 - protein, 296 aa, Oryza sativa (japonica cultivar-group)
MGDVVKDLVAGTVGGAANLIVGHPFDTIKVKLQSQPTPAPGQFPKYAGAVDAVKQTIATEGPRGLYKGMGAPLATVAAFNALLFTVRGQMEALLRSEPGQPLTVNQQVVAGAGAGVAVSFLACPTELIKCRLQAQSALAEAAAASGVALPKGPIDVAKHVVREAGMKGLFKGLVPTMGREVPGNAVMFGVYEGTKQYLAGGQDTSNLGRGSLILSGGLAGAVFWLSVYPTDVVKSVIQVDDYKKPRYSGSVDAFKKILAADGVKGLYKGFGPAMARSVPANAATFLAYEITRSALG

SEQ ID NO: 19239 - protein, 322 aa, Oryza sativa (japonica cultivar-group)
MEFWPEFLASSWGKEFVAGGVGGMAGVLAGHPLDTLRIRLQQPPPPASPGITAAPGRPASAASLLRGILRAEGPSALYRGMGAPLASVAFQNAMVFQVFAILSRSIDQPSSMSEPPSYTSVALAGVGTGALQTLILSPVELVKIRLQLEAAGQKHRRPGDHHGPVDMARDILRKEGVRGIYRGLAVTALRDAPAHGVYFWTYEYARERLHPGCRGHGGEQESLATMLVSGGLAGVASWVCCYPLDVVKSRLQAQGYPPRYRGIADCFRRSVREEGLPVLWRGLGTAVARAFVVNGAIFSAYELALRFLASSSNDQRLVMEEN

SEQ ID NO: 19240 - protein, 306 aa, Lycopersicon esculentum
MGGGDHGGKSDISFAGIFASSAFAACFAEACTLPLDTAKVRLQLQKKAVEGDGLGLPKYRGLLGTVGTIAKEEGVASLWKGIVPGLHRQCIYGGLRIGMYEPVKNLYVGKDHVGDVPLSKKILAALTTGALGITVANPTDLVKVRLQAEGKLPAGVPRRYSGALNAYSTIVKQEGVRALWTGLGPNIGRNAIINAAELASYDQVKEAVLRIPGFTDNVVTHLIAGLGAGFFAVCIGSPVDVVKSRMMGDSAYKNTLDCFVKTLKNDGPLAFYKGFIPNFGRLGSWNVIMFLTLEQAKKFVKNLESP

SEQ ID NO: 19241 - protein, 300 aa, Nicotiana tabacum
MGDKAKSTSSAGAWPTVKPFANGGASGMLATCVIQPIDMIKVRIQLGQGSAGEVTRTMLKNEGFGAFYKGLSAGLLRQATYTTARLGSFRVLTNKAIEANDGKPLPLYQKALCGLTAGAIGACFGSPADLALIRMQADATLPVAQRRNYTNAFHALYRIVADEGVLSLWKGAGPTVVRAMALNMGMLASYDQSVEFFKDNLGMGEAATVVGASSVSGFFAAACSLPFDYVKTQIQKMQPDAQGKYPYTGSFDCAMKTLKSGGPFKFYTGFPVYCVRIAPHVMMTWIFLNQIQKVEKKIGL

SEQ ID NO: 19242 - protein, 297 aa, Nicotiana tabacum
MGEKPKSGGVWPTVKPFVNGGASGMLATCVIQPIDMIKVRIQLGQGSAVDVTKTMLKNEGFGAFYKGLSAGLLRQATYTTARLGSFRSLTNKAIEANEGKPLPLYQKALCGLTAGAIGACVGSPADLALIRMQADATLPLAQRRHYTNAFHALSRIVADEGVLALWKGAGPTVVRAMALNMGMLASYDQSVEFCRDNLGMSEAATVVGASSVSGFFAAACSLPFDYVKTQIQKMQPDAEGKLPYSGSFDCAMKTLKAGGPFKFYTGFPVYCVRIAPHVMMTWIFLNQIQKAEKKLGL

SEQ ID NO: 19243 - protein, 297 aa, Nicotiana tabacum
MVEKPKSGGVWPTVKPFVNGGASGMLATCVIQPIDMIKVRIQLGQGSAVDVTKTMLKNEGFGAFYKGLSAGLLRQATYTTARLGSFRILTNKAIEANEGKPLPLYQKALCGLTAGAIGACFGSPADLALIRMQADATLPLAQRRHYTNAFHALSRIVADEGVLALWKGAGPTVVRAMALNMGMLASYDQSVEFCRDNLGMSEAATVVGASSVSGFFAAACSLPFDYVKTQIQKMQPDAEGKLPYSGSFDCAMKTLKAGGPFKFYTGFPVYCVRIAPHVMMTWIFLNQIQKAEKKLGL

SEQ ID NO: 19244 - protein, 295 aa, Nicotiana tabacum
EKPKSGGVWPTVKPFVNGGASGMLATCVIQPIDMIKVRIQLGQGSAVDVTKTMLKNEGFGAFYKGLSAGLLRQATYTTARLGSFRILTNKAIEANEGKPLPLYQKALCGLTAGAIGACFGSPADLALIRMQADATLPLAQRRHYTNAFHALSRIVADEGVLALWKGAGPTVVRAMALNMGMLASYDQSVEFCRDNLGMSEAATVVGASSVSGFFAAACSLPFDYVKTQIQKMQPDAEGKLPYSGSFDCAMKTLKAGGPFKFYTGFPVYCVRIAPHVMMTWIFLNQIQKAEKKLGL

SEQ ID NO: 19245 - protein, 226 aa, Nicotiana tabacum
ELRQATDTTARLGSFRVLTNKAIEANDGNPLPLYQKALCGLTAGAIGACFGSPADLALIRMQADATLPVAQRRNYTNAFHALYRIVADEGVLSLWKGAGPTVVRAMALNMGMLASYDQSVEFFKDNLGMGEAATVVGASSVSGFFAAACSLPFDYVKTQIQKMQPDAQGKYPYTGSFDCAMKTLKSGGPFKFYTGFPVYCVRIAPHVMMTWIFLNQIQKVEKKIGL

SEQ ID NO: 19246 - protein, 306 aa, Solanum tuberosum
MGGGDHGGKSDISFAGIFASSAFAACFAEACTLPLDTAKVRLQLQKKAVEGDGLALPKYRGLLGTVGTIAKEEGIASLWKGIVPGLHRQCIYGGLRIGMYEPVKNLYVGKDHVGDVPLSKKILAALTTGALGITIANPTDLVKVRLQAEGKLPAGVPRRYSGALNAYSTIVKQEGVRALWTGLGPNIGRNAIINAAELASYDQVKEAVLRIPGFTDNVVTHLIAGLGAGFFAVCIGSPVDVVKSRMMGDSAYKNTLDCFVKTLKNDGPLAFYKGFIPNFGRLGSWNVIMFLTLEQAKKFVKSLESP

SEQ ID NO: 19247 - protein, 297 aa, Solanum tuberosum
MGEKPVSGGVWPTVKPFINGGVSGMLATCVIQPIDMIKVRIQLGQGSAADVTKTMLKNEGFGAFYKGLSAGLLRQATYTTARLGSFRILTNKAIEANEGKPLPLYQKALCGLTAGAIGATVGSPADLALIRMQADATLPLAQRRNYTNAFHALSRIAVDEGVLALWKGAGPTVVRAMALNMGMLASYDQSVEFFRDNLGMGEAATVVGASSVSGFFAAACSLPFDYVKTQIQKMQPDAEGKLPYTGSFDCAMKTLKAGGPFKFYTGFPVYCIRIAPHVMMTWIFLNQIQKVEKKIGL

SEQ ID NO: 19248 - protein, 436 aa, Dictyostelium discoideum
MENNNKNINTTNNSTTINTNNNNNPINKNNNNNNINNNNNNNINNINNINNVNNNNNNNNNNNNNNNNNNNNNNNNNNNNNNNNNNINNNNNNINNNNINKKNINNINKNKINNNNNNEIGEEKAVEGGFLAGLSRNVTRIIGSFSSGMAEESAGYPLDLIKTRIQLSQSGVSGGGGTNTSIIKIFKDVIKTEGVIGLFKGLSSPLILSALVTAIQFGLFEDTLKYFRKHQYFKNHDTLSLLFSGSIAGFAQSFITCPVDLVKIQMQIQGIPSSQPNSNNNNNNNKAKGNSYFTKLIYREKGLLGFYQGLSPTLFRDVPGLAIFFTTYETLKKQFGQPELSTQSPTEFIKSFIPIVLSGGSAGVFYHGLTHPFDIAKTLIQSDRSATKYKGTFDCLKQVYQNQGPKSLFKGFSAVAIKSFQSNAVGFLVYEMVINL

SEQ ID NO: 19249 - protein, 935 aa, Oryza sativa
  unsure (1)..(935): unsure at all Xaa locations
MGVNGIVIETGPVIELVRRPTSRGFATSTLRALPTTAPPFPTTPTSKVPFXLAPMSAPAAASRHHSGPCPPPAEGEREKEREKGGRRKREMTCGAHMLTVGTVLCCICGVAMQPNPANMCARCIRARVDITEGVPRHAAVVYCPDCTSYLQPPRSWLRAGPESPELMQILLRRLNRPLARLRVSLSAAEFVFSEPHSKRLRLKLRLRREVFNAVVLEQTHPVEFTVHDRLCDACARAQSNPDQWVAVVQLRQHVPHRRTFLYLEQLLLKHGQASLALRVAAAPGGLDFFFGSRSHAARLVDFLATVAPVQTQTAKQLVSHDTKSNVYNYKHTFSVEICPICREDLIALSPQVSRDLGGLGPIVLCIKVTNAIALLDPLTLRVHHLEEKKYRVYNFKAALTSKQLVEYIVLDIEHESPEITIDGSRYQLAYAQVARVSDFGKNDTMFTVRTHLGHLLNPGDLALGYDLYGANLNDDDMDTAMMRHSLPEVILVKKSFAKRPRTRRWKLKRLPMEEDAVNKAKGELEKRADEYEEFLRDLEHNSDIRFQIDLYKDEDYRSEMASTIGDDVPTVPIEELIEDLSLGDDEEEDEAAASASPPFHITPTSSAIAIATNPIEKQTPPPRFESPPSQTQNSQIDQIMGDVVKDLVAGTVGGAANLIVGHPFDTIKVKLQSQPTPAPGQFPKYAGAVDAVKQTIATEGPRGLYKGMGAPLATVAAFNALLFTVRGQMEALLRSEPGQPLTVNQQVVAGAGAGVAVSFLACPTELIKCRLQAQSALAEAAAASGVALPKGPIDVAKHVVREAGMKGLFKGLVPTMGREVPGNAVMFGVYEGTKQYLAGGQDTSNLGRGSLILSGGLAGAVFWLSVYPTDVVKSVIQVDDYKKPRYSGSVDAFKKILAADGVKGLYKGFGPAMARSVPANAATFLAYEITRSALG

SEQ ID NO: 19250 - protein, 296 aa, Oryza sativa; identical to SEQ ID NO: 19238

SEQ ID NO: 19251 - protein, 595 aa, Oryza sativa
  unsure (1)..(595): unsure at all Xaa locations
MGDVVKDLVAGTVGGAANLIVGHPFDTIKVKLQSQPTPAPGQFPKYAGAVDAVKQTIATEGPRGLYKGMGAPLATVAAFNALLFTVRGQMEALLRSEPGQPLTVNQQVVAGAGAGVAVSFLACPTELIKCRLQAQSALAEAAAASGVALPKGPIDVAKHVVREAGMKGLFKGLVPTMGREVPGNAVMFGVYEGTKQYLAGGQDTSNLGRGSLILSGGLAGAVFWLSVYPTDVVKSVIQVDDYKKPRYSGSVDAFKKILAADGVKGLYKGFGPAMAREEMGDVAKDLTAGTVGGAAQLVVGHPFDTIKVKLQSQTTPTPGQPPKFAGAMDAVKQTLAAEGPRGLYKGMGAPLATVAAFNALLFTVRGQTDAVXLRSEPGAPLTVSQQVVAGAGAGVAVSFLACPTELIKCRLQAQSALASAAPAAAAAAASPVGGGAATATASVAAVKYGGPVDVAKQVLRSEGRVGRLSKGLGPTLAREVPGNALMFGVYEAIKQYLAGGQDTSSLGRGSLVVAGGLAGASFWGSVYPTDVVKSVIQVDDYKNPKYSGSMDAFRKILAADGVKGLYKGFGPAMARSVPANAACFLAYEVTRSALG

SEQ ID NO: 19252 - protein, 322 aa, Oryza sativa; identical to SEQ ID NO: 19239

SEQ ID NO: 19253 - protein, 119 aa, Oryza sativa
  unsure (1)..(119): unsure at all Xaa locations
MSCTAGGQMYNETLMEVEHTPPVHKRILDIMPGVPGGXVARIMVGQPFDTIKTRLQALGKGTIGAAGMPPEMVYTSGMDCVRKDRSRAEGPLXSLYKGTXVAPLLGNMVLLGXIHFPTX

SEQ ID NO: 19254 - protein, 244 aa, Oryza sativa
  unsure (1)..(244): unsure at all Xaa locations
XTTRSFSAGYAQMSSILFIFLLQNAMVFQVFAILSRSIDQPSSMSEPPSYTSVALAGVGTGALQTLILSPVELVKIRLQLEAAGQGPVDMARDILRKEGVRGIYRGLAVTALRDAPAHGVYFWTYEYARERLHPGCRGHGGEQESLATMLVFGGLAGVASWVCCYPLDVVKSRMQAQGYPPRYRGIADCFRRSVREEGLPVLWRGLGTDVARAFVVNGAIFSAYELALRFLASSSNDQRLVMEE

SEQ ID NO: 19255 - protein, 302 aa, Panicum miliaceum
MADAKQQQAVAPSAAWMTVKPFVNGGASGMLATCVIQPIDMVKVKIQLGEGSAATVTKKMLANEGIGSFYKGLSAGLLRQATYTTARLGSFRVLTNKAVEANEGKPLPLLQKAVIGLTAGAIGASVGSPADLALIRMQADSTLPAAQRRNYKNAFHALYRIVADEGVLALWKGAGPTVVRAMSLNMGMLASYDQSVELFRDTLGAGELSTMLGASAVSGFCASACSLPFDYVKTQIQKMQPDANGKYPYTGSLDCVMKTLKSGGPFKFYTGFPVYCVRIAPHVMLTWIFLNQIQKFEKDIGL

SEQ ID NO: 19256 - protein, 302 aa, Panicum miliaceum
MADAKQQQAVAPSAAWMMVKPFVNGGASGMLATCVIQPIDMVKVKIQLGEGSAATVTKKMLANEGIGSFYKGLSAGLLRQATYTTARLGSFRVLTNKAVEANEGKPLPLLQKAVIGLTAGAIGASVGSPADLALIRMQADSTLPAAQRRNYKNAFHALYRIVADEGVLALWKGAGPTVVRAMSLNMGMLASYDQSVELFRDKLGAGELSTMLGASAVSGFCASACSLPFDYVKTQIQKMQPDANGKYPYTGSLDCVMKTLKSGGPFKFYTGFPVYCVRIGPHVMLTWIFLNQIQKFEKDMGL

SEQ ID NO: 19257 - protein, 323 aa, Sorghum bicolor
MDTTSRAAKIPSLHQTEINWDNLDKTKLYVVGAGMFSGVTVALYPVSVVKTRMQVASGDAMRRNALATFKNILKMDGVPGLYRGFATVIIGAVPTRIIFLTALETTKAASLKLVEPFKLSEPVRAAFANGLAGLSASTCSQAIFVPIDVISQKLMVQGYSGNARYKGGLDVARKVIKADGIRGLYRGFGLSVMTYAPSSAVWWASYGSSQRIIWSALGHLHDKEEAPSQLKLVGVQASGGVFAGAVTSFVTTPIDTIKTRLQVMDNENKPKAREVVKRLIAEDGWKGLYRGLGPRFFSSSAWGTSMIVCYEYLKRLCAKVEEV

SEQ ID NO: 19258 - protein, 296 aa, Triticum aestivum
MGDIAKDLTAGTVGGIANLVVGHPFDTIKVKLQSQPSPAPGQLPKYAGAFDAVKQTVAAEGPRGLYKGMGAPLATVAAFNALLFTVRGQMETLLRSEPGAPLTVKQQVVAGAGAGLAVSFLACPTELIKCRLQAQSSLAEAGAVSGVALPKGPMDVARHVMRDAGIKGLFKGIVPTMGREIPGNAIMFGVYEAVKQYMAGGRDTSGLGQGSLILAGGLAGGALWLTVYPTDVVKSVIQVDDYKKPRYSGSIDALKKIVAADGVKGLYKGFGPAMARSVPANAATFVAYEITRSAMG

SEQ ID NO: 19259 - protein, 322 aa, Triticum monococcum
MDTSTRAAKIPSLPQQTEINWDNLDMTKLYVVGAGMFSCVTVALYPVSVIKTRMQVASGEAMRRNALATFKNILKVDGVPGLYRGFGTVITGAIPARIIFLTALEKTKATSLKLVEPLQLSESMEAALANGLGGLTASLCSQAVFVPIDVVSQKLMVQGYSGHVRYKGGIDVVQKIMKSDGPRGLYRGFGLSVMTYAPSSAVWWASYGFSQRMIWSALGHLNDKEDAPSQLKIVGVQATGGMIAGAVTSCVSTPLDTIKTRLQVNQNKPKASEVVRRLIAEDGWKGFYRGLGPRFFSSSAWGTSMIVCYEYLKRVCAKVEEA

SEQ ID NO: 19260 - protein, 302 aa, Zea mays
  unsure (1)..(302): unsure at all Xaa locations
MGDVAKDLTAGTVGGAANLIVGHPFDTIKVKLQSQPTPAPGQLPKYAGAIDAVKQTVAAEGPRGLYKGMGAPLATVAAFNAVLFSVRGQMEALLRSEPGVPLTVKQQIVAGAGAGIAVSFLACPTELIKCRLQAQSSLAEAAAXASGVALSKGPIDVAXKHVVRDAGAKGLFKGLVPTMGTXEVPGNALMFGVYEATKQYLAGGPGTRRGLGRGXSQVLAGGLAGAAFWLSVYPTDVVKSVIQVDDYKKPKYSGSLDALRKIVAADGVKGLYKGFGXPAMARSVPANAATFVAYEITRSALG

SEQ ID NO: 19261 - protein, 337 aa, Zea mays
  unsure (1)..(337): unsure at all Xaa locations
MVAAGTYSDDTSGGGCGSMEFWPEFLASSGGREFVAGGVGGMAGVLAGHPLDTLRIRLQQPPAAGAPXXAATRTXSAPRLLRGILRAEGPCALYRGMAAPLASVAFQNAMVFQVYAVLSRSLGXXATSEPPSYASVALAGVSTGALQTLILSPVELVKIRLQLEAASGHGPVEMVREILRREGLRGVYRGLAVTALRDAPAHGVYFWTYERARERLHPGCRRSSSSQDQDGDEGLGTMLVAGGLAGVASWVCCYPLDVVKSRLQAQGAASASAPRYRGVVDCFQRSVREEGLPVLWCGLGTAVARAFVVNGAIFSAYELALRFIASGGGPRLVMEDK

SEQ ID NO: 19262 - protein, 339 aa, Zea mays
  unsure (1)..(339): unsure at all Xaa locations
RRRNSGGTGPSSPLVPQFCISLFADIRVGPAASSSDGRSGRXAAKEYVAGSAAGVAQVVVGHPFDTVKVKLQAHNTTAHGKVYKNAFHCTSRILLDEGITGLYKGASSSFIGIAVESSLFFGTYSQAKQLLQGSYEVGRPHLQVIIPSAACSGALISCILTPTELTKCRMQVQGKDVIHGARYSSPLDCAVKTLESEGVXXGIFRGGLATLFREAIGNAVFFCTYEYSRYWMHNYLDSSRFSGSSHLDIGIGVVSGGVSGMAFWTATLPLDVAKTIIQTDPDPHVSRNPLQILSMVYKRAGLGGCYAGLGPTLARAFPANAAAIVAWEYSAKILGIKRG

SEQ ID NO: 19263 - protein, 404 aa, Zea mays
  unsure (1)..(404): unsure at all Xaa locations
RKPCPWRAVLNPKPFDLLYTRPHRESHASATMAASPSSPHAAPGVREPVPLSAVSPPPXNYFMWREFVWGGIAGAFGEGMMHPVDTLKTRLQSQAIMTGAKAQKNILQMVRTVWASDGLRGFYRGISPGVTGSLATGATYFGIIESTKAWLEIANPNLSGHWSHFIAGAIGDTLGSFVYVPCEVMKQRMQIQGTQKSWASAVAKGNISQTHGIEMYGYYNGMFHAGCSIWRDHGLKGLYAGYWSTLARDVPFAGLMVTFYEAMKKMSEYGKTKYLPHSDLHVSNSFEGLVLGGLAGGCSAYLTTPLDVIKTRLQVQGSMSRYNGWLDAITKTWTSEGVRGLFKGSVPRIIWYVPASAFTFMAVEFLRDHFNDKVDADAHEVTSLSIDTKSEVEKSAXRSFSYDI

SEQ ID NO: 19264 - protein, 302 aa, Schizosaccharomyces pombe
MHEKGDKNLLAILVFSFTKDFLAGVSGGVAQVLVGQPFDCVKVRLQSQSNVSPIYNNALDCVKKISKNEGLAAFYKGTVLPLLGIGFCVSIQFTTFEYCKRFFSRDGTPVTMPQYYVSGAISGLANSFLVGPVEHVRIRLQIQTGKNVLYHGPWDCIKKISSQYGLSGIMKGYNPTAAREAHGLGMYFLAYEALVKNTMAKHHLTDRSQTPGWKLCVFGAGAGYAMWLAAYPFDIVKSKIQTDGFLSKATYKNSWQCAKGIYTKAGLRGFYRGFVPVLVRAAPANAVTFYVYETVSQHIRHL

SEQ ID NO: 19265 - protein, 320 aa, Schizosaccharomyces pombe
MSEKQTIKALPAHNPTQVKKLGPVSGFLSGGLAACGAVTLTNPFEVIKTRFQLQGQLTKLDPSKRIYKSVGQAFSLIARHEGIRGLQRGLGTAYVYQICLNGCRLGFYEPIRRTLNTWFLDDPKGNKLAINVASGAGSGLCGALFGSPFFLVKTRMQSYSPKFPVGQQYGYKHIFNAFSRIIKENGVKGLFVGADAAILRTVSGSSVQLPIYNWAKRMIEHYNLLEEGMIKHLTASAVSGFGVCCTMQIFDTVMTRMYNQKNKELYKNPIDCILKTIRSEGFFALYKGFGAHLARIAPHTIFCLTFVEQTNKLFLKFQKD

SEQ ID NO: 19266 - protein, 291 aa, Schizosaccharomyces pombe
MSTVAKTNPKSSNKPGPVKSIIAGGVAGAIEISITYPAEFAKTRLQLYRNVEGTKAKLPPFGLEWYRGCSTVIVGNSLKAAVRFFAFDSIKKSLSDEHGHLTGPRTVLAGLGAGVAESVLVLTPFESIKTAIIDDRKRPNPRLKGFLQASRIIVHENGIRGLYRGLAATVARQAANSGVRFTAYNSIKQSLQSRLPPDEKLSTVTTFLVGSVAGIITVYCTQPIDTVKSRMQSLSASKEYKNSIHCAYKILTQDGLLRFWSGATPRLARLILSGGIVFTVYEKVMEILKPF

SEQ ID NO: 19267 - protein, 305 aa, Pichia jadinii
MATEKKQSTFLIDFLMGGVSAAISKTAAAPIERVKLLIQNQDEMIKQGRLAKRYDGIADCFRRTAGDEGVVSFWRGNTANVIRYFPTQALNFAFKDKFKAMFGFKKEEGYWKWFAGNLASGGLAGGSLFGSVYSLDYARTRLANDAKSAKGTGERDSTGLLDVYKKTLASDGIAGLYRGFLPSVVGIVVYRGLYFGLYDSLKPVLLTGSLENNSWAAFLLGWVVTTGASTASYPLDTVRRRMMMTSGQAVKYDGAFDAFRKIVAAEGVKSLFKGCGANILRGVAGAGVISLYDQLQVILFGKKFK

SEQ ID NO: 19268 - protein, 305 aa, Pichia jadinii
MATEKKQSTFLIDFLMGGVSAAISKTAAAPIERVKLLIQNQDEMIKQGRLAKRYDGIADCFRRTAGEEGVVSFWRGNTANVIRYFPTQALNFAFKDKFKAMFGFKKEEGYWKWFAGNLASGGLAGGSLFGSVYSLDYARTRLANDAKSAKGTGERDSTGLLDVYKKTLASDGIAGLYRGFLPSVVGIVVYRGLYFGLYDSLKPVLLTGSLENNSWAAFLLGWVVTTGASTASYPLDTVRRRMMMTSGQAVKYDGAFDAFRKIVAAEGVKSLFKGCGANILRGVAGAGVISLYDQLQVILFGKKFK

SEQ ID NO: 19269 - protein, 307 aa, Saccharomyces cerevisiae
MSEEFPSPQLIDDLEEHPQHDNARVVKDLLAGTAGGIAQVLVGQPFDTTKVRLQTSSTPTTAMEVVRKLLANEGPRGFYKGTLTPLIGVGACVSLQFGVNQAMKRFFHHRNADMSSTLSLPQYYACGVTGGIVNSFLASPIEHVRIRLQTQTGSGTNAEFKGPLECIKKLRHNKALLRGLTPTILREGHGCGTYFLVYEALIANQMNKRRGLERKDIPAWKLCIFGALSGTALWLMVYPLDVIKSVMQTDNLQKPKFGNSISSVAKTLYANGGIGAFFKGFGPTMLRAAPANGATFATFELAMRLLG

SEQ ID NO: 19270 - protein, 307 aa, Saccharomyces cerevisiae
MSEEFPSPQLIDDLEEHPQHDNARVVKDLLAGTAGGIAQVLVGQPFDTTKVRLQTSSTPTTAMEVVRKLLANEGPRGFYKGTLTPLIGVGACVSLQFGVNEAMKRFFHHRNADMSSTLSLPQYYACGVTGGIVNSFLASPIEHVRIRLQTQTGSGTNAEFKGPLECIKKLRHNKALLRGLTPTILREGHGCGTYFLVYEALIANQMNKRRGLERKDIPAWKLCIFGALSGTALWLMVYPLDVIKSVMQTDNLQKPKFGNSISSVAKTLYANGGIGAFFKGFGPTMLRAAPANGATFATFELAMRLLG

SEQ ID NO: 19271 - protein, 329 aa, Saccharomyces cerevisiae
MSEEFPTPQLLDELEDQQKVTTPNEKRELSSNRVLKDIFAGTIGGIAQVLVGQPFDTTKVRLQTATTRTTTLEVLRNLVKNEGVFAFYKGALTPLLGVGICVSVQFGVNEAMKRFFQNYNASKNPNMSSQDVDLSRSNTLPLSQYYVCGLTGGVVNSFLASPIEQIRIRLQTQTSNGGDREFKGPWDCIKKLKAQGGLMRGLFPTMIRAGHGLGTYFLVYEALVAREIGTGLTRNEIPPWKLCLFGAFSGTMLWLTVYPLDVVKSIIQNDDLRKPKYKNSISYVAKTIYAKEGIRAFFKGFGPTMVRSAPVNGATFLTFELVMRFLGEE

SEQ ID NO: 19272 - protein, 292 aa, Saccharomyces cerevisiae
MEDSKKKGLIEGAILDIINGSIAGACGKVIEFPFDTVKVRLQTQASNVFPTTWSCIKFTYQNEGIARGFFQGIASPLVGACLENATLFVSYNQCSKFLEKHTNVFPLGQILISGGVAGSCASLVLTPVELVKCKLQVANLQVASAKTKHTKVLPTIKAIITERGLAGLWQGQSGTFIRESFGGVAWFATYEIVKKSLKDRHSLDDPKRDESKIWELLISGGSAGLAFNASIFPADTVKSVMQTEHISLTNAVKKIFGKFGLKGFYRGLGITLFRAVPANAAVFYIFETLSAL

SEQ ID NO: 19273 - protein, 327 aa, Saccharomyces cerevisiae
MSSDTSLSESSLLKEESGSLTKSRPPIKSNPVRENIKSFVAGGVGGVCAVFTGHPFDLIKVRCQNGQANSTVHAITNIIKEAKTQVKGTLFTNSVKGFYKGVIPPLLGVTPIFAVSFWGYDVGKKLVTFNNKQGGSNELTMGQMAAAGFISAIPTTLVTAPTERVKVVLQTSSKGSFIQAAKTIVKEGGIASLFKGSLATLARDGPGSALYFASYEISKNYLNSRQPRQDAGKDEPVNILNVCLAGGIAGMSMWLAVFPIDTIKTKLQASSTRQNMLSATKEIYLQRGGIKGFFPGLGPALLRSFPANAATFLGVEMTHSLFKKYGI

SEQ ID NO: 19274 - protein, 292 aa, Saccharomyces cerevisiae
MEDSKKKGLIEGAILDIINGSIAGACGKVIEFPFDTVKVRLQTQASNVFPTTWSCIKFTYQNEGIARGFFQGIASPLVGACLENATLFVSYNQCSKFLEKHTNVSPLGQILISGGVAGSCASLVLTPVELVKCKLQVANLQVASAKTKHTKVLPTIKAIITERGLAGLWQGQSGTFIRESFGGVAWFATYEIVKKSLKDRHSLDDPKRDESKIWELLISGGSAGLAFNASIFPADTVKSVMQTEHISLTNAVKKIFGKFGLKGFYRGLGITLFRAVPANAAVFYIFETLSAL

SEQ ID NO: 19275 - protein, 312 aa, Neurospora crassa
MAASAADVDSHDGQNAGLQTAKDLFSGAVGGIAQVLIGQPFDIVKVRLQTSTQYSSALTAAASIYKHEGALAFYKGTLTPLLGIGACVSIQFGAFHSARRFLEQRRAATDKSFIPGVSNLGYGEYYAAGAFAGVANSVISGPIEHVRIRLQAQPHGAGRLYSGPWDCVRKLSQQAGGVLPGLYRGEVVTVLREAQAYGLWFLAFEWLMNADAARNKIDRKEIPSYKIALYGGLAGEALWLGSYPLDVVKSKMQTDGFGAGQKYKSMRDCFAQTFRAEGMRGFWKGIGPTLLRAMPVSAGTFAVVEMTMRAIN

SEQ ID NO: 19276 - protein, 324 aa, Neurospora crassa
MGANLKEHQEQAPGPATAPVAVQKAAANYKGFVAGVFSGIAKLSVGHPFDTIKVRLQTSDATRFSGPLQCLTQTIRNEGILGLYKGASPPLVGWMFMDSVMLGSLTVYRRLLRDNLFNPPWHPLHDPAKPLPSHGHGLAGILAGMTVSFIAAPVEHVKARLQIQYAARKEERMYKGPIDCLKKVYTHHGIRGVYHGLGATILFRSFFFFWWGTYDVFSRWMKQYTQMSTPAINFWAGGLSAQVFWLTSYPSDVVKQRFMTDNLGGGLGDGVRRFPRWRDAAVAVYRENGAKGYWRGFLPCFLRAFPANAMALLVFEGVMRSLPG

SEQ ID NO: 19277 - protein, 342 aa, Neurospora crassa
MSSTTSSPGAKIQQAVTDKLPHLPETKEELKAEIKAEAKAAASAGASQLRSFVAGGFGGVCAVVVGHPFDLAKVRLQTAEKGVYTGAIDVVKKSIAKDGLRRGLYAGVSAPLVGVTPMFAVSFWGYDLGKQIVRATSTVAPDGNLSIAQISAAGFFSAIPMTAITAPFERVKVILQVQGQQKLAPGEKPKYSGGMDVVRQLYKEGGVRSVFRGSVATLARDGPGSAAYFAAYEYIKKALTPKDPVTGEASGKLSLGAITVAGAGAGVAMWIPVFPIDTVKSRLQTAEGNVTIGGVVKQLYRAGGYKAFFPGFAPALARAVPANAATFLGVELAHQAMNKAFN

SEQ ID NO: 19278 - protein, 363 aa, Neurospora crassa
MDSVPAQTHQGFKEAGAASASHLTTTTSLPTKVESRTAVMEALEDIVYGSAAGIVGKYIEYPFDTVKVRLQSQPDHLPLRYTGPLDCFRQSIRADGFLGLYRGISAPLVGAALENSSLFFFERIGRSLLYSSGFAPRDSELSLSALWFTGGFSGAFTSLILTPVELVKCKIQVPDEPGGAGARQRQLKPIPVIKEIFRHEGLRGFWHGQLGTLIREAGGCAAWFGSKETTSKWFRGRNERALLKRGASQEEVVASRERPLPLWQQAIAGASAGMSYNFLFFPADTVKSRMQTSPIGGGGDNGGKGAATMMPKKSFGEEARALWKQAGIKGFYRGCGITVLRSAPSSAFIFMVYDGLKKYFPMA

SEQ ID NO: 19279 - protein, 706 aa, Neurospora crassa
MSTAAVVKEAVKETLIGSDEHAAADQVQPTAQTKARFTHYAVQDSETGELFLGPDQFIDAVAPPHEDYHKIKREQYSILFSVADRANKGKVTLSDWTYFENLLEKPDAEYEIAFRLFDVERLGTVKYDDFRRLYELNKGPNSIPFDWDCEWAKLYIGSKTKRHNLDYQQFSQMLRGLQGERIRQAFQLFDKDGDGFIEPGDFERIIMETSKHKLSDHLLENLNTLCNISQGSKVSYANVRAFQNIIKEMDLVELIIRKACGKSQDGKITRTEFLNQAAKITRFSLFTPMEADILFHFASVGNPSGRLGLEDFAKVLDPSWRNRHEAEARLLPQAVQTKGQQFAHRAGESAYNFILGSLSGAFGAFMVYPIDLVKTRMQNQRGASPGSRLYDNSIDCFRKVIRNEGFRGLYSGVLPQLVGVAPEKAIKLTVNDLVRGAFTDKQGNISVIHEIIAGGTAGGCQVVFTNPLEIVKIRLQVQGEVAKSVEGAPKRSAMWIVRNLGLVGLYKGASACLLRDVPFSAIYFPTYSHLKKDLFGESKTKKLGVLQLLTAGAIAGMPAAYLTTPCDVIKTRLQVEARKGDTQYTGLRHAAKTIWKEEGFRAFFKGGPARIFRSSPQFGFTLAAYELLQSVLPYPGQKAEKMHAGVADAVSMVKDSVGGDSPYTRSRNALKILLDLDEHFGRVKLDANAAGWKALPTWMQTPPKTA

SEQ ID NO: 19280 - protein, 309 aa, Neurospora crassa
MSTTAGAFIAGGIAACGAVTATHPFETVKIRMQLQGELQSSTSSPHFYRGPIHGVSVIVRNEGLGGIYRGIGCAYIYQILLNGCRLGFYEPMRHALATTLFNDAKTQNLGINMFAGAASGIMGAMAGSPFFLAKTRLQSYSPFLPVGTQHQYKNAWDGLTKIYKGEGVKGLYRGVGAAMIRTGFGSSVQLPTYFFAKRRLVKHLGMEEGPALHLASSTASGFVVCVVMHPPDTIMSRLYNQNGNLYKGVFDCLAKTIRAEGFFAIYKGVIPHLTRILPHTILTLSLAEQTTKLVKKLEDKILGPETRVL

SEQ ID NO: 19281 - protein, 365 aa, Neurospora crassa
MSQQSNSQENSTSLKGSSKDGSNGGTSTSTSSLTNAGPSSDGQFWNSTQRLAKKYRTEVAASASSVLSTMSTFPLDSVKTRMQTYKYAGFVDCVKQTYHTERLRGFFRGVTAPMLSITAVRTVSFSIYQRSKYAYSDWVKRNFGFDVMSHVASHGSLPNFWTVATFGAAGATAGSCITLIACPFELTKLSAQVSVLMADKKNCLKPGSHAIAASYQNKGTLKTMGNIVKHRGLGGLYTGFGLHLTRDTLGTAMYFITYESSKQLLTTFGGAGTHNNPFAVLIAGGMCGIVSWALIYPVDSAKSIYQRNSLMYSKGEKVEPVKIRFFQRNMYRGLGVSMARSCAVNAVFFSSFEFLKKRIKAMEDH

SEQ ID NO: 19282 - protein, 331 aa, Neurospora crassa
MSSVKQSAQAATSDVVDTAKNATAETVTAATDFLHTPAVRAALPFINGGLSGMVATTVIQPIDMIKVRIQLAGEGKAGGPKPTPLGVTRDIIASGKAMDLYTGLSAGLLRQAVYTTARIGCFDTFMSRLSARAKEKGQSVGFKERASAGLAAGGLAAMIGNPADLALIRMQSDGLKPVAERKNYKSVIDALGGIARNEGVAALWAGAAPTVVRAMALNFGQLAFFSEAKAQLKARTQWSSKVQTLSASAIAGFFASFFSLPFDFVKTRLQKQTRGPDGKLPYNGMVDCFAKVAKQEGVFRFYRGFGTYYVRIAPHAMVTLLVADYLGWLTK

SEQ ID NO: 19283 - protein, 1796 aa, Neurospora crassa
MSSVKQSAQAATSDVVDTAKNATAETVTAATDFLHTPAVRAALPFINGGLSGMVATTVIQPIDMIKVRIQLAGEGKAGGPKPTPLGVTRDIIASGKAMDLYTGLSAGLLRQAVYTTARIGCFDTFMSRLSARAKEKGQSVGFKERASAGLAAGGLAAMIGNPADLALIRMQSDGLKPVAERKNYKSVIDALGGIARNEGVAALWAGAAPTVVRAMALNFGQLAFFSEAKAQLKARTQWSSKVQTLSASAIAGFFASFFSLPFDFVKTRLQKQTRGPDGKLPYNGMVDCFAKVAKQEGVFRFYRGFGTYYVRIAPHAMVTLLVADYLGWLTKQMFGVLGCVAYPSPIHPDYHAGPASTIAFDNQDELLWIGTQKGFAGSFIGRELKRFTAFRIHPETDGPLRQFLFVDKGVIFLGSRSVYMAARSGVPIWSIRHESMQDLRAMSFTSKGTSEILVAGWQNKMLVIDVNKGEVVKELPTQDQYSFLKMSRYICAATNKGTVNILDPITFTIKKQWQAHGAFINDLDTSNDFIVTCGGSHRQTHNTPAILDPYVKVFDLKNMSAMNPVPFAPLAAHVRMHPRMLTTAIVVNQAGQIHVTDLLNPSNSQVCYTQPQGVVLHFDVSRTGEGKALADNKHNTYVWGSPNKIQFTEIGIPPRLPDPPQPSLLPPDPDMLEELPLSRIGLPYYREQLFSALPPDIISDVGAPPQQIDPNILSTLTKTDWGYIGPNKTGLQRNQYMDTRSTMKTSNTIRAPKFLSEKARESQTGSEDNTLATNETAMMTPNNDHWSLRPEAPPEYRICEIKYSKFGVDDFDFGFFNNTPYPGLENNITNSYANSLLQVMHYTPLLRNMALQHAATACLADPCLLCELGYVFDMLQKGEGPSCHATNMLRALNHTSNASVSGVLEDIAKDKNPSTLVKNLTMFLFDKISQDYKGTPPISTELERTLFKLNQPPNPLDLVKRLLETDARYQIKCMHCQHVSPRTATTFVNKLCYPAAKPNIRGMKAQRITFSQVLKAGLENEAVNKGYCTKCQRYQNLDQRKIIFNIPAVLALCTEITTAEHRKLWSTPGWLPEEIGIIVDQGHVYCYEGDDLKLHLNRGIHNITVYSLVGTVVNVETKSPQKSHLVATVNVGRAEPESKDQDRWHLFNDFSVRGISKVEALTFNAAWKMPVVVMFQVKAANHRFNMDWKTRLDTSVLFRDNNPHALKTYELLDRETEIPGPDTVIAIDTEFIRLKEREIHIDEDGKSKTIRPISHAIARASVVRGQGSREGVAFIDDYIHIKETIVDYLTEWSGITPTDLDPINSQRNLVSPKTAYKKLWVLVNLGCKFLGHGLSQDFRVINIQVPRNQVIDTSIIFMKPPSQRKISLAFLAWYLLKEDIQQNTHDSIEDAQTALKLYRKYEEFMANGSFHDVLEALYKKGKTLNFKPPRISTGAAKDAGFGAVHRVGTPPVPAPGTTEGSFEISNSSTATTGGSALSATGGMGSASASSSMPSTPVRKPIGLGGPFTVAGVVKPSPATSLDNFGAGAVGTGITTAAATMGGGYGGYGTDGAYWGGPNDMAPTSMIGGSAFIPAKFPPGPPETRGFIPYRPQVLLAEREAAAAAAAAAAAAAANNDVGGRGGVACGNGGAGGEQGKQDEESDNDEMRRQQQELFAPEPYAPGFEQNLFEASRRDEGSPVVEYVSPPAVEEDDSSTIKEVSSPVVKEVASPTASLSSPAAVVGEEEEKQKDEDVPPAIEEAAADPSVTTGSSSTLAAEKQRKQEEEEGSSAVGGGGGGEEGKQEKQDDQGSTPALAP

SEQ ID NO: 19284 - protein, 310 aa, Neurospora crassa
MTQPNAIDEEDYDYESLPPNFSLIQNMAAGAFAGIAEHCAMYPIDAVKTRMQIVNSNPSAVYHGVIQSTYRIASTEGIFSLWRGMSSVIAGAGPAHAVYFATYEAVKHLMGGNKVGEHHFLAAATSGACATIASDALMNPFDVIKQRMQIQNSAKMYRSMLDCAKYVYRNEGLGAFYVSYPTTLSMTVPFTALQFLAYESISTSMNPTKKYDPATHCLAGAVAGGFAAALTTPMDVIKTMLQTRGAAQDAEVRAVNGFVAGCKLLYRREGVKGFFKGLKPRVLTTMPSTAICWSAYEASKAYFIHQNSQS

SEQ ID NO: 19285 - protein, 327 aa, Neurospora crassa
MATKVNQDPKKRTSAATNLIAGGGAGMMEALVCHPLDTIKVRMQLSKRGRVPGQAKRGFIRTGVEIVKKETALGLYKGLGAVLTGIVPKMAIRFTSFEWYKQLLADKQTGVVSGQATFFAGLAAGVTEAVAVVTPMEVIKIRLQAQHHSMADPLDVPKYRNAAHALYTVVKEEGFGALYRGVSLTALRQGSNQAVNFTAYSYFKKWLYDYQPEYVGQNLPSYQTTLIGLVSGAMGPLSNAPIDTIKTRLQKSVAQPGETAFQRITKISAEMFKQEGFHAFYKGITPRIMRVAPGQAVTFTVYEFLKQKLERSGPAALTGGSTAEAKL

SEQ ID NO: 19286 - protein, 334 aa, Podospora anserina
MSADFWAGYLSGAASIIIGNPLDVLKVRLQASSSSSSSSSSSSSSSSSSSSSSSSSSSSSSSSPSTTTTTTNPRILTTPRNLLLGTAAPILTYGALNALLFVSYNRSESYLNSLFPSPSQPGQQGGKGSNLTTTFLAGCLSGLATFLVSCPTEIIKVRSQTSSTSSWNVTTQILRQNGVKGLYQAGGVTVLRDSIGYGFYFWGYELSSGWYNSFFGTTTEETIGRALLCGGVAGVLTWASIFPLDVVKTRMQTRDTAGEQQGLLGSGGKGKGAWQTGREIYAREGIKPFFRGLGVCSLRAFVVNAVQFAVYEGAMARLTGRDEKVGVLQEGFAG

SEQ ID NO: 19287 - protein, 315 aa, Podospora anserina
MAQPNVVPEEDYDYEALPPNFSLLQNMAAGAFAGIAEHCAMYPIDAVKTRMQIVNPSAGSVYSGVFQSTYKMASTEGILSLWRGMSSVIVGAGPAHAVYFATYEAVKHVMGGNQAGVHHPLAAATSGACATIASDALMNPFDVIKQRMQIAESAKLYRSMTDCAKYVYKNEGIKAFYVSYPTTLSMTVPFTALQFLAYESISTSMNPTKAYDPFTHCVAGAVAGGFAAALTTPMDVIKTMLQTRGSAHDAELRTVNGFMAGCRLLFKREGAKGFFKGVQPRVLTTMPSTAICWSAYEASKAYFIRQNDSASESST

SEQ ID NO: 19288 - protein, 284 aa, Candida albicans
MDDVDSALADNVKSFAAGGFGGICAVLTGHPFDLVKVRLQTGLYNSSVQCVKQTIAKDGLTGLYRGVLPPLLGVTPMFAVSFWGYDVGKRLVSTYTGKSIDQFEIKEISTAGFISAIPTTLVAAPFERVKVMMQIQEGNKSKSMAGVVAEMYKTGGLRSIFKGSVATLARDGPGSALYFATYEYLKKELSSPGEDLSLFAIMTAGGFAGVSMWLGVFPIDTIKSTQQSSNVPISILQTTKNIYAKGGVKAFFPGVGPALARSFPANAATFLGVELARKALDSII

SEQ ID NO: 19289 - protein, 316 aa, Trichomonas vaginalis
MAQPAEQILIATSPKPSLSPVERLSVGFIAGTLSRTLTSPLDVVKMLMQVSSRGGSAKDTIAQLWKEQGIAGFWRGNWAACIRLGPQSAIKFYAYEELEKRIGKGKPLVGIQRTVFGSLSGVISQVLTYPLDVIRTRITVYSGKYTGIFNCAFTMLKEEGFTSLFAGIVPTVMGVIPYEGAQFYAYGGLKQLYTTKIAPGKPISPWANCLIGAAAGMFSQTFSYPFDVIRKRMMLKDEKGKPIYSGMMQAFSTVYAKEGVAGLYRGVGLNLIKVVPFAALQFTILEETRRAFFKVRAAIDQKKVEEIKGKVAPKKK

SEQ ID NO: 19290 - protein, 318 aa, Toxoplasma gondii
MAAPTVSAGGKEKKGNADSQLMNTAKDFLAGGISAGVSKTIVAPIERVKMLIQTQDSIPEIKEGKIPRYTGIVDCFRRVSAEQGVASLWRGNMANVIRYFPTQAFNFAFKDTFKRMFPRYDQKKEFWKFFCTNVASGGLAGASSLVIVYPLDFARTRLASDVGNGNEREFTGLVDCLGKIFRRTGFFSLYQGFGVSVQGIIVYRGAYFGLFDTAKAMLFGPNNDANLFYKWAVAQTVTAAAGVASYPFDTVRRRMMMMAGRKKGEQEIQYTGTADCWKKVYQQEGFKGFFKGAWANVLRGAGGALVLVFYDELKKMLM

SEQ ID NO: 19291 - protein, 307 aa, Oxytricha fallax
MEQDSNEKSLRNVFLNDLICGSFAGIVNVFMGHPLDSIKVRMQIDHRDKLGLRQIIKETYKNEGALAFYKGMCPPLFTVPIINSIVFASYEFCKRLMGIHAGQDYTFKQSLISGMFAGFVNSFVLSPIELVKCRLQVQREDKAHAYYRGPLHCVKRIIQEEGSRGLYKGLLSTISRETPCYAGQFGGYFLTKKSLAWLQKKDVHDLGHGSLFIAGGVGGFTCWLVSYPQDIIKTRLQVARSQEFANYSRYIRDGGMIECAKYIFKNEHGFMGFWRGFSACSARAVFANSFMFVAYEYAQKKARGIIE

SEQ ID NO: 19292 - protein, 183 aa, Oxytricha trifallax
MEQDSNEKSLRNVFLNDLICGSFAGIVNVFMGHPLDSIKVRMQIDHRDKLGLRQIIKETYKNEGALAFYKGMCPPLFTVPIINSIVFASYEFSKRLMGVHAGQDYTFKQSLISGMFAGFVNSFVLSPIELVKCRLQVQREDKAHAYYRGPLHCVKRIIKEEGSRGLYKGLLSTISRETPCYAG

SEQ ID NO: 19293 - protein, 360 aa, Caenorhabditis elegans
MSALLDLFAGSLGGAAGVLAGHPLDTVKVRLQTQSGPTPQYRGTFHCFKLIVQKEGFRGLYKGMSSPLLSLSAINAIVFGVHGGTCRQMEDPDSITSHFVGGCAAGMAQSVIAAPTERIKLLLQIQDDKAHTKFNGPIDATKQLLRTHGLKSLTRGFLATVARDAPAFGVYFASYEWMARSMCKDGETSTLSSGQLLFAGGTAGMLSWLFNYQTDIIKSRFQADNSYKSYMHCIKQTYLERGYRGFFVGLNSALIRAFPSNAATFFTVEWTYRILLDFNVIDNVTKEAEKICAESQLLPLTPTTQPPTRKEQEKTFVTTSQEKCKRLLTQTDFWATNNHFLLPEAGSTIVDPMLHGYRFF

SEQ ID NO: 19294 - protein, 310 aa, Caenorhabditis elegans
MSALLDLFAGSLGGAAGVLAGHPLDTVKVRLQTQSGPTPQYRGTFHCFKLIVQKEGFRGLYKGMSSPLLSLSAINAIVFGVHGGTCRQMEDPDSITSHFVGGCAAGMAQSVIAAPTERIKLLLQIQDDKAHTKFNGPIDATKQLLRTHGLKSLTRGFLATVARDAPAFGVYFASYEWMARSMCKDGETSTLSSGQLLFAGGTAGMLSWLFNYQTDIIKSRFQADNSYKSYMHCIKQTYLERGYRGFFVGLNSALIRAFPSNAATFFTVEWTYRILLDFNVIDNVTKEAEKICAESQLLPFEELTLSYLIL

SEQ ID NO: 19295 - protein, 312 aa, Caenorhabditis elegans
MSDVLLNFIAGGVGGSCTVIVGHPFDTVKVRIQTMPMPKPGEKPQFTGALDCVKRTVSKEGFFALYKGMAAPLVGVSPLFAVFFGGCAVGKWLQQTDPSQEMTFIQNANAGALAGVFTTIVMVPGERIKCLLQVQQAGSAGSGVHYDGPLDVVKKLYKQGGISSIYRGTGATLLRDIPASAAYLSVYEYLKKKFSGEGAQRTLSPGATLMAGGLAGIANWGVCIPADVLKSRLQTAPEGKYPDGIRGVLREVLREEGPRALFKGFWPVMLRAFPANAACFFGLELTLAAFRYFGIGGHPTPSTEVVPLPHDE

SEQ ID NO: 19296 - protein, 330 aa, Caenorhabditis elegans
MSDVLLNFIAGGVGGSCTVIVGHPFDTVKVRIQTMPMPKPGEKPQFTGALDCVKRTVSKEGFFALYKGMAAPLVGVSPLFAVFFGGCAVGKWLQQTDPSQEMTFIQNANAGALAGVFTTIVMVPGERIKCLLQVQQAGSAGSGVHYDGPLDVVKKLYKQGGISSIYRGTGATLLRDIPASAAYLSVYEYLKKKFSGEGAQRTLSPGATLMAGGLAGIANWGVCIPADVLKSRLQTAPEGKYPDGIRGVLREVLREEGPRALFKVIFFKRLGRCNYNLYKFQGFWPVMLRAFPANAACFFGLELTLAAFRYFGIGGHPTPSTEVVPLPHDE

SEQ ID NO: 19297 - protein, 301 aa, Caenorhabditis elegans
MHESGEPTTATGDASANHFKDGIIDLLAGTAGGIANVYAGQPLDTVKVKVQTFPNLYSNWIVCLKDTYKLDGIRGLYAGTLPALAANVAENAVLFTAYGYCQKTIATLNGLEDVRQMTPLENAFSGSLAAVFAATVLCPTELVKCKLQAAREMKKKCTPFSVCRDIMKDTGVRGFFVGMTPTLAREVPGYFFFFGAYETCRFLLTDEGQKKEEIGLVKTAMAGSVGGMALWTSIYPADVVKSRMQVTGGGTFMSTLGAVVKENGIRGLYKGLLPTNLRTCFASGCLFVAYEETRKFFHYVL

SEQ ID NO: 19298 - protein, 337 aa, Caenorhabditis elegans
MYADFIAGWAAEQLYFLLSITAKVIASYKNKVFERLRFLYDLKISILKKHLNINARYLFTVIPGGAGLLVGHPLDTVKARLQTMNIYKGIVDCMVKTMKQESVYGLYKGMFVPFISTGALHSLLFAGYGAGLKFLNPGDSNVMARKDLPMSDILIASICGTLVQVGPVIPVELLKTKLQVQRENIGHFSKHSRNLYAGPLECARETVRAEGVRGLFKGGSVVFCRDNIGYLFYIPVYEGLSRYFRSHNLENTWTQLFAGGCAGVSGWISVCPLEVVKNRIQADKSHKTLSPKEMTLKIYREDGLRAFYRGGWAISLRGFVVNAVIFVVYENTYSFFD

SEQ ID NO: 19299 - protein, 296 aa, Caenorhabditis elegans
MKIPDLTNYEHLIGGLCGGVTSTVVCHPFDLLKIRFSANEGSSLRPQYSSYADAVRKIVRVEGVRGLYQGWTPSLIGASLSWGLYFQWYNSLRTKIYENFSTGSKLANNLISGCISGSAIMCITNPIWLTKTRLCLQYENQQSKKYAGMMDCLKKTVKQEGFFGLYRGFVTGVIGTTHGAVQIAAYSWIIDKRCQSQGLPKDSFLSQTDYVIASSTSKVLATTITFPYQVLRTRMQDHNTDSRGVWKTTLKTIHNEGIGGLWKGCLIANVRQLPAAVVTFLTYENVKRLVGMTKQI

SEQ ID NO: 19300 - protein, 307 aa, Ascaris suum
MAEEKKSKKFVKDMKKFDAKKFFIDLATGGTAAAISKTAVAPIESVKILLQVQDAQKTIAAEKRYKGIVDVLVRVPSEQGLVALWSGNLANVISYFPTQALNFAFKDTFKDMFMKGIDKKTQFWKFFAGNLAAGGAAGAASMCFVYPLDFARTRLAADIGKGASREFKGLTDCIVKVFKSDGPIGLYSGFFVSVQGIIIYRAAYFGMFDTVKILFAADKKLNFFIAWAIAQVVTVSSGILSYPWDTVSSRMMMQSGRKDILYKNSADCAMKIISKEGFSALFKGALSTFPSAGGAVLAIYDEIQKYL

SEQ ID NO: 19301 - protein, 299 aa, Ethmostigmus rubripes
  unsure (1)..(299): unsure at all Xaa locations
MPIDAVSFLKDFIAGGVAAAISKTSVAPIERVKLLLQVQHASKQIAVDKQYKGMVDCFVRIPQEQGILSYWRGNLANVIRYFPTQALNFAFKDKYKQIFLGGVDKRTQFWRYFLGNLASGGAAGATSLCFVYPLXFARTRLAADIGKGLEQREFTGLGNCIAKIFKSDGLVGLYRGFGVSVQGIIIYRAAYFGTYDTAKGMLPDPKNTPIVISWLIAQTVTTCAGIISYPFDTVRRRMMMQSGRKKADILYKNTIDCWGKIYKTEGGAAFFKGAFSNILRGTGGAFVLVLYDEIKALIF

SEQ ID NO: 19302 - protein, 303 aa, Onchocerca volvulus
MSDTLCNPLPTCRWPVHLLAGSVAGLAEHCLMFPFDSVKTRLQSLCPCPETSCPTAMHSLMSMVKREGLLRSLKGVNAVVLGTIPAHAFYYTVYENSKAYLLNNPRVSNSVSYAISGALATVIHDAVMNPAEVVKQRMQMIFSPYGNSLECIRCIYIREGLRAFYRSYITQLTLNVPYQCTHFMIYEYMQNLLNPHHDYNPSSHLVSGGIAGGIAAAITTPLDCVKTVLNTQQTPRFNTTYRLLTQSEHTAYYKGLADGIKTIYYLRGTGGFFRGLQARIIFQIPSTALSWSAYELCKYMLSM

SEQ ID NO: 19303 - protein, 300 aa, Bombyx mori
MSNLADPVAFAKDFLAGGISAAVSKTAVAPIERVKLLLQVQHVSKQIAADQRYKGIVDAFVRIPKEQGLLSFWRGNFANVIRYFPTQALNFAFKDKYKQVFLGGVDKKTQFWRYFAGNLASGGAAGATSLCFVYPLDFARTRLAADVGKGDGQREFSGLGNCISKIFKSDGLIGLYRGFGVSVQGIIIYRASYFGFYDTARGMLPDPKNTPIVISWAIAQTVTTVAGIISYPFDTVRRRMMMQSGRAKSDILYKNTIHCWATIAKTEGTSAFFKGAFSNVLRGTGGAFVLVLYDEIKKVL

SEQ ID NO: 19304 - protein, 300 aa, Manduca sexta
MSNLTDPVAFAKDFLAGGISAAVSKTAVAPIERVKLLLQVQHVSKQIAEDQRYKGIVDAFVRIPKEQGFFSFWRGNLANVIRYFPTQALNFAFKDKYKQVFLGGVDKNTQFWRYFAGNLASGGAAGATSLCFVYPLDFARTRLAADVGKGEGQREFTGLGNCISKIFKSDGLIGLYRGFGVSVQGIIIYRASYFGFYDTARGMLPDPKNTPIVISWAIAQTVTTVAGIMSYPFDTVRRRMMMQSGRAKSDILYKNTLHCWATIARTEGTSAFFKGAFSNILRGTGGAFVLVLYDEIKKLL

SEQ ID NO: 19305 - protein, 201 aa, Drosophila grimshawi
MYSFSSLSNSANMAVKVENVESATTERKANPVKSFITGGFGGICNVLSGHPLDTIKVRLQTMPRPPPGEQPMYRGTFDCAAKTIRNEGVRGLYKGMSAPLTGVAPIFAMCFAGYALGKRLQQRGEDAKLTYSQIFVAGSFSGIFSTFIMAPGERIKVLLQTQGTGPGGVKKYNGMLDCAAKLYKEGGLRSVFKGSCATMLR

SEQ ID NO: 19306 - protein, 392 aa, Drosophila melanogaster
KLFQRIVDPYRKRGSEIGDIQLKATSETFSPKMVVDFVAGLLGGAAGVLVGHPFDTVKVHLQTDDPRNPKYKGTFHCFRTIVQRDKFIGLYRGISSPMGGIGLVNAIVFGVYGNVQRLSNDPNSLTSHFFAGSIAGVAQGFVCAPMELAKTRLQLSTQVDSGIKFTGPIHCLKYIVKTEGIRGAFKGLTATILRDIPGFASYFVSFEYLMRQVETPGVAYTLMAGGCAGMSSWLACYPIDVVKTHMQADALGANAKYNGFIDCAMKGFRNEGPQYFFRGLNSTLIRAFPMNAACFFVVSWVLDICNAKGGMDSVMHSDQPLTLVNLDNKSQADLEATAPTVEEVVRKIITDNAMSHQYVSTPKDVVHSHYTSSTINIPKESKARLASDCNLK

SEQ ID NO: 19307 - protein, 399 aa, Drosophila melanogaster
MYPITFIYRVNNDKDPYRKRGSEIGDIQLKATSETFSPKMVVDFVAGLLGGAAGVLVGHPFDTVKVHLQTDDPRNPKYKGTFHCFRTIVQRDKFIGLYRGISSPMGGIGLVNAIVFGVYGNVQRLSNDPNSLTSHFFAGSIAGVAQGFVCAPMELAKTRLQLSTQVDSGIKFTGPIHCLKYIVKTEGIRGAFKGLTATILRDIPGFASYFVSFEYLMRQVETPGVAYTLMAGGCAGMSSWLACYPIDVVKTHMQADALGANAKYNGFIDCAMKGFRNEGPQYFFRGLNSTLIRAFPMNAACFFVVSWVLDICNAKGGMDSVMHSDQPLTLVNLDNKSQADLEATAPTVEEVVRKIITDNAMSHQYVSTPKDVVHSHYTSSTINIPKESKARLASDCNLK

SEQ ID NO: 19308 - protein, 360 aa, Drosophila melanogaster
MVVDFVAGLLGGAAGVLVGHPFDTVKVHLQTDDPRNPKYKGTFHCFRTIVQRDKFIGLYRGISSPMGGIGLVNAIVFGVYGNVQRLSNDPNSLTSHFFAGSIAGVAQGFVCAPMELAKTRLQLSTQVDSGIKFTGPIHCLKYIVKTEGIRGAFKGLTATILRDIPGFASYFVSFEYLMRQVETPGVAYTLMAGGCAGMSSWLACYPIDVVKTHMQADALGANAKYNGFIDCAMKGFRNEGPQYFFRGLNSTLIRAFPMNAACFFVVSWVLDICNAKGGMDSVMHSDQPLTLVNLDNKSQADLEATAPTVEEVVRKIITDNAMSHQYVSTPKDVVHSHYTSSTINIPKESKARLASDCNLK

SEQ ID NO: 19309 - protein, 306 aa, Drosophila melanogaster
MTTTENVSTERKANPVKSFLTGGFGGICNVLSGHPLDTIKVRLQTMPRPAPGEQPLYRGTFDCAAKTIKNEGVRGLYKGMSAPLTGVAPIFAMCFAGYALGKRLQQRGEDAKLTYPQIFVAGSFSGLFSTLIMAPGERIKVLLQTQQGQGGERKYNGMIDCAGKLYKEGGLRSVFKGSCATMLRDLPANGLYFLVYEALQDVAKSKSETGQISTASTIFAGGVAGMAYWILGMPADVLKSRLQSAPEGTYKHGIRSVFKDLIVKDGPLALYRGVTPIMLRAFPANAACFFGIELANKFFNIVAPNF

SEQ ID NO: 19310 - protein, 306 aa, Drosophila melanogaster
MTTTENVSTERKANPVKSFLTGGFGGICNVLSGHPLDTIKVRLQTMPRPAPGEQPLYRGTFDCAAKTIKNEGVRGLYKGMSAPLTGVAPIFAMCFTGYALGKRLQQRGEDAKLTYPQIFVAGSFSGLFSTLIMAPGERIKVLLQTQQGQGGERKYNGMIDCAGKLYKEGGLRSVFKGSCATMLRDFAANGLYFLVYEALQDVAKSKSETGQISTASTIFAGGVAGMAYWILGMPADVLKSRLQSAPEGTYKHGIRSVFKDLIVKDGPLALYRGVTPIMLRAFPANAACFFGIELANKFFNIVAPNF

SEQ ID NO: 19311 - protein, 299 aa, Drosophila melanogaster
MEEVEISTEKKSNPVKSFIAGGVGGMCNVLVGHPLDTIKVRLQTMPTPPPGQPPRYKGVIDCAARTFRYEGFRGFYRGISAPLVGVTPIYAVDFAVYAAGKRLFQTDDHIRLTYPQIFAAGALAGVCSALVTVPTDRIKVLLQTQTVSNGPLLYNGTIDTAAKLYRQGGIRSLFKGTCACILRDSPTGFYFVTYEFLQELARKKSANGKISTTSTILSGGTAGIVFWTLAVPFDVLKSRLQSAPEGTYKHGIRSVFRNLMATEGPKALFRGILPILLRAFPSTAAVFFGVELTNDLLKA

SEQ ID NO: 19312 - protein, 305 aa, Drosophila melanogaster
MHGGGTGNNINFVEGLIDFLAGSLGGAAQVYVSQPLDTVKVKLQTFPEAYRGMLDCFLSTYRKDGVLRGLYAGSVPAVFANVAENSVLFAAYGGCQKFVAFCVGKETAGDLTTVQNACAGSLAACFSTLTLCPTELIKCKLQALREMKNFVEPAHPQDIRTPWTLTRYIWRTEGIRGFYRGLSSTFLREMPGYFFFFGSYEGTRELLRRDDQSKDDIGPLRTMIAGAIGGVCLWTSTFPADVIKSRIQVKNLNESMFAVGADIVRREGVLALYRGLLPSVLRTIPATATLFVVYEYTKRALSATL

SEQ ID NO: 19313 - protein, 459 aa, Drosophila melanogaster
MSECEQDTASAAAPTSNHNEDGDNEEAGSEAAEFVSLPPPLEPEPIKQRHPKSQPTDEAPPEPPPNEDEMPPPPPRIGSSQAGSSVLIMTPDEIIEAYERALQEGQEEDGETDGEKKKSGWLNRPISVKSTLRAVRDGLLFVVGGFLRFVRRLDMHGGGTGNNINFVEGLIDFLAGSLGGAAQVYVSQPLDTVKVKLQTFPEAYRGMLDCFLSTYRKDGVLRGLYAGSVPAVFANVAENSVLFAAYGGCQKFVAFCVGKETAGDLTTVQNACAGSLAACFSTLTLCPTELIKCKLQALREMKNFVEPAHPQDIRTPWTLTRYIWRTEGIRGFYRGLSSTFLREMPGYFFFFGSYEGTRELLRRDDQSKDDIGPLRTMIAGAIGGVCLWTSTFPADVIKSRIQVKNLNESMFAVGADIVRREGVLALYRGLLPSVLRTIPATATLFVVYEYTKRALSATL

SEQ ID NO: 19314 - protein, 303 aa, Drosophila melanogaster
MKWENYCDFVAGCFGGACGVLVAHPLDTIKVWQQASNSSVVTAIQQIYSRNNGVNGFYRGMFFPFISTGAINSLLFGIYGNHLRQLRKVCHSDYQREQLEYHNMFLAGSVAGFVQSFIACPMELIKVRLQTATYYSDYLYGQRRTAFGTFKRILKTDGISGLYRGLLPMMCRDVLPYGIYMLAYRQGVDYMDRRDFVRRRRSQSDGSSVNLLVTTLAGAWAGVISWVCVIPFDVVKTLMQADENHKYRGIFHCVRVQYRAYGWRSIFRGSWMLVARAVPFNAATFLGYEYALEWCQRWNGTYV

SEQ ID NO: 19315 - protein, 682 aa, Drosophila melanogaster
MPLTKSLPNSPSLLKRAGTEKLREVFLKYASIQKNGEHYMTSEDFVRKFLGLFSESAFNDESVRLLANIADTSKDGLISFSEFQAFEGLLCTPDALYRTAFQLFDRKGNGTVSYADFADVVQKTELHSKIPFSLDGPFIKRYFGDKKQRLINYAEFTQLLHDFHEEHAMEAFRSKDPAGTGFISPLDFQDIIVNVKRHLLTPGVRDNLVSVTEGHKVSFPYFIAFTSLLNNMELIKQVYLHATEGSRTDMITKDQILLAAQTMSQITPLEIDILFHLAGAVHQAGRIDYSDLSNIAPEHYTKHMTHRLAEIKAVESPADRSAFIQVLESSYRFTLGSFAGAVAPTVVYPIDLVKTRMQNQRAGSYIGEVAYRNSWDCFKKVVRHEGFMGLYRGLLPQLMGVAPEKAIKLTVNDLVRDKLTDKKGNIPTWAEVLAGGCAGASQVVFTNPLEIVKIRLQVAGEIASGSKIRAWSVVRELGLFGLYKGARACLLRDVPFSAIYFPTYAHTKAMMADKDGYNHPLTLLAAGAIAGVPAASLVTPADAIKTRLQVVARSGQTTYTGVWDATKKIMAEEGPRAFWKGTAARVFRSSPQFGVTLVTYELLQRLFYVDFGGTQPKGSEAHKITTPLEQAAASVTTENLDHIGGYRAAVPLLAGVESKFGLYLPRFGRGVTAASPSTATGS

SEQ ID NO: 19316 - protein, 695 aa, Drosophila melanogaster
MPMHIPFPFNWIPTLPVARCQESPSLLKRAGTEKLREVFLKYASIQKNGEHYMTSEDFVRKFLGLFSESAFNDESVRLLANIADTSKDGLISFSEFQAFEGLLCTPDALYRTAFQLFDRKGNGTVSYADFADVVQKTELHSKIPFSLDGPFIKRYFGDKKQRLINYAEFTQLLHDFHEEHAMEAFRSKDPAGTGFISPLDFQDIIVNVKRHLLTPGVRDNLVSVTEGHKVSFPYFIAFTSLLNNMELIKQVYLHATEGSRTDMITKDQILLAAQTMSQITPLEIDILFHLAGAVHQAGRIDYSDLSNIAPEHYTKHMTHRLAEIKAVESPADRSAFIQVLESSYRFTLGSFAGAVGATVVYPIDLVKTRMQNQRAGSYIGEVAYRNSWDCFKKVVRHEGFMGLYRGLLPQLMGVAPEKAIKLTVNDLVRDKLTDKKGNIPTWAEVLAGGCAGASQVVFTNPLEIVKIRLQVAGEIASGSKIRAWSVVRELGLFGLYKGARACLLRDVPFSAIYFPTYAHTKAMMADKDGYNHPLTLLAAGAIAGVPAASLVTPADVIKTRLQVVARSGQTTYTGVWDATKKIMAEEGPRAFWKGTAARVFRSSPQFGVTLVTYELLQRLFYVDFGGTQPKGSEAHKITTPLEQAAASVTTENVDHIGGYRAAVPLLAGVESKFGLYLPRFGRGVTAASPSTATGS

SEQ ID NO: 19317 - protein, 643 aa, Drosophila melanogaster
MTSEDFVRKFLGLFSESAFNDESVRLLANIADTSKDGLISFSEFQAFEGLLCTPDALYRTAFQLFDRKGNGTVSYADFADVVQKTELHSKIPFSLDGPFIKRYFGDKKQRLINYAEFTQLLHDFHEEHAMEAFRSKDPAGTGFISPLDFQDIIVNVKRHLLTPGVRDNLVSVTEGHKVSFPYFIAFTSLLNNMELIKQVYLHATEGSRTDMITKDQILLAAQTMSQITPLEIDILFHLAGAVHQAGRIDYSDLSNIAPEHYTKHMTHRLAEIKAVESPADRSAFIQVLESSYRFTLGSFAGAVGATVVYPIDLVKTRMQNQRAGSYIGEVAYRNSWDCFKKVVRHEGFMGLYRGLLPQLMGVAPEKAIKLTVNDLVRDKLTDKKGNIPTWAEVLAGGCAGASQVVFTNPLEIVKIRLQVAGEIASGSKIRAWSVVRELGLFGLYKGARACLLRDVPFSAIYFPTYAHTKAMMADKDGYNHPLTLLAAGAIAGVPAASLVTPADVIKTRLQVVARSGQTTYTGVWDATKKIMAEEGPRAFWKGTAARVFRSSPQFGVTLVTYELLQRLFYVDFGGTQPKGSEAHKITTPLEQAAASVTTENVDHIGGYRAAVPLLAGVESKFGLYLPRFGRGVTAASPSTATGS

SEQ ID NO: 19318 - protein, 682 aa, Drosophila melanogaster
MPLTKSLPNSPSLLKRAGTEKLREVFLKYASIQKNGEHYMTSEDFVRKFLGLFSESAFNDESVRLLANIADTSKDGLISFSEFQAFEGLLCTPDALYRTAFQLFDRKGNGTVSYADFADVVQKTELHSKIPFSLDGPFIKRYFGDKKQRLINYAEFTQLLHDFHEEHAMEAFRSKDPAGTGFISPLDFQDIIVNVKRHLLTPGVRDNLVSVTEGHKVSFPYFIAFTSLLNNMELIKQVYLHATEGSRTDMITKDQILLAAQTMSQITPLEIDILFHLAGAVHQAGRIDYSDLSNIAPEHYTKHMTHRLAEIKAVESPADRSAFIQVLESSYRFTLGSFAGAVGATVVYPIDLVKTRMQNQRAGSYIGEVAYRNSWDCFKKVVRHEGFMGLYRGLLPQLMGVAPEKAIKLTVNDLVRDKLTDKKGNIPTWAEVLAGGCAGASQVVFTNPLEIVKIRLQVAGEIASGSKIRAWSVVRELGLFGLYKGARACLLRDVPFSAIYFPTYAHTKAMMADKDGYNHPLTLLAAGAIAGVPAASLVTPADVIKTRLQVVARSGQTTYTGVWDATKKIMAEEGPRAFWKGTAARVFRSSPQFGVTLVTYELLQRLFYVDFGGTQPKGSEAHKITTPLEQAAASVTTENVDHIGGYRAAVPLLAGVESKFGLYLPRFGRGVTAASPSTATGS

SEQ ID NO: 19319 - protein, 311 aa, Drosophila melanogaster
MALVYGVEKKTVPTHMKFVMGGTSGMLATCIVQPLDLLKTRMQISGTLGTREYKNSFEVLSKVLKNEGILSLYNGLSAGLLRQATYTSAKMGVYQMELDWYRKNFGNYPSMVASMTMGIVAGAFGAMCGNPAEVALIRMMSDNRLIPEDRRNYKNVGDAFVRIVKDEGVVALWRGCLPTVGRAMVVNMVQLASYSLMKNQLHGYLSEGIPLHLTAALVSGLLTSVTSMPLDMAKTRIQQMKVIDGKPEYSGTIDVLKKVLKNEGAFAVWKGFTPYLMRMGPHTIFSFVFLEQMNKAYSKHMLSDSLSDSVP

SEQ ID NO: 19320 - protein, 311 aa, Drosophila melanogaster
MALVYGVEKKTVPTHMKFVMGGTSGMLATCIVQPLDLLKTRMQISGTLGTREYKNSFEVLSKVLKNEGILSLYNGLSAGLLRQATYTSAKMGVYQMELDWYRKNFGNYPSMVASMTMGIVAGAFGAMCGNPAEVALIRMMSDNRLMPEDRRNYKNVGDAFVRIVKDEGVVALWRGCLPTVGRAMVVNMVQLASYSLMKNQLHGYLSEGIPLHLTAALVSGLLTSVTSMPLDMAKTRIQQMKVIDGKPEYSGTIDVLKKVLKNEGAFAVWKGFTPYLMRMGPHTIFSFVFLEQMNKAYSKHMLSDSLSDSVP

SEQ ID NO: 19321 - protein, 317 aa, Drosophila melanogaster
MSATSVQEAPKKAVATNAIKFLFGGLSGMGATMVVQPLDLVKTRMQISGAGSGKKEYRSSLHCIQTIVSKEGPLALYQGIGAALLRQATYTTGRLGMYTYLNDLFREKFQRSPGITDSMAMGTIAGACGAFIGTPAEVALVRMTSDGRLPVAERRNYTNVANALARITREEGLTALWRGSLPTVGRAMVVNMTQLASYSQFKTYFRHGPLQMEEGIKLHFCASMLSGLLTTITSMPLDIAKTRIQNMKMVDGKPEYRGTADVLLRVARQEGVFALWKGFTPYYCRLGPHTVLTFIILEQLNQGYNKYVLGSNKSTGL

SEQ ID NO: 19322 - protein, 304 aa, Drosophila melanogaster
MNPIKAQSTGSPKKFNVFAHVKYEHLVAGVSGGVVSTLILHPLDLIKIRFAVNDGRTATVPQYRGLSSAFTTIFRQEGFRGLYKGVTPNVWGSGSSWGLYFMFYNTIKTFIQGGNTTMPLGPTMNMLAAAESGILTLLLTNPIWVVKTRLCLQCDAASSAEYRGMIHALGQIYKEEGIRGLYRGFVPGMLGVSHGAIQFMTYEELKNAYNEYRKLPIDTKLATTEYLAFAAVSKLIAAAATYPYQVVRARLQDHHHRYNGTWDCIKQTWRYERMRGFYKGLVPYLVHVTPNICMVMLIWEKLTS

SEQ ID NO: 19323 - protein, 360 aa, Drosophila melanogaster
MNPIKAQSTGSPKKFNVFAHVKYEHLVAGVSGGVVSTLILHPLDLIKIRFAVNDGRTATVPQYRGLSSAFTTIFRQEGFRGLYKGVTPNVWGSGSSWGLYFMFYNTIKTFIQGGNTTMPLGPTMNMLAAAESGILTLLLTNPIWVVKTRLCLQCDAASSAEYRGMIHALGQIYKEEGIRGLYRGFVPGMLGVSHGAIQFMTYEELKNAYNEYRKLPIDTKLATTEYLAFAAVSKLIAAAATYPYQVVRARLQDHHHRYNGTWDCIKQTWRYERMRGFYKGLVPYLVHVTPNICMPASFHLSKGSWQLEFEGYRGFYKGLKASLTRVVPACMVTFLVYENVSHFLLARRKRIETKEDASDV

SEQ ID NO: 19324 - protein, 319 aa, Drosophila melanogaster
MLEQVEQKNQEQKKPQKFNVFPKIINGGVAGIIGVACVYPLDMVKTRLQNQTIGPNGERMYTSIADCFRKTIASEGYFGMYRGSAVNIVLITPEKAIKLTANDFFRYHLASDDGVIPLSRATLAGGLAGLFQIVVTTPMELLKIQMQDAGRVAAADRAAGREVKTITALGLTKTLLRERGIFGLYKGVGATGVRDITFSMVYFPLMAWINDQGPRKSDGSGEAVFYWSLIAGLLSGMTSAFMVTPFDVVKTRLQADGEKKFKGIMDCVNRTLKEEGISAFFKGGLCRIMVLAPLFGIAQMFYFLGVGEKILGIERTKSV

SEQ ID NO: 19325 - protein, 303 aa, Drosophila melanogaster
MATSDFVLGGLASVGATFFTNPIEVIKTRIQLQGELAARGTYVEPYKGIVNAFITVAKNDGITGLQKGLAPALYFQFIINSFRLSIYSEAMERRWMHNRKGEVSYGMGLLWGAIGGVVGCYFSSPFFLIKTQLQSQAAKQIAVGYQHAHTSMTDALRQIYSRNGVRGLWRGSVAALPRAALGSGAQIATFGKTKALLVQYDLVTQPTLNSFSAGLIAGSIMSVAITPPDVITTRLYNQGVDAEGRGLLYRGWLDCFVKILRSEGVYGMYKGFWANYLRIAPHSTLVLLFFDELVAVRTKYSNQ

SEQ ID NO: 19326 - protein, 301 aa, Drosophila melanogaster
MAYSIEKKSIPGYMMYINGGLAGMLGTCIVQPLDLVKTRMQISATTGEYKSSFDCLLKVFKNEGILALYNGLSAGLMRQATYTTARMGFYQMEIDAYRKQFNAPPTVLASMGMGILAGAFGAMFGNPAEVALIRMMSDNRLPPAERRNYTGVLNAFVRIVKDEGVITLWKGCMPTVGRAMIVNMVQLASYSQLKAAFSEYFSGLSLHIAAAMMSGLLTTIASMPLDMAKTRIQQQKTAEYKGTMDVLMKVSKNEGIASLWKGFTPYLCRLGPHTVFAFIFLEQLTKAYKHIVLGDDSESNI

SEQ ID NO: 19327 - protein, 340 aa, Drosophila melanogaster
MAAKTDESSPAVASSTSSNPAPSSGRHQLRPVKFDYADSFACTYIVSVVAASIAELATYPLDLTKTRLQIQGEGAAHSAGKSNMQYRGMVATAFGIAREEGALKLWQGVTPALYRHVVYSGVRICSYDLMRKEFTQNGTQALPVWKSALCGVTAGAVAQWLASPADLVKVQIQMEGRRRLMGEPPRVHSAGHAFRQIVQRGGIKGLWKGSIPNVQRAALVNLGDLTTYDTIKHLIMNRLQMPDCHTVHVLASVCAGFVAAIMGTPADVVKTRIMNQPTDENGRGLLYRGSVDCLRQTVSKEGFVALYKGFLPCWIRMAPWSLTFWLSFEQIRKMIGASGY

SEQ ID NO: 19328 - protein, 238 aa, Drosophila miranda
ERVKLLLQVQHISKQISPDKQYKGMVDCFIRIPKEQGFSSFWRGNLANVIRYFPTQALNFAFKDKYKQVFLGGVDKNTQFWRYFMGNLASGGAAGATSLCFVYPLDFARTRLAADTGKGGQREFTGLGNCLTKIFKSDGLVGLYRGFGVSVQGIIIYRAAYFGFYDTARGMLPDPKNTPIYISWAIAQAVTTVAGIVSYPFDTVRRRMMMQSGRKATEIIYKNTLHCWGTIAKQEGTG

SEQ ID NO: 19329 - protein, 288 aa, Drosophila pseudoobscura
MGKDFDAIGFVKDFAAGGISAAVSKTAVAPIERVKLLLQVQHISKQISPDKQYKGMVDCFIRIPKEQGFSSFWRGNLANVIRYFPTQALNFAFKDKYKQVFLGGVDKNTQFWRYFMGNLASGGAAGATSLCFVYPLDFARTRLAADTGKGGQREFTGLGNCLTKIFKSDGLVGLYRGFGVSVQGIIIYRAAYFGFYDTARMLPDPKNTPIYISWAIAQAVTTVAGIVSYPFDTVRRRMMMQSGRKATEIIYKNTLHCWATIAKQEGSAFFKGAFSNVLRGTGGAFVLV

SEQ ID NO: 19330 - protein, 288 aa, Drosophila subobscura
MGKDFDAMGFVKDFAAGGISAAVSKTAVAPIERVKLLLQVQHISKQISPDKQYKGMVDCFIRIPKEQGFSSFWRGNLANVIRYFPTQALNFAFKDKYKQVFLGGVDKNTQFWRYFMGNLASGGAAGATSLCFVYPLDFARTRLAADTGKGGQREFTGLGNCLTKIFKSDGLVGLYRGFGVSVQGIIIYRAAYFGFYDTARMLPDPKNTPIYISWAIAQCVTTVAGIVSYPFDTVRRRMMMQSGRKATEIIYKNTIHCWGTIAKQEGTAFFKGAFSNVLRGTGGAFVLV

SEQ ID NO: 19331 - protein, 300 aa, Lucilia cuprina
MGKEAADPLGFVKDFAAGGISAAVSKTAVAPIERVKLLLQVQHISKQISPDKQYKGMIDCFVRIPKEQGFASYWRGNMANVIRYFPTQALNFAFKDKYKQVFLGGVDKNTQFWRYFLGNLASGGAAGATSLCFVYPLDFARTRLAADTGKGGQREFTGLGNCLAKIFKSDGLVGLYRGFGVSVQGIIIYRAAYFGFYDTARGMLPDPKNTPIYISWAIAQVVTTVAGIVSYPFDTVRRRMMMQSGRKATEIIYKNTLHCWATIAKQEGTGAFFKGAFSNVLRGTGGAFVLVLYDEIKKFL

SEQ ID NO: 19332 - protein, 304 aa, Halocynthia roretzi
MPWSAVDFAKDLAIGGTAAAISKTIVAPIERVKLLLQVQAVSTQMKAGTEYKGIIDAFVRIPKEQGFFSLWRGNLANVIRYFPTQALNFAFKDTYKKIFLAGVDKRKQFWRYFHGNLASGGAAGATGLCFVYPLDFARTRLAADIGSGGSRQFTGLGNCLATIVKKDGPRGLYQGFVVSIQGIIVYRAAYFGTYDTVKGMLPDPQNTPIIVSWAIAQVVTTGAGIISYPFDTVRRRMMMQSGRNKEDRMYKGTVDCWGKIYKNEGGKAFFKGALSNVIRGTGGALVLVLYDELKKLVFGTSVHN

SEQ ID NO: 19333 - protein, 289 aa, Ribes nigrum
MIAGSIAGSIEHMAMYPVDTLKTRIQAIGSCSAQSAGLRQALGSILKVEGPAGLYRGIGAMGLGAGPAHAVYFSVYEMCKETFSHGDPSNSGAHAVSGVFATVASDAVITPMDVVKQRLQLQSSPYKGVVDCVRRVLVEEGIGAFYASYRTTVVMNAPFTAVHFATYEATKKGLLEVSPETANDENLLVHATAGAAAGALAAVVTTPLDVVKTQLQCQGVCGCDRFSSSSIQDVIGSIVKKNGYVGLMRGWIPRMLFHAPAAAICWSTYEASKTFFQKLNESNSNSSVT

SEQ ID NO: 19334 - protein, 324 aa, Danio rerio
MTATISRQRHAAVAADSSGSSFSITANLLQLSKHIKYENLAAGLAGGVISTMVLHPLDLIKIRFAVSDGLKMRPQYDGMLDCMKTIWKLEGIRGLYQGVTPNIWGAGSSWGLYFLFYNAIKAYTQEGRQTELSACEHLVSAAEAGILTLCLTNPVWVTKTRLVLQYNADPSRKQYKGMMDALVKIYRHEGIPGLYRGFVPGLVGTSHAALQFMTYEGLKREQNKCKKMPSESLLSPLEYIAIAAISKIFAVAVTYPYQVVRARLQDQHNNYSGIVDVMRRTWSNEGVEGFYKGMVPNLVRVIPACCITFLVFENVSRLLLGEYH

SEQ ID NO: 19335 - protein, 310 aa, Cyprinus carpio
MVGFRAGDVPPTATVKFIGAGTAACIADLFTFPLDTAKVRLQIQGESKIPVNTGHGPVKYRGVFGTISTMVRVEGPRSLYSGLVAGLQRQMSFASVRIGLYDSVKQFYTKGSEHVGIGSRLMAGCTTGAMAVALAQPTDVVKVRFQAQNSAGANKRYHGTMDAYRTIAKEEGFRGLWKGTGPNITRNAIVNCTELVTYDLIKDALLKSSLMTDDLPCHFTSAFGAGFCTTVIASPVDVVKTRYMNSAPGQYCSALNCAVAMLTKEGPKAFYKGFMPSFLRLGSWNVVMFVTYEQLKRAMMAARHNWATPL

SEQ ID NO: 19336 - protein, 301 aa, Xenopus laevis
MAKQPQPISPMKNFFAGGFGGVCLVFAGHPLDTIKVRIQTQPKPTPGITPLYSGTFDCFKKTLVNEGIRGLYKGMAAPIIGVTPMFAVCFFGFGLGKKLQQKHPEDILTYPQLFAAGMLSGVFTTAIMAPGERIKCLLQIQAASGEVKYAGPMDCAKQLYREAGIRGIYKGTVLTLMRDVPASGMYFMTYEWLKNVLTPEGHSVSELSVPKILFAGGMAGIFNWAVAIPPDVLKSRFQTAPAGKYPNGFRDVLRELIREEGIGSLYKGFTAVMLRAFPANAACFLGFEVAMKFLNWMAPNL

SEQ ID NO: 19337 - protein, 307 aa, Xenopus laevis
MVGFKPTDVPPTAAVKFIGAGTAACIADLFTFPLDTAKVRLQIQGESKAVHMKTASYKGVFGTISTMVKMEGPKSLYNGLAAGLQRQMSFASVRIGLYDSVKQFYTKGSEHAGIGSRLAAGCTTGAMAVAVAQPTDVVKVRFQAQANSSANRRYKGTMDAYRTIAREEGMRGLWKGTVPNITRNAIVNCTELVTYDLIKDSILKANIMTDNLPCHFTSAFGAGFCTTVIASPVDVVKTRYMNSAKGQYTSALNCALTMFRKEGPRAFYKGFMPSFLRLGSWNVVMFVTYEQLKRAMMSAQRSREAPF

SEQ ID NO: 19338 - protein, 307 aa, Dicrostonyx groenlandicus
MVSLTTSEVHPTMGVKTFSAGISACLADIITFPLDTAKVRLQIQGEGQTSSTIRYKGVLGTITTLAKTEGWPKLYSGLPAGIQRQISFASLRIGLYDTVQEYFSSGKETPPTLGNRISAGLMTGGVAVFIGQPTEVVKVRLQAQSHLHGIKPRYTGTYNAYRIIATTESFSTLWKGTTPNLMRNVIINRTELVTYDLMKGALVNNQILADDVPCHLLSALVAGFCTTFLASPADVVKTRFINSLPGQYPSVPSCAMTMLTKEGPTAFFKGFVPSFLRLASWNVIMFVCFEQLKKELMKSRQTMDCTT

SEQ ID NO: 19339 - protein, 307 aa, Meleagris gallopavo
MVGLKPPEVPPTAAVKFFSAGTAACIADLCTFPLDTAKVRLQIQGEVRIPRSTNTVEYRGVLGTLSTMVRTEGPRSLYSGLVAGLQRQMSFASIRIGLYDSVKQLYTPKGAESTGLLARLLAGCTTGAVAVTCAQPTDVVKVRFQALGALPESNRRYSGTVDAYRTIAREEGVRGLWRGTLPNIARNAIINCGELVTYDLIKDTLLRAQLMTDNVPCHFVAAFGAGFCATVVASPVDVVKTRYMNASPGQYRNVPSCLLALLMQDGISGLYKGFVPSFLRLGSWNVVMFISYEQLQRVVMLARSAPP

SEQ ID NO: 19340 - protein, 301 aa, Macaca fascicularis
MADQPKPISPLKNLLAGGFGGVCLVFVGHPLDTVKVRLQTQPPSLPGQPPMYSGTFDCFRKTLFREGIRGLYRGMAAPIIGVTPMFAVCFFGFGLGKKLQQKHPEDVLSYPQLFAAGMLSGIFTTGIMTPGERIKCLLQIQASSGETKYTGTLDCAKKLYQEFGIRGIYKGTVVTLMRDVPASGMYFMTYEWVKNIFTPEGKRVSELSVPRVLVAGGIAGIFNWAVAIPPDVLKSRFQTAPPGKYPNGFRDVLRELIPDEGVTSLYKGFNAVMIRAFPANAACFLGFEVAMKFLNWATPNL

SEQ ID NO: 19341 - protein, 674 aa, Macaca fascicularis
MAAAKVALTKRADPAELRTIFLKYASIEKNGEFFTSPNDFVTRYLNIFGESQPNPKTVELLSGVADQTKDGLISFQEFVAFESVLCAPDALFMVAFQLFDKAGKGEVTFEDVKQVFGQTTIHQHIPFNWDSEFVQLHFGKERKRHLTYAEFTQFLLEIQLEHAKQAFVQRDNASTGRVTAIDFRDIMVTIRPHVLTPFVEECLVAAAGGTTSHQVSFSYFNGFNSLLNNMELTRKIYSTLAGNRKDVEVTKEEFVLAAQKFGQVTPMEVDILFRLADLYEPRGRMTLADIERIAPLEEGTLPFNLAEAQRQKASGDSARPVLLQVAESAYRFGLGSVAGAVGATAVYPIDLVKTRMQNQRSTGSFVGELMYKNSFDCFKKVLRYEGFFGLYRGLLPQLLGVAPEKAIKLTVNDFVRDKFMHKDGSVPLAAEILAGGCAGGSQVIFTNPLEIVKIRLQVAGEITTGPRVSALSVVRDLGFFGIYKGAKACFLRDIPFSAIYFPCYAHARASFANEDGQVSPGSLLLAGAIAGMPAASLVTPADVIKTRLQVAARAGQTTYSGVIDCFKKILREEGPKALWKGAARVFRSSPQFGVTLLTYELLQRWFYIDFGGVKPMGSEPVPKSRINLPAPNPDHVGGYKLAVATFAGIENKFGLYLPLFKPSVPTSEAIGGGP

SEQ ID NO: 19342 - protein, 315 aa, Macaca fascicularis
MTGQGHSASGSSAWSTVFRHVRYENLVAGVSGGVLSNLALHPLDPVKIRFAVSDGLELRPKYNGILHCLTTIWKLDGLRGLYQGVTPNVWGAGLSWGLYFFFYNAIKSYKTEGRAERLEATEYLVSAAEAGAMTLCITNPLWVTKTRLMLQYDAVINSPHRQYKGMFDTLVKIYKYEGVRGLYKGFVPGLFGTSRGALQFMAYELLKLKYNQHINRLPEAQLSTVEYISVAALSKIFAVAATYPYQVVRARLQDQHMFYSGVIDVITKTWRKEGIGGFYKGIAPNLIRVTPACCITFVVYENVSHFLLDLREKRK

SEQ ID NO: 19343 - protein, 315 aa, Macaca fascicularis
MTGQGHSASGSSAWSTVFRHVRYENLVAGVSGGVLSNLALHPLDLVKIRFAVSDGLELRPKYNGILHCLTTIWKLDGLRGLYQGVTPNVWGAGLSWGLYFFFYNAIKSYKTEGRAERLEATEYLVSAAEAGAMTLCITNPLWVTKTRLMLQYDAVINSPHRQYKGMFDTLVKIYKYEGVRGLYKGFVPGLFGTSHGALQFMAYELLKLKYNQHINRLPEAQLSTVEYISVAALSKIFAVAATYPYQVVRARLQDQHMFYSGVIDVITKTWRKEGIGGFYKGIAPNLIRVTPACCITFVVYENVSHFLLDLREKRK

SEQ ID NO: 19344 - protein, 193 aa, Macaca mulatta
GVKFLGAGTAACFADLLTFPLDTAKVRLQIQGENPVAQTARLVQYRGVLGTILTMVRTEGLCSPYNGLVAGLQRQMSFASIRIGLYDSVKQVYTPQGADSSSLTTRILAGCTTGAMAVTCAQPTDVVKVRFQASIHLGSSGSDRKYSGTMDAYRTIAREEGVRGLWKGTLPNIMRNAIVNCAEVVTYDILKEK

SEQ ID NO: 19345 - protein, 154 aa, Macaca mulatta
FKATDVPPTATVKFLGAGTAACIADLITFPLDTAKVRLQIQGESQGPVRATAGAQYRGVLGTILTMVRTEGPRSLYNGLVAGLQRQMSFASVRIGLYDSVKQFYTKGSEHASIGSRLLAGSTTGALAVAVAQPTDVVKVRFQAQARAGGRRYQS

SEQ ID NO: 19346 - protein, 400 aa, Homo sapiens
PHPGPAGRHEGRGARPEVRDRGPEGIQRVSCRRGTSAGLAAAAIPTIPDRACPGSAPGGAARPSPGTARSGTPTAPSPARGLRGRTRRKGGLAGDPAMALDFLAGCAGGVAGVLVGHPFDTVKVRLQVQSVEKPQYRGTLHCFKSIIKQESVLGLYKGLGSPLMGLTFINALVFGVQGNTLRALGHDSPLNQFLAGAAAGAIQCVICCPMELAKTRLQLQDAGPARTYKGSLDCLAQIYGHEGLRGVNRGMVSTLLRETPSFGVYFLTYDALTRALGCEPGDRLLVPKLLLAGGTSGIVSWLSTYPVDVVKSRLQADGLRGAPRYRGILDCVHQSYRAEGWRVFTRGLASTLLRAFPVNAATFATVTVVLTYARGEEAGPEGEAVPAAPAGPALAQPSSL

SEQ ID NO: 19347 - protein, 301 aa, Homo sapiens [sequence omitted]

SEQ ID NO: 19348 - protein, 301 aa, Homo sapiens
MADQPKPISPLKNLLAGGFGGVCLVFVGHPLDTVKVRLQTQPPSLPGQPPMYSGTFDCFRKTLFREGITGLYRGMAAPIIGVTPMFAVCFFGFGLGKKLQQKHPEDVLSYPQLFAAGMLSGVFTTGIMTPGERIKCLLQIQASSGESKYTGTLDCAKKLYQEFGIRGIYKGTVLTLMRDVPASGMYFMTYEWLKNIFTPEGKRVSELSAPRILVAGGIAGIFNWAVAIPPDVLKSRFQTAPPGKYPNGFRDVLRELIRDEGVTSLYKGFNAVMIRAFPANAACFLGFEVAMKFLNWATPNL

SEQ ID NO: 19349 - protein, 301 aa, Homo sapiens
MKSGPGIQAAIDLTAGAAGGTACVLTGQPFDTIKVKMQTFPDLYKGLTDCFLKTYAQVGLRGFYKGTGPALMAYVAENSVLFMCYGFCQQFVRKVAGMDKQAKLSDLQTAAAGSFASAFAALALCPTELVKCRLQTMYEMEMSGKIAKSHNTIWSVVKGILKKDGPLGFYHGLSSTLLQEVPGYFFFFGGYELSRSFFASGRSKDELGPVHLMLSGGVAGICLWLVVFPVDCIKSRIQVLSMYGKQAGFIGTLLSVVRNEGIVALYSGLKATMIRAIPANGALFVAYEYSRKMMMKQLEAY

SEQ ID NO: 19350 - protein, 301 aa, Homo sapiens [sequence omitted]

SEQ ID NO: 19351 - protein, 301 aa, Homo sapiens [sequence omitted]

SEQ ID NO: 19352 - protein, 301 aa, Homo sapiens
MKSNPAIQAAIDLTAGAAGGTACVLTGQPFDTMKVKMQTFPDLYRGLTDCCLKTYSQVGFRGFYKGTSPALIANIAENSVLFMCYGFCQQVVRKVAGLDKQAKLSDLQNAAAGSFASAFAALVLCPTELVKCRLQTMYEMETSGKIAKSQNTVWSVIKSILRKDGPLGFYHGLSSTLLREVPGYFFFFGGYELSRSFFASGRSKDELGPVPLMLSGGVGGICLWLAVYPVDCIKSRIQVLSMSGKQAGFIRTFINVVKNEGITALYSGLKPTMIRAFPANGALFLAYEYSRKLMMNQLEAY

SEQ ID NO: 19353 - protein, 328 aa, Homo sapiens
WWHQSPLRQADPGPPRHTLFMDFVAGAIGGVCGVAVGYPLDTVKVRIQTEPKYTGIWHCVRDTYHRERVWGFYRGLSLPVCTVSLVSSVSFGTYRHCLAHICRLRYGNPDAKPTKADITLSGCASGLVRVFLTSPTEVAKVRLQTQTQAQKQQRRLSASGPLAVPPMCPVPPACPEPKYRGPLHCLATVAREEGLCGLYKGSSALVLRDGHSFATYFLSYAVLCEWLSPAGHSRPDVPGVLVAGGCAGVLAWAVATPMDVIKSRLQADGQGQRRYRGLLHCMVTSVREEGPRVLFKGLVLNCCRAFPVNMVVFVAYEAVLRLARGLLT

SEQ ID NO: 19354 - protein, 308 aa, Homo sapiens
MDFVAGAIGGVCGVAVGYPLDTVKVRIQTEPKYTGIWHCVRDTYHRERVWGFYRGLSLPVCTVSLVSSVSFGTYRHCLAHICRLRYGNPDAKPTKADITLSGCASGLVRVFLTSPTEVAKVRLQTQTQAQKQQRRLSASGPLAVPPMCPVPPACPEPKYRGPLHCLATVAREEGLCGLYKGSSALVLRDGHSFATYFLSYAVLCEWLSPAGHSRPDVPGVLVAGGCAGVLAWAVATPMDVIKSRLQADGQGQRRYRGLLHCMVTSVREEGPRVLFKGLVLNCCRAFPVNMVVFVAYEAVLRLARGLLT

SEQ ID NO: 19355 - protein, 288 aa, Homo sapiens
MPVEEFVAGWISGALGLVLGHPFDTVKVRLQTQTTYRGIVDCMVKIYRHESLLGFFKGMSFPIASIAVVNSVLFGVYSNTLLVLTATSHQERRAQPPSYMHIFLAGCTGGFLQAYCLAPFDLIKVRLQNQTEPRAQPGSPPPRYQGPVHCAASIFREEGPRGLFRGAWALTLRDTPTVGIYFITYEGLCRQYTPEGQNPSSATVLVAGGFAGIASWVAATPLDVIKSRMQMDGLRRRVYQGMLDCMVSSIRQEGLGVFFRGVTINSARAFPVNAVTFLSYEYLLRWWG

SEQ ID NO: 19356 - protein, 237 aa, Homo sapiens
MGLTFINALVFGVQGNTLRALGHDSPLNQFLAGAAAGAIQCVICCPMELAKTRLQLQDAGPARTYKGSLDCLAQIYGHEGLRGVNRGMVSTLLRETPSFGVYFLTYDALTRALGCEPGDRLLVPKLLLAGGTSGIVSWLSTYPVDVVKSRLQADGLRGAPRYRGILDCVHQSYRAEGWRVFTRGLASTLLRAFPVNAATFATVTVVLTYARGEEAGPEGEAVPAAPAGPALAQPSSL

SEQ ID NO: 19357 - protein, 678 aa, Homo sapiens
MAVKVQTTKRGDPHELRNIFLQYASTEVDGERYMTPEDFVQRYLGLYNDPNSNPKIVQLLAGVADQTKDGLISYQEFLAFESVLCAPDSMFIVAFQLFDKSGNGEVTFENVKEIFGQTIIHHHIPFNWDCEFIRLHFGHNRKKHLNYTEFTQFLQELQLEHARQAFALKDKSKSGMISGLDFSDIMVTIRSHMLTPFVEENLVSAAGGSISHQVSFSYFNAFNSLLNNMELVRKIYSTLAGTRKDVEVTKEEFAQSAIRYGQVTPLEIDILYQLADLYNASGRLTLADIERIAPLAEGALPYNLAELQRQQSPGLGRPIWLQIAESAYRFTLGSVAGAVGATAVYPIDLVKTRMQNQRGSGSVVGELMYKNSFDCFKKVLRYEGFFGLYRGLIPQLIGVAPEKAIKLTVNDFVRDKFTRRDGSVPLPAEVLAGGCAGGSQVIFTNPLEIVKIRLQVAGEITTGPRVSALNVLRDLGIFGLYKGAKACFLRDIPFSAIYFPVYAHCKLLLADENGHVGGLNLLAAGAMAGVPAASLVTPADVIKTRLQVAARAGQTTYSGVIDCFRKILREEGPSAFWKGTAARVFRSSPQFGVTLAHYEVLQRWFYIDFGGLKPAGSEPTPKSRIADLPPANPDHIGGYRLATATFAGIENKFGLYLPKFKSPSVAVVQPKAAVAATQ

SEQ ID NO: 19358 - protein, 678 aa, Homo sapiens
MAVKVQTTKRGDPHELRNIFLQYASTEVDGERYMTPEDFVQRYLGLYNDPNSNPKIVQLLAGVADQTKDGLISYQEFLAFESVLCAPDSMFIVAFQLFDKSGNGEVTFENVKEIFGQTIIHHHIPFNWDCEFIRLHFGHNRKKHLNYTEFTQFLQELQLEHARQAFALKDKSKSGMISGLDFSDIMVTIRSHMLTPFVEENLVSAAGGSISHQVSFSYFNAFNSLLNNMELVRKIYSTLAGTRKDVEVTKEEFAQSAIRYGQVTPLEIDILYQLADLYNASGRLTLADIERIAPLAEGALPYNLAELQRQQSPGLGRPIWLQIAESAYRFTLGSVAGAVGATAVYPIDLVKTRMQNQRGSGSVVGELMYKNSFDCFKKVLRYEGFFGLYRGLIPQLIGVAPEKAIKLTVNDFVRDKFTRRDGSVPLPAEVLAGGCAGGSQVIFTNPLEIVKIRLQVAGEITTGPRVSALNVLRDLGIFGLYKGAKACFLRDIPFSAIYFPVYAHCKLLLADENGHVGGLNLLAAGAMAGVPAASLVTPADVIKTRLQVAARAGQTTYSGVIDCFRKILREEGPSAFWKGTAARVFRSSPQFGVTLVTYELLQRWFYIDFGGLKPAGSEPTPKSRIADLPPANPDHIGGYRLATATFAGIENKFGLYLPKFKSPSVAVVQPKAAVAATQ

SEQ ID NO: 19359 - protein, 676 aa, Homo sapiens
MAAAKVALTKRADPAELRTIFLKYASIEKNGEFFMSPNDFVTRYLNIFGESQPNPKTVELLSGVVDQTKDGLISFQEFVAFESVLCAPDALFMVAFQLFDKAGKGEVTFEDVKQVFGQTTIHQHIPFNWDSEFVQLHFGKERKRHLTYAEFTQFLLEIQLEHAKQAFVQRDNARTGRVTAIDFRDIMVTIRPHVLTPFVEECLVAAAGGTTSHQVSFSYFNGFNSLLNNMELIRKIYSTLAGTRKDVEVTKEEFVLAAQKFGQVTPMEVDILFQLADLYEPRGRMTLADIERIAPLEEGTLPFNLAEAQRQQKASGDSARPVLLQVAESAYRFGLGSVAGAVGATAVYPIDLVKTRMQNQRSTGSFVGELMYKNSFDCFKKVLRYEGFFGLYRGLLPQLLGVAPEKAIKLTVNDFVRDKFMHKDGSVPLAAEILAGGCAGGSQVIFTNPLEIVKIRLQVAGEITTGPRVSALSVVRDLGFFGIYKGAKACFLRDIPFSAIYFPCYAHVKASFANEDGQVSPGSLLLAGAIAGMPAASLVTPADVIKTRLQVAARAGQTTYSGVIDCFRKILREEGPKALWKGAGARVFRSSPQFGVTLLTYELLQRWFYIDFGGVKPMGSEPVPKSRINLPAPNPDHVGGYKLAVATFAGIENKFGLYLPLFKPSVSTSKAIGGGP

SEQ ID NO: 19360 - protein, 675 aa, Homo sapiens
MAAAKVALTKRADPAELRTIFLKYASIEKNGEFFMSPNDFVTRYLNIFGESQPNPKTVELLSGVVDQTKDGLISFQEFVAFESVLCAPDALFMVAFQLFDKAGKGEVTFEDVKQVFGQTTIHQHIPFNWDSEFVQLHFGKERKRHLTYAEFTQFLLEIQLEHAKQAFVQRDNARTGRVTAIDFRDIMVTIRPHVLTPFVEECLVAAAGGTTSHQVSFSYFNGFNSLLNNMELIRKIYSTLAGTRKDVEVTKEEFVLAAQKFGQVTPMEVDILFQLADLYEPRGRMTLADIERIAPLEEGTLPFNLAEAQRQKASGDSARPVLLQVAESAYRFGLGSVAGAVGATAVYPIDLVKTRMQNQRSTGSFVGELMYKNSFDCFKKVLRYEGFFGLYRGLLPQLLGVAPEKAIKLTVNDFVRDKFMHKDGSVPLAAEILAGGCAGGSQVIFTNPLEIVKIRLQVAGEITTGPRVSALSVVRDLGFFGIYKGAKACFLRDIPFSAIYFPCYAHVKASFANEDGQVSPGSLLLAGAIAGMPAASLVTPADVIKTRLQVAARAGQTTYSGVIDCFRKILREEGPKALWKGAGARVFRSSPQFGVTLLTYELLQRWFYIDFGGVKPMGSEPVPKSRINLPAPNPDHVGGYKLAVATFAGIENKFGLYLPLFKPSVSTSKAIGGGP

SEQ ID NO: 19361 - protein, 675 aa, Homo sapiens [sequence omitted]

SEQ ID NO: 19362 - protein, 246 aa, Homo sapiens
MVKIYRHESLLGFFKGMSFPIASIAVVNSVLFGVYSNTLLVLTATSHQERRAQPPSYMHIFLAGCTGGFLQAYCLAPFDLIKVRLQNQTEPRAQPGSPPPRYQGPVHCAASIFREEGPRGLFRGAWALTLRDTPTVGIYFITYEGLCRQYTPEGQNPSSATVLVAGGFAGIASWVAATPLDVIKSRMQMDGLRRRVYQGMLDCMVSSIRQEGLGVFFRGVTINSARAFPVNAVTFLSYEYLLRWWG

SEQ ID NO: 19363 - protein, 312 aa, Homo sapiens [sequence omitted]

SEQ ID NO: 19364 - protein, 300 aa, Homo sapiens
MAVKFLGAGTAACFADLVTFPLDTAKVRLQIQGENQAVQTARLVQYRGVLGTILTMVRTEGPCSPYNGLVAGLQRQMSFASIRIGLYDSVKQVYTPKGADNSSLTTRILAGCTTGAMAVTCAQPTDVVKVRFQASIHLGPSRSDRKYSGTMDAYRTIAREEGVRGLWKGTLPNIMRNAIVNCAEVVTYDILKEKLLDYHLLTDNFPCHFVSAFGAGFCATVVASPVDVVKTRYMNSPPGQYFSPLDCMIKMVAQEGPTAFYKGFTPSFLRLGSWNVVMFVTYEQLKRALMKVQMLRESPF

SEQ ID NO: 19365 - protein, 312 aa, Homo sapiens
MVGLKPSDVPPTMAVKFLGAGTAACFADLVTFPLDTAKVRLQIQGENQAVQTARLVQYRGVLGTILTMVRTEGPCSPYNGLVAGLQRQMSFASIRIGLYDSVKQVYTPKGADNSSLTTRILAGCTTGAMAVTCAQPTDVVKVRFQASIHLGPSRSDRKYSGTMDAYRTIAREEGVRGLWKGTLPNIMRNAIVNCAEVVTYDILKEKLLDYHLLTDNFPCHFVSAFGAGFCATVVASPVDVVKTRYMNSPPGQYFSPLDCMIKMVAQEGPTAFYKGFTPSFLRLGSWNVVMFVTYEQLKRALMKVQMLRESPF

SEQ ID NO: 19366 - protein, 309 aa, Homo sapiens [sequence omitted]

SEQ ID NO: 19367 - protein, 311 aa, Canis familiaris
MVGLKPSEVPPTTAVKFLGAGTAACFADLLTFPLDTAKVRLQIQGENQATQAARRIQYRGVLGTILTMVRTEGPRSPYNGLVAGLQRQMSFASIRIGLYDSVKQFYTPKGSDHSSITTRILAGCTTGAMAVSCAQPTDVVKVRFQASIHLGAGSNRKYSGTMDAYRTIAREEGVRGLWKGTLPNITRNAIVNCAEMVTYDIIKEKLLDYHLLTDNFPCHLISAFGAGFCATVVASPVDVVKTRYMNSPPGQYCSPLDCMLKMVTQEGPTAFYKGFTPSFLRLGTWNVVMFVTYEQLKRALMKVQMLRESPF

SEQ ID NO: 19368 - protein, 309 aa, Canis familiaris
MVGFKATDVPPTATVKFLGAGTAACIADLITFPLDTAKVRLQIQGERQGPVRAAASAQYRGVLCTILTMVRTEGPRSLYSGLVAGLQRQMSFASVRIGLYDSVKQFYTKGSEHAGIGSRLLAGSTTGALAVAVAQPTDVVKVRFQAQARAGSGRRYQSTVDAYKTIAREEGFRGLWKGTSPNVARNAIVNCAELVTYDLIKDALLKANLMTDDLPCHFTSAFGAGFCTTVIASPVDVVKTRYMNSALGQYSSAGHCALTMLQKEGPRAFYKGFMPSFLRLGSWNVVMFVTYEQLKRALMAACTSREAPF

SEQ ID NO: 19369 - protein, 309 aa, Canis familiaris
MLRAPGSDAPPTLSVRIAAAAGAACLADMITFPLDTAKVRLQIQGEGQGQPPRAPRYRGVLGTVATLARTEGLQKLYSGLPAGLQRQVGFASLRIGLYDSVREWLSPGQGAAASLGSRISAGVMTGGAAVFIGQPTEVVKVRLQAQSHLHGRKPRYTGTYNAYRIIATTEGLTGLWKGTTPNLMRNVIINCTELVTYDLMKEALVKNHLLADDLPCHFLSALVAGFCTTVLSSPVDVVKTRFVNSVPEQYTSVPNCAMTMLTKEGPLAFFKGFVPSFLRLGSWNVIMFVCFEQLKRELMKSGRTVDCAT

SEQ ID NO: 19370 - protein, 194 aa, Canis familiaris
FKATDVPPTATVKFLGAGTAACIADLITFPLDTAKVRLQIQGERQGPVRAAASAQYRGVLGTILTMVRTEGPRSLYSGLVAGLQRQMSFASVRIGLYDSVKQFYTKGSEHAGIGSRLLAGSTTGALAVAVAQPTDVVKVRFQAQARAGSGRRYQSTVDAYKTIAREEGFRGLWKGTSPNVARNAIVNCAELVTY

SEQ ID NO: 19371 - protein, 311 aa, Sus scrofa
MVGLKPSDVPPTMAVKFLGAGTAACFADLLTFPLDTAKVRLQIQGENQAVQTARSAQYRGVLGTILTMVRNEGPRSPYNGLVAGLQRQMSFASIRIGLYDSVKQLYTPKGSDHSSITTRILAGCTTGAMAVTCAQPTDVVKVRFQASIHAGPGSNRKYSGTMDAYRTIAREEGVRGLWKGILPNITRNAIVNCAEMVTYDVIKEKVLDYHLLTDNLPCHFVSAFGAGFCATVVASPVDVVKTRYMNSPPGQYQNPLDCMLKMVTQEGPTAFYKGFTPSFLRLGSWNVVMFVSYEQLKRALMKVQMLRESPF

SEQ ID NO: 19372 - protein, 309 aa, Sus scrofa
MVGFKATEVPPTATVKFLGAGTAACIADLITFPLDTAKVRLQIQGERRGPVQAAASAQYRGVLGTILTMVRNEGPRSLYNGLVAGLQRQMSFASVRIGLYDSVKHFYTKGSEHAGIGSRLLAGSTTGALAVAVAQPTDVVKVRFQAQARAGGGRRYRSTVDAYKTIAREEGLRGLWKGTSPNVARNAIVNCAELVTYDLIKDTLLKADLMTDDLPCHFTSAFGAGFCTTVIASPVDVVKTRYMNSAPGQYSSAGHCALTMLQKEGPRAFYKGFTPSFLRLGSWNVVMFVTYEQLKRALMAARASREAPF

SEQ ID NO: 19373 - protein, 308 aa, Sus scrofa
MVGLKPPEVPPTTAVKLLGAGTAACFADLLTFPLDTAKVRLQIQGENQAARSAQYRGVLGTILTMVRNEGPRSPYNGLVAGLQRQMSFASIRIGLYDSVKQLYTPKGSDHSSITTRILAGCTTGAMAVTCAQPTDVVKVRFQASIHAGPRSNRKYSGTMDAYRTIAREEGVRGLWKGILPNITRNAIVNCAEMVTYDVIKEKVLDYHLLTDNLPCHFVSAFGAGFCATVVASPVDVVKTRYMNSPPGQYQNPLDCMLKMVTQEGPTAFYKGFTPSFLRLGSWNVVMFVSYEQLKRALMKVQMLRESPF

SEQ ID NO: 19374 - protein, 311 aa, Bos taurus
MVGLQPSERPPTTSVKFLAAGTAACFADLLTFPLDTAKVRLQIQGENQAALAARSAQYRGVLGTILTMVRTEGPRSLYSGLVAGLQRQMSFASIRIGLYDSVKQFYTPKGSDHSSIITRILAGCTTGAMAVTCAQPTDVVKIRFQASMHTGLGGNRKYSGTMDAYRTIAREEGVRGLWKGILPNITRNAIVNCGEMVTYDIIKEKLLDYHLLTDNFPCHFVSAFGAGFCATLVASPVDVVKTRYMNSPPGQYHSPFDCMLKMVTQEGPTAFYKGFTPSFLRLGSWNVVMFVTYEQMKRALMKVQMLRDSPF

SEQ ID NO: 19375 - protein, 274 aa, Bos taurus
MVGLQPSERPPTTSVKFLAAGTAACFADLLTFPLDTAKVRLQIQGENQAALAARSAQYRGVLGTILTMVRTEGPRSLYSGLVAGLQRQMSFASIRIGLYDSVKQFYTPKGSDHSSIITRILAGCTTGAMAVTCAQPTDVVKIRFQASMHTGLGGNRKYSGTMDAYRTIAREEGVRGLWKGILPNITRNAIVNCGEMVTYDIIKEKLLDYHLLTDNFPCHFVSAFGAGFCATLVASPVDVVKTRYMNSPPGQYHSPFDCMLKMVTQEGPTAFYKG

SEQ ID NO: 19376 - protein, 475 aa, Nostoc sp. PCC 7120
MNLVWQRFTLSSLPLKQFLATSYLHRFLVGLLSSWRQTSFLLQWGDMIAAALLSLIYVLAPFVSSTLVGVLLIACVGFWLLLTLSDEPSSNNNSLVTPIHLLVLLYWGIAAVATALSPVKKAALTDLLTLTLYLLLFALCARVLRSPRLRSWIITLYLSASLVVSIYGMRQWRFGAPPLATWVDPESTLSKTTRVYSYLGNPNLLAGYLVPAVIFSLMAVFVWQGWARKSLAVTMLFVNTACLIFTYSRGGWIGLVVAVLGATALLVDWWSVQMPPFWRTWSLPILLGGLIGVLLIAVLFVEPVRFRVLSIFADRQDSSNNFRRNVWDAVFEMIRDRPIIGIGPGHNSFNKVYPLYQRPRYSALSAYSIFLEVAVEMGFVGLACFLWLIIVTINTAFVQLRQLRQSANVQGFWLVGALATLLGMLAHGTVDTIWFRPEVNTLWWLMVALIASYWTPLSANQCQELNLFKEEPTSN

SEQ ID NO: 19377 - protein, 397 aa, Chloroflexus aurantiacus
MVMQFPALITIYREHRLWMWLIGAAVTGCILGFTPPLVAVSWLIGLAALGLTLCDPVWPVALAVLSVPFQQLVILPGGLSLTQACFVLVALSLIGRIHQPWPKLTAPGLSLAVLVWCLALAAAATPLSRTEGLKETLRWGTVLLIYVATVWVLQDRLRAAWRRTVLVTCLLVAPAITALIGVTQFVNGFGPESFAIGGGRVRAYGTIGQPNSFAGYLNQSWPLAVGMLIALVETRQYHIRFWMLFSILLVATGSLLGGLLASFSRGGWIGALIGALAMGIAFGGRYGRAMLIRVGMAALLVGLSGLLLINSGLLPTALSNRVVSIIASLRPFDTRNVEITPENFAVVERMAHLQAAWHMVQERPLLGVGPGNFSIAYERLVYSGQSPTWIKPWYDSR

SEQ ID NO: 19378 - protein, 1083 aa, Chloroflexus aurantiacus
MPSHRLIVLQKLLLLLAPFSYLLSSISYLLSSTSYLLSSISYFLPNYASPLLLDIRHLLDYTLRAMWRNTVLRMFLLCSLGVLLTAALGVVVWLDNAALRGIASRSPISSPFPYTDGPALGVNVFNLHLEPDPTAADRTFALVRALGARYVRMQVPWEDIEIHGRGDFTDRRNEATIGVVSSWAKYDRIVDAAVAHGIELIMRVDRPPDWAREQGRSTPEFVAGLAVDGNSTGPPDDLADYGRFLTELVTRYRGKVTYFQIWNEPNLKNEWGWQEPKPADFLALLRVGYEAVKSANPDAVVLFPGLAPTDGLDPRAPMTELEYLDAIYRLGGAAYFDIMAAQNYGLGQPPTEHRYVFLRGRDNWNWHRPIDTRNDVSRVVLLREVMERHGDVATPVWVTEFGYNAAPDTIPAERRFVWGPPVDEQTKGAYLVAQIERARREWPWMGVMNIWMLRYGGYAEPDPADPTPYFALVSRDWQLLSSYQIVQAYMQAPPVAHVGVHDWSHPAVERTVDGWRVRFAGTGLEFYGGSPTTVLLDGDAITLKANAVHGLADTTHVIELRGGSAPTGFAVVRDLPWQFPADYGPLLLFAGIAVIGALTMRTALALLDHLIARWSQIAASRREWIIFALQGITLAIAYRASAQLPLTMIGLLPFIGLSIARPDLALRWVVITVPLYFLPKGLFDSRFGIRDSGIYLPLHEVTLIIAAVATLIRDWRRMRWPALPALPVAVWAMMPAVLVLIGGIWGVIIADMRGPALRELRWMIIEPLLFAALIWWHERQGRAVVYPALIGWLAAGAVSALVALAQVGGVNLVPLFGTKIGHGTDLVATEGVVRATGLYGHPNNLGLAMGRVWPLAAALAWAAWQQRRQWLALTFAGIALLALAALTVSFSRGAYLGALVAGGCLIFFAATPRLRYRLIIGAGVGVLLMAIMLSALGIERLSLLTGSSTIRLSTWRAALAMLADHPLGIGLDQFLVVYQQYIDPALRDTNEVYTAHPHNLILDLLLRGGPLLLLGLGWATWRMVRVPMHAPSLALAVGVAATMAGALTHGLVDAFYFWPDLAFSFWLLVVVREWSIPASTIPE

SEQ ID NO: 19379 - protein, 474 aa, Synechocystis sp. PCC 6803
MVSPISIWRSLMFGGFSPQEWGRGSVLHRLVGWGQSWIQASVLWPHFEALGTALVAIIFIAAPFTSTTMLGIFMLLCGAFWALLTFADQPGKGLTPIHVLVFAYWCISAIAVGFSPVKMAAASGLAKLTANLCLFLLAARLLQNKQWLNRLVTVVLLVGLLVGSYGLRQQVDGVEQLATWNDPTSTLAQATRVYSFLGNPNLLAAYLVPMTGLSLSALVVWRRWWPKLLGATMVIVNLLCLFFTQSRGGWLAVLALGATFLALCYFWWLPQLPKFWQRWSLPLAIAVAVILGGGALIAVEPIRLRAMSIFAGREDSSNNFRINVWEGVKAMIRARPIIGIGPGNEAFNQIYPYYMRPRFTALSAYSIYLEILVETGVVGFTCMLWLLAVTLGKGVELVKRCRQTLAPEGIWIMGALAAIIGLLVHGMVDTVWYRPPVSTLWWLLVAIVASQWASAQARLEASKEENEDKPLLAS

SEQ ID NO: 19380 - protein, 387 aa, Synechocystis sp. PCC 6803
MWAALTLWFLLTTITAHDRGEALLGLANFVPYFIVFLAFSQVICQFKQLNTLAWLLTANTVVLVIIGFGQVYGGWATPNWLVAIGTNLVAGGRPEGRMSSLLMYANLFSAWLLMVFPLSLGLLIQSVRRWHFTAPSNRFNLPPLVWALLVACILEAIALVLTGSRSAWGIGLLIGIAYAIYLSWYWLVALAGGATAMVLWASFGPFGKEPLRQIVPKYFWGRLSDELYPDRYRTALRSTQWQFSWDMFLDQPIFGQGLRNFTPLYQAAMNVWIGHPHNLVLMMLGETGLIGTALMLGAVGFILAQGMVLLIHLSRGGGFRRRSQHLLLLSYGIAFAALCLYNLFDVTIFDMRNNVLGWIFLAAIAGVSQRYGTKLAQGDPAKLQVPG

SEQ ID NO: 19381 - protein, 443 aa, Xylella fastidiosa Dixon
MTNSAPDIVSISKPALLLDVGRWAPVCVVLFVAFWPLPGLAATVLTLSALLASYYLIRYRFRGGTQLLDSPAWALTSVLFMAYWLPQVVSLFGALELSESLLKVATDLRYLPFMWLCAIAVGGPERRERTFKGLAVIGLIWTLDALAQAVLRTSPLFWSLNQLKQAISGYGFCSTQQMMLADRLSGIFGPCNLKLGQTLATLSPFVLFAMQRRGVALWLLVVAVLGIVLLLAGSRASWITYGLILMLSGWRVLGIRRLLGMGALFLPLVLAVIAFSPQTRERIDRTAAVFADHGAGVDQALSGRSQIWQAALCMIQAHPLSGVGVRGFRDAYPACNPTPERIPAWGAGPALHAHQIVLEILSETGVIGLLLWIAGAAMAWRAWCYATAAARDRARPAMISLLATVFPFNTHLAFYSSFWGALMLMLAGLYAGALLQNGVIKKT

SEQ ID NO: 19382 - protein, 443 aa, Xanthomonas axonopodis pv. citri str. 306
MTNSAAEALPRAPVLTPDAGRWAPLWVIVFVALWPTPGLAETVLSLGALFAAYRLLHARFRGGTRLLSGAAWALTSVLFLAYWLPQMLSAFDAVDAGRALRKSATDLRYLPFMWLCAIAVANAQRRRRTFTGLAVIGGVWTLDALLQAAFGTSPLFFGIDQIKQLISGHGLCTAQELALVDRLSGVLGPCNLKFGQTLASLSPFLLLALGRRHVLAWLVGAAAVGIVLVLAGSRASWITYGVIMLLSGWQLLGGRRLLAVAVAGALLAVAVVAVAPQARERIQRTTLAFGNGEQGVDQALSGRAQIWGAALCMIRKHPLDGVGARGFRQAYPACNPAPGQAPAWGDGPAFHAHQIVLEILAETGVIGLLLWLAGAAQAWRAWRYSSVVAREQARPAMIALVATVFPFNTHLAFYSSFWGGLSLMLAGLYAGALLNDDADRAPQ

SEQ ID NO: 19383 - protein, 463 aa, Thermosynechococcus elongatus BP-1
MDVLLRRLDVEGWRSHSGVGRLLGLLQGWQEKSWLGRWLPSLAVLLVGLVLVLAPLMPSGMIGMLLAAGSGFWLLWTLAGEREGRWSGVHLLVLLYWGIALLATVLSPVPRAAMVGLGKLTLYLLFFALAERVMRNERWRSRLLTVYLLTALMVSVEGVRQWIFGAEPLATWTDPESALANVTRVYSFLGNPNLLAGYLLPSVPLSAAAIAVWQGWLPKLLAVVMLGMNAASLILTFSRGGWLGLVAATIAGVVLLGIWFWPRLPLQWRRWGVPTMGGLAIALCMGTIVSVPPLRERAASIFVARGDSSNNFRINVWMAVQQMIWARPWLGIGPGNVAFNQIYPLYQVNVRFTALGAYSIFLEILVEVGFIGFGVFLWLLAVLGDRARRCFEELRATGSPQGFWLMGTIAAMIGMLTHGLVDTIWFRPEVATLWWLMVAIVASFTPFQSKTANGTFSNRDPEP

SEQ ID NO: 19384 - protein, 261 aa, Clostridium thermocellum ATCC 27405
MPGRIYATMSNPNNFGEILVMSLPFYVSVILNSKTFFKKMIYFIMALPPLLALFNTGSRSSWIGFAVSVIVITFLLNKRLLPFIILGGVMMIPFLPQYVYNRILTIFRAAQDTSTQTRVKILQTVEPMFKHYMLSGVGLGSDIFRQLIQNYKLYTKAVPPHTHILYLQIWIEMGLAGFVTFMWYIYRTIKNSVIGIYNSSLTLKTILAAGTAALCGILVTSLVEYSWYYPRVMVMFWVLLGIIAAATYLAELKNRRLSEMD

SEQ ID NO: 19385 - protein, 461 aa, Trichodesmium erythraeum IMS101
MNSVWKKLTLTNLSFSDSEWLNASYLYGLLNGSLYNWRRGSWLMQWGEPLGFVLLAIVFTLAPFVNTTLIGFLLLASAGFWVLLKVSDNTQEYLTPIHLLIFLYWSIATLAVVISPAKTAAFSGWVKLTLYLLLFASGSLVLRSPRLRSWLINIYLLVSLVVSFYGIRQWIDKVEPLATWNDPTSAQAGATRVYSYLGNPNLLGGYLLPAIALSFVAIFAWSSWARKSLAVTILLVSCACLRYTGSRGSWIGFLALMFAMLILMWYWWRSYMPSFWQIWSLPIAVGSFAGLLILAVVLLEPLRDRVLSVFAGRQDSSNNFRMNVWMSVFDMIRDRPILGIGPGNDVFNKIYPLYQRPRYSALSSYSVPLEIVVETGFIGLTAFLWLLLVTFNQGVLQLKRLRDADNPQGYWLIGAIAAMVGLIGHGLVDTVWYRPQVNTIWWLMVAIIASYSSQQGVRSRE

SEQ ID NO: 19386 - protein, 453 aa, Vibrio vulnificus CMCP6
MTVTPRYPHLAFVLTLCMVVALVWAWQPNPLVVVALCLLPIATLYVLNQTFWLVLLFVVFSFFRIHEAIPQLYSLKIPLLLSFGALAALGWHLIITRQLKPYWHPVMNWLVAFWLVVVIGLFFAGNRGVAFGAFSSVYWKIMVMTLAIMWLVTSAKHLNIISITITLSGLLIGCVALSNAMQGIGLVEGSRVTIGRDLGSMLGDPNDLALVLMFPFAFSVSLSFHRRTHVAVRLLAGVTCAILFLALLETQSRGGLLGAMAVLGYFANKTIRNKTVLILLGCVASLLLYAVAGISDRASGGSAEEGIDASAMGRLYAWEAAFKMALAHPLLGVGLQNFYYNYFFYSPHWDGLNHAVHSTWFGVLAETGFVGLTLFLGLIVCLIKTSLHSIRQIHCQKPTAIDIAANAVFAGLLGTIVSGTFLTQGFTWPIYILTALTIAISHIIKIDSQNENA

SEQ ID NO: 19387 - protein, 432 aa, Vibrio parahaemolyticus RIMD 2210633
MLWTVMPHPILIVAVCFAPLALLFVLNQTFWLVTLFVIFSFFRIHEAFPAIYSFKIPLLLSLGALAALAFHLLLSRQLTAFWHPSLKWLCIFWGLVIIGIVFASSRDIAITVFKNTYWKIIVMTLAITWLITKPQQLAQMSKAIIVAGMLIGLVALNNAANGIDLVEGTRVSIGRSIGSVLGDPNDLALVLMFPLAFTVSQLMEKRSPTLLRLFALITCFILFFAVIQTQSRGGLLGSLSVFAYFAFKHIKSKTLVLVLGAVAALALYAFAGISGRESGGAAEDGIDASAMGRLYAWEAAFKMALHHPFTGVGLDNFYFNYYFYSPHWDGINHAVHSTWFGVLAETGFVGLAVFITLIVSLIRTSLKSISLLTPDSDYALTVGANAVLSGLIGTIVSGTFLTQGFTWPIYILAALTVVVSRIVQSDCQNEKS

SEQ ID NO: 19388 - protein, 227 aa, Zea mays
  unsure (1)..(227): unsure at all Xaa locations
XSPVKMAAASGLAKLTANLCLFLLAARLLQNKQWLNRLVTVVLLVGLLVGSYGLRQQVDGVEQLATWNDPTSTLAQATRVYSFLGNPNLLAAYLVPMTGLSLSALVVWRRWWPKLLGATMVIVNLLCLFFTQSRGGWLAVLALGATFLALCYFWWLPQLPKFWQRWSLPLAIAVAVILGGGALIAVEPIRLRAMSIFAGREDSSNNFRINVWEGVKAMIPGYRLSKG

SEQ ID NO: 19389 - protein, 475 aa, Nostoc punctiforme
MFFMNLVWQLFTLSSLPLKEYLATSYVHRSLVGLLSSWRQTSVLIQWGDAIAAVLLSSIYALAPFASSTLVGLLLVACVGFWLLLTLSDEVTPANVSSVTPIHLLVLLYWGIAVIATALSPVKKAALNDLGTLTLYLLLFALCARVLRSPRLRSWILTLYLHVSLIVSVYGLRQWFFGATALATWVDPESPLSKTTRVYSYLGNPNLLAGYLLPAVIFSLVAIFAWQSWLKKALALTMLIVNTACLILTFSRGGWIGLVVAVLAVMALLVFWKSVEMPPFWRTWSLPIVLGGLIGILLLAVIFVEPVRLRVFSIFADRQDSSNNFRRNVWDAVFEMIRDRPIFGIGPGHNSFNKVYPLYQHPRYTALSAYSILFEVTVETGFVGLACFLWLIIVTFNTALLQVRRLRRLRSVEGFWLIGAIAILLGMLAHGTVDTVWYRPEVNTLWWLIVALIASYWTPLTQNQTNPSNPEPAVN

SEQ ID NO: 19390 - protein, 438 aa, Vibrio cholerae
MLSFHKTLFFAFLLFVFWLPIPLGSNRPWAWSLNEIYVAFLLLGCLFLLPAAQCWLAIQRAKVILIPVALFTLWSWMQSWPSLGLSSDQTLVFISAVKSLHYLQICLVAALLVDTPHKLKMLATTMIASGICQAFYAGVILLLELQTSPFFSLPLNQRASGSFVYHNHLANFLMLNLCLGFGLLIAELNHQTTQGWRNTLKKLLAILLSDKAFIRLGLVIMVIALVLTRSRMGNIAFFVALSIGSLLILLFYKSKPKSLYLLIVSLFIVDALVVSNWFGLDKVRQRLAETSLQNESRDDVVRDALNAIQERPLTGFGNGTFYSTFPSYNQGEVALFYDHAHNDYVQFTLESGLIATSVFGIMVLFCAWRALSAFRNRTNKTMRGIGLGSLMAIIGMLLHMSVDFPLQAPATALYFLFCLLIANWSMTLPTPKYRSSRT

SEQ ID NO: 19391 - protein, 439 aa, Prochlorococcus marinus str. MIT 9313
MPKTAAPQPLLLRWQGHIPSSEAMQMRLQWIAGLLLMMLLATLPMLTRTGLGLTILAAGALWIIWGCVTPAGRIGSISSCLLVFFAIACLATGFSPVPLAAAKGLIKLISYLGVYALMRQLLATSSDWWDRLVAALLTGELISSVIAIRQLYAPAEEMAHWADPNSVAAGTVRIYGPLGNPNLLAGYLMPILPLALVALLRWQGLGAKLYAMVALGLGITATLFSFSRGGWLGMLSALAVILVLLLLRSTSHWPLVWRRLLPLIVIVLGTAMLVIAATQIEPIRTRITSLIAGRSDSSNNFRINVWLSSLEMIQARPWLGIGPGNAAFNRIYPLFQQPKFNALSAYSVPLEILVETGLAGLMASLALVITGMRKGLAGLNSNHPLALPALASLAAIAGLAVHGITDTIFFRPEVQLVGWFCLATLAQTQPEQKQLQQTE

SEQ ID NO: 19392 - protein, 431 aa, SYNECHOCOCCUS SP. WH 8102
MADATDQRSIPLLLRWQGCLTPTASVQQRLELLSGVVLMLLLGSLPFVSRSGLGLELAAAGLLWLLWSLITPAKRLGAISRWVLLYLAIAWVCTGFSPVPIAAAKGLLKLTSYLGVYALMRTLLERQIVWWDRLLAALLGGGLFSSVLALRQLYASTDELAGWADPNSVSAGTIRIYGPLGNPNLLAGYLLPLVPLACIAVLRWKRLSCRLLAAVTALLAGSATVFTYSRGGWLGLLAALALAGMLILLRTTAHWPPLWRRLLPLAALLIAGIALALAITQLDPIRTRVLSLVAGRGDSSNNFRINVWLAAIEMVQDRPWLGIGPGNAAFNSIYPLYQQPKFDALSAYSVPLEILVETGIPGLLACLGLLLSSIQRGLRIHGQQGLIAIGSLAAIAGLLTQGITDTIFFRPEVQLIGWFALASLGATWLRD

SEQ ID NO: 19393 - protein, 424 aa, SYNECHOCOCCUS SP. WH 8102
MIRDRRIGGQAFRLGLFFLPSSALLAGIGLLIACVSGSRGREQPLWRDRWCQPLLLAGLLMLIGACLAENVGLAWAGLANWLPFVWAFWAFQPHLAKASQRRQAVWMLLAGTLPVLVTGFGQMLLGWQGPWQVGGGAIIWFLHPDGRPIGRLSGLFDYANITGAWLAVVWPLMLAAVFRPDGWRRRGGALLLSMATALAVLLTQSRNAMGGLVLALPFVLGPWQWMWLLPLLLLLASPLLLAVLPGVPVGLQQWGMRLLPDQVLVRVLESQGETAWKHTRLGQWQYALQLVSARPWFGWGAAAFSVLYPIHAAKRWHGHVHNLPLELAVSHGVPAMLLIVGTVLFLLVLAAQRGMLQKAPLERAWWAATLVLVVMHATDLPLFDSRLNILGWTLLAGLCAFSRQCQEPGPDRDARAVSQEQADP

SEQ ID NO: 19394 - protein, 264 aa, Nostoc sp. PCC 7120; identical to SEQ ID NO: 491

SEQ ID NO: 19395 - protein, 150 aa, Arabidopsis thaliana
MTIRKTDFNLVQCHWHSPSEHTVNGTRYDLELHMVHTSARGRTAVIGVLYKLGEPNEFLTKLLNGIKAVGNKEINLGMIDPREIRFQTRKFYRYIGSLTVPPCTEGVIWTVVKRVNTISMEQITALRQAVDDQQCIDLTYLLFSYTRDLK

SEQ ID NO: 19396 - protein, 259 aa, Zea mays
  unsure (1)..(259): unsure at all Xaa locations
MYAAAPSSSRVAAAAAAFFIVISLSPQLLVRPFGASTTVHWEELDEEDFSYRRNAGNGPARWGLIRREWATCNVGLLQSPIGLSDTLAGLADRSGRLGRSXXHAPSEHAINGRRYALELQMVHQSDTNRYAVVSQLYRISRRRPDRTIHRLERYIRRIIARRKNHEELIDEEVDPRRPVSRSTAYYKYTGSFTTPPCTEGVTWVVAHQTRRVTRRQVRLLRNAVHDGTRSNRRPLQEANGRAITFYYTSPAHGRGANGD

SEQ ID NO: 19397 - protein, 235 aa, Drosophila melanogaster
MEWNYLKNGKDWEDLCSSGKHQSPILLDSRTVSISLDIPVTSNGRKPFITGGRLKGRYYADGLHFHWGSYKSRGSEHLINKRRFDAEIHIVHRNEKYRNIAQAVRQKDGLAVVAIMVAIVRKDNAKSTPLSRLMEAVVRVPIEDSNATVFGQSSLDQLIGGVSHRDFFTYEGSLTTPLCDETVTWIVFTETTTVTMSSVSKFWLLRDHWGHRLINNYRIVQDLNNRTVFYKKRMS

SEQ ID NO: 19398 - protein, 320 aa, Canis familiaris
MRALALLLALPLLGARAQHGSLWTYSEGALDQVHWPREYPTCGGTRQSPIDLQRRKVQYNPSLKALKLTGYRIQVGEFPMINNGHTVQISLPPTMRMMASDGTEYIAQQMHFHWGGASSEISGSEHTIDGIRFVAEIHIVHYNSKYKSYDIAQHEPDGLAVLAALVKVEDYGENTYYSNFISHLNNIRYPGQSTVLSGLDIEDMLPENTHHYYTYRGSLTTPPCTENVHWFVLVHHVRLSSIQTWKLENSILDHQNKTLHSDYRRIQPLNGRVVESNFVNLPSQGSEFQFYVNKLNNKLEYLRRLLEKTKVEKKPHIHQA

SEQ ID NO: 19399 - protein, 614 aa, Arabidopsis thaliana
MSEDVEKYLNLNPPCSSSSSSSSAATFTNKSRNFKSSPPPCPDHVLENVLENVLQFLTSRCDRNAVSLVCRSWYRVEAQTRLEVFIGNCYSLSPARLIHRFKRVRSLVLKGKPRFADFNLMPPNWGAQFSPWVAATAKAYPWLEKVHLKRMFVTDDDLALLAESFPGFKELTLVCCEGFGTSGIAIVANKCRQLKVLDLMESEVTDDELDWISCFPEGETHLESLSFDCVESPINFKALEELVVRSPFLKKLRTNRFVSLEELHRLMVRAPQLTSLGTGSFSPDNVPQGEQQPDYAAAFRACKSIVCLSGFREFRPEYLLAISSVCANLTSLNFSYANISPHMLKPIISNCHNIRVFWALDSIRDEGLQAVAATCKELRELRIFPFDPREDSEGPVSGVGLQAISEGCRKLESILYFCQNMTNGAVTAMSENCPQLTVFRLCIMGRHRPDHVTGKPMDDGFGAIVKNCKKLTRLAVSGLLTDEAFSYIGEYGKLIRTLSVAFAGNSDKALRYVLEGCPKLQKLEIRDSPFGDVGLRSGMHRYSNMRFVWLSSCLISRGGCRGVSHALPNVVVEVFGADGDDDEDTVTGDYVETLYLYRSLDGPRKDAPKFVTIL

SEQ ID NO: 19400 - protein, 623 aa, Arabidopsis thaliana
MTEEDSSAKMSEDVEKYLNLNPPCSSSSSSSSAATFTNKSRNFKSSPPPCPDHVLENVLENVLQFLTSRCDRNAVSLVCRSWYRVEAQTRLEVFIGNCYSLSPARLIHRFKRVRSLVLKGKPRFADFNLMPPNWGAQFSPWVAATAKAYPWLEKVHLKRMFVTDDDLALLAESFPGFKELTLVCCEGFGTSGIAIVANKCRQLKVLDLMESEVTDDELDWISCFPEGETHLESLSFDCVESPINFKALEELVVRSPFLKKLRTNRFVSLEELHRLMVRAPQLTSLGTGSFSPDNVPQGEQQPDYAAAFRACKSIVCLSGFREFRPEYLLAISSVCANLTSLNFSYANISPHMLKPIISNCHNIRVFWALDSIRDEGLQAVAATCKELRELRIFPFDPREDSEGPVSGVGLQAISEGCRKLESILYFCQNMTNGAVTAMSENCPQLTVFRLCIMGRHRPDHVTGKPMDDGFGAIVKNCKKLTRLAVSGLLTDEAFSYIGEYGKLIRTLSVAFAGNSDKALRYVLEGCPKLQKLEIRDSPFGDVGLRSGMHRYSNMRFVWLSSCLISRGGCRGVSHALPNVVVEVFGADGDDDEDTVTGDYVETLYLYRSLDGPRKDAPKFVTIL

SEQ ID NO: 19401 - protein, 619 aa, Arabidopsis thaliana
MTQDRSEMSEDDDDQQSPPLDLPSTAIADPCSSSSSPNKSRNCISNSQTFPDHVLENVLENVLQFLDSRCDRNAASLVCKSWWRVEALTRSEVFIGNCYALSPARLTQRFKRVRSLVLKGKPRFADFNLMPPDWGANFAPWVSTMAQAYPCLEKVDLKRMFVTDDDLALLADSFPGFKELILVCCEGFGTSGISIVANKCRKLKVLDLIESEVTDDEVDWISCFPEDVTCLESLAFDCVEAPINFKALEGLVARSPFLKKLRLNRFVSLVELHRLLLGAPQLTSLGTGSFSHDEEPQSEQEPDYAAAFRACKSVVCLSGFRELMPEYLPAIFPVCANLTSLNFSYANISPDMFKPIILNCHKLQVFWALDSICDEGLQAVAATCKELRELRIFPFDPREDSEGPVSELGLQAISEGCRKLESILYFCQRMTNAAVIAMSENCPELTVFRLCIMGRHRPDHVTGKPMDEGFGAIVKNCKKLTRLAVSGLLTDQAFRYMGEYGKLVRTLSVAFAGDSDMALRHVLEGCPRLQKLEIRDSPFGDVALRSGMHRYYNMRFVWMSACSLSKGCCKDIARAMPNLVVEVIGSDDDDDNRDYVETLYMYRSLDGPRNDAPKFVTIL

SEQ ID NO: 19402 - protein, 665 aa, Glycine max
  unsure (1)..(665): unsure at all Xaa locations
KIEIPTLSPPFSSSSPISISILFFXVSRTKTKTSSTESNKXETSQTTNSEDDHRSSPSEITESSNSKTRTCGPFPGSGPSEPQAPFPDQVLENVLENVLHFLPSRRDRNAASLVCRSWYRAEALTRSELFIGNCYALSPTRATARFTRARSVTVKGKPRFADFDLMPPDWGAHFGPWASALAQAYPWLEKLHLKRMXCVTDADLALIADSFAAFRELVLVCCEGFGTPGLAVVVSKCRLLRVLELVESEVEDDEEVDWISCFPESQTNLESLVFDCVDVPINFEALEGLVARSPRLKKLRLNRYVSMAELYRLLLRAPQLTHLGTGSFSATEAGAVGDQEPDYQEPDYAAAFEACRSLVCLSGFREIWADYLPAIYPVCXADLTSLNVSYADVNTDQLKSVIRHCHKLQIFWVLDSIRDEGLQAVAATCKDLRELRVFPVNTREEIEGPVSEVGFEAISRGCRKLQSILFFCQRMTNAAVVAMSKNCPDLVVFRLCIIGRYRPDPVTQEPMDEGFGAIVMNCKKLTRLAVSGLLTDRAFEYIGTYGKLVRTLSVAFAGDTDVGLKYVLEGCPNLQKLEIRDSPFGDGALRSGLHHYYNMRFLWMSSCKLTRQACQEVARALPNLVLEVIKGDEEENAGDEVETLYMYRSLDGPRDDAPRFVTILQ

SEQ ID NO: 19403 - protein, 590 aa, Glycine max
  unsure (1)..(590): unsure at all Xaa locations
VRKSRGGPGDSKAEATRTLSPLPDQVLENVLESVLHFLTSRRDRNAASLVCKSWYRAEALTRTELFIGNCYAVSPRRATGRFPRVRSVTIKGKPRFADFDLMPLNWGAHFTPWATALSQSYPSLNKLHLKRMSLTDHDLTLLSHSFPSFQDLVLTCCEGFGTTALAALASNCRLLRVLELVECVVEVGDEEMDWISCFPETQTHLESLVFDCVECPVNFDALERLVARSPSLRKLRLNRYVSMSQLHRLMHRAPQLTHLGTGSFSASELDQELDFASAFAACKSLVCLSGFREFWADYLPAIYPACANLISLNFSFADISADQLKSVIRHCHKLQTFWVLDTICDEGLQAVAETCKDLRELRVFPVNTREEIEGPVSEVGFEAISRGCRKLQSILFFCQRMTNAAVVAMSNNCPDLVVFRLCIIGRYRPDPETLEPMDEGFGAIVMNCKKLTRLAVSGLLTDRAFNYIGTYGKLIRTLSVAFAGDTDLGLQYVLEGCPNLQKLEIRDSPFGDGALRSGLHHFYNMRFLWMSSCKLTRQACREVARMLPHLVLEVINSEXXDKADDIEILYMYRSLDRPRDDAPKVVTILC

SEQ ID NO: 19404 - protein, 419 aa, Glycine max
  unsure (1)..(419): unsure at all Xaa locations
XRLLRVLELVECVVEVGDEEMDWMSCFPETQTHLESLVFDCVECPVNFDALERLVARSPLLRKLRLNRYVSMSQLHRLMHRAPQLTHLGTGSFSASELDQELDFASAFASCKSLVCLSGFREFWADYLPAIYPACANLISLNFSFADISPDQLKSVIWHCHKLQIFWVLDSIRDEGLQAVAATCKDLRELRVFPMDAREETDGPVSEVGFEAISQGCRKLESILFLCQRMTNAAVVAMSKNCPDLVVFRLCIIGRYRPDPVTEEPMDEGFGAIVMNCKKLTRLAMSGLLTDRVFEYIGMYGKLVRTLSVAFAGDTDVGLKYVLEGCPNLQKLEIRDSPFGDGALRSGLHHYYNMRFLWMSSCKLTRQACREVARMLPHLVLEVINSEXXDKADDIEILYMYRSLDRPRDDAPKVVTILC

SEQ ID NO: 19405 - protein, 603 aa, Oryza sativa (japonica cultivar-group)
MSEEDDDQPPPLPAQKRPRASPPPDQVLDNVLETVLQFLDSARDRCAASLVCRSWSRAESATRASVAVRNLLAASPARVARRFPAARRVLLKGRPRFADFNLLPPGWAGADFRPWAAAVAAAAFPALASLFLKRITVTDDDLDLVSRSLPASFRDLSLLLCDGFSSAGLASIASHCRGLRVLDVVDCEMNDDDDEVVDWVAAFPPGTTDLESLSFECYVRPVSFAALEALVARSPRLTRLGVNEHVSLGQLRRLMANTPRLTHLGTGAFRPGDGPEDVGLDIEQMASAFASAGRTNTLVSLSGFREFEPEYLPTIAAVSGNLTNLDFSYCPVTPDQFLPFIGQCHNLERLYVLDSVRDEGLQATARTCKKLQVLHVLPLNALEDADELVSEVGLTAIAEGCRGLRSTLYFCQSMTNAAVIAISQNCVDLKVFRLCIMGRHQPDHVTGEPMDEGFGAIVRNCSKLTRLSTSGHLTDRAFEYIGKYAKSLRTLSVAFAGDSNLALQHILQGCSKLEKLEIRDCPFGDAGLLSGMHHFYNMRFLWMSGCNLTLQGCKEVARRLPRLVVELINSQPENERTDSVDILYMYRSLEGPREDVPPFVKIL

SEQ ID NO: 19406 - protein, 629 aa, Oryza sativa
  unsure (1)..(629): unsure at all Xaa locations
HTTPAPRWMSLTHTHLPPPPPXLRRGASPLHSTPRRPPTNHASAAAXASPPPDQVLDNVLETVLQFLDSARDRCAASLVCRSWSRAESATRASVAVRNLLAASPARVARRFPAARRVLLKGRPRFADFNLLPPGWAGADFRPWAAAVAAAAFPALASLFLKRITVTDDDLDLVSRSLPASFRDLSLLLCDGFSSAGLASIASHCRGLRVLDVVDCEMNDDEVDWVAAFPPGTTDLESLSFECYVRPVSFAALEALVARSPRLTRLGVNEHVSLGQLRRLMANTPRLTHLGTGAFRPGDGPEDVGLDIEQMASAFASAGRTNTLVSLSGFREFEPEYLPTIAAVSGNLTNLDFSYCPVTPDQFLPFIGQCHNLERLYVLDSVRDEGLQATARTCKKLQVLHVLPLNALEDADELVSEVGLTAIAEGCRGLRSTLYFCQSMTNAAVIAISQNCVDLKVFRLCIMGRHQPDHVTGEPMDEGFGAIVRNCSKLTRLSTSGHLTDRAFEYIGKYAKSLRTLSVAFAGDSNLALQHILQWCSKLEKLEXIRDSPFGDAGLLSGMHHFYNMRFLWMSGCNLTLQGCKEVARRLPRLVVELINSQPENERTDSVDILYMYRSLEGPREDVPPFVKIL

SEQ ID NO: 19407 - protein, 581 aa, Oryza sativa
  unsure (1)..(581): unsure at all Xaa locations
XCPRRTTTSRPAAGAEAAARXSPPPDQVLDNVLETVLQFLDSARDRCAASLVCRSWSRAESATRASVAVRNLLAASPARVARRFPAARRVLLKGRPRFADFNLLPPGWAGADFRPWAAAVAAAAFPALASLFLKRITVTDDDLDLVSRSLPASFRDLSLLLCDGFSSAGLASIASHCRGLRVLDVVDCEMNDDEVDWVAAFPPGTTDLESLSFECYVRPVSFAALEALVARSPRLTRLGVNEHVSLGQLRRLMANTPRLTHLGTGAFRPGDGPEDVGLDIEQMASAFASAGRTNTLVSLSGFREFEPEYLPTIAAVSGNLTNLDFSYCPVLDSVRDEGLQATARTCKKLQVLHVLPLNALEDADELVSEVGLTAIAEGCRGLRSTLYFCQSMTNAAVIAISQNCVDLKVFRLCIMGRHQPDHVTGEPMDEGFGAIVRNCSKLTRLSTSGHLTDRAFEYIGKYAKSLRTLSVAFAGDSNLALQHILQGCSKLEKLEIRDCPFGDAGLLSGMHHFYNMRFLWMSGCNLTLQGCKEVARRLPRLVVELINSQPENERTDSVDILYMYRSLEGPREDVPPFVKIL

SEQ ID NO: 19408 - protein, 518 aa, Triticum aestivum
  unsure (1)..(518): unsure at all Xaa locations
XPAWGAEAAPWVAAAADGWPLLEELSFKRMVVTDECLDMIASSFRNFQVLRLVSCEGFSTAGLAAITEGCRNLRELDLQENYIEDCSSHWLSYFPESFTSLETLNFSCLEGEVNFAVLERLVSRCRNLKTLKLNNAIPLDKVASLLRKAPQLVELGTGKFSAEYHSDLFAKLEAAFAGCKSLRRLSGAWDAVPDYLPAFYCVCEGLTSLNLSYATVRGPELIKFISRCKNLQQLWVMDLIEDHGLAVVAGSCSKLQELRVFPSDPFXXAGQVLLTERGLVDVSASCPMLESVLYFCGQMTNEALITIAKNRPNFXTCFRLCIXLEPRTPSYVTRQSLDAGFSAIVESCKGLRRLSVSGLLTDLVFKSIGANGNCLEMLSIAFAGNSDLGLHYILSGCKSLKKLEIRDCPFGNKPLLANAAKLETMRSLWMSSCSLTLGACRQLAEKMPRLTVEIMNDPGRTCPVESLPDDSPVETLYVYRTIAGPRSDTPDYVQIVXGYSGVFIFNLDWIGTFNTFLA

SEQ ID NO: 19409 - protein, 204 aa, Triticum aestivum
  unsure (1)..(204): unsure at all Xaa locations
XGLXXVAMCCKXXLQVLRVLPLDAHEDADELVSEVGLTAISEGCRDLRSILYFCQRMTNAAVISMSHNCPELKVFRLCIMGRHRPDHVTGEPMDEGFGAIVRNCSKLTRLSTSGHLTDRAFEYIGNYGSSLRTLSVAFAGDSDLALQHILQGCSKLEKLEIRDCPFGDAGLLSGMHHFYNMRFVWMSGCSLTLQGCQEVARQLX

SEQ ID NO: 19410 - protein, 325 aa, Triticum aestivum
  unsure (1)..(325): unsure at all Xaa locations
XFGADSGLYSIIQLCSSLNSLSGFVGTRRWSTPVLHSICQNVTCLNLSYAPMFRTVDLIGTIHQCQNLRHLWVLDHIGDAGLKVVASSCLELQELRIFPANANVLASTGVTEEGLVAVSTGCRKLYSVLNSCSPMTNFALITVSINCSRITSFRLHICLHGSVDAVTGQPLHECFGAIFRSCKGLRRLTMSGLLTDSVFLYIGMYAERLETLSVAFAGDSDDGMIYVLNGCKNLRKLEIRNCPFGNTALLAGTHRYEAMRSLWMSSCDITLGGCRSLAAAMPGLNVEVISQADGGANDAKKVEKLYVYRTLAGPRDDAPGFVSAL

SEQ ID NO: 19411 - protein, 376 aa, Prunus mume
MTFTLGKKEILIDILVRLPAKSLVRFLCTCKSWSDLIGSSSFVRTHLDRNVTKHAHVYLLCLHHPNFECAIDPNDPYIEEEVQWSLFSNETFEQCSKLSHPLGSTEHYVIYGSSNGLVCISDEILNFDSPIHIWNPSARKLKTPPISTNINIKFSCVVLQFGFHPGVNDYKAVRMMRTNKNALAVEVYSLRTNSWKMIEAIPPWLKCTWQHHKGIFFNGVAYHIIEKGPIFSIMSFDSGSEEFEEFIAPDAICSSLGLCIHVYKEQICLLSGFYGSEEEDMDKIDLWVLQEKRWKQLCPFIFPLDHCHRTIGFSADNELLMERRDFIKGITHLCLCNYESKQVLETGIRLAVMKYGDIEFLSAITYIESLVLLNNY

SEQ ID NO: 19412 - protein, 428 aa, Prunus mume
MMREMATLSKFSEDMMGNILSRLPPKSLMRFRCVLKSWHDLIDKPSFVDHHLSISMDNKVTSSTYVLLKHNVLTDPSIKDDEKAVRATLFNPDSNQRDILLSSLNLGSLVDDGLEIENHVVPPPMRGYALSLEISGSCDGLICLNTFNSEDIVLCNPALEEYRVLPKSCILLPPRVPRQFEENEDDDYYEEDDDDEIESNPKCVGFGYDPNSKDYKVVRAAQFVSGVFTQHPSKVEVYSLAADTWREVPVDIQPHGSLNPSYQMYFKGFFYWIAYWTEERNVILSFDMSEEVFHDIALPESGPDAYEYTSIAVWKDSLALLTYPVENEAPKTLDLWVLDEDLKGAKGLWTKHLAIGPLEKGVEAPLVFWKDKELLMVTTNGDVVNYSLDTQKLKHVPRHGLGEPTNIQAVPYVNSIVSIKPGNKIESI

SEQ ID NO: 19413 - protein, 397 aa, Prunus mume
MEVQILARLPPKSLMRFKCVCKSWHALLNNPHFVAKHLHLYNNQPSSTCVLFKRSVLSRTEHNKEELVFTFLILRNDNEINADHNLINCKVEDLHFPRSMGLKSRGQFIELPGLELGESVHIVGHCDGLFCLSLYTGELVFYNPAIKEFRVLPQSCLEDACSCTLGFGYDPKRKDYVLLSIVSYGEEIFDDERLVIHPPQAEIYTLSTNSWREIETHYLETETTYFWGNETFSAYFNGVFYWLGYEEKKEFVSFYDRLEEEKKQVIILFDTFDEVFHNMPLPDCFYEFPSHEMSLTVWNESIALFGFYRCEFEPFEVWVMDEFDGWTKHLSVVPKVDQEVDIPLALWRRNEVLLVDRDGRIFSYNFDTENLKYLPVHGASRGDFQAVVCVNSIVSVK

SEQ ID NO: 19414 - protein, 428 aa, Prunus mume
MMREMATLSKFSEDMMGNILSRLPPKSLMRFRCVLKSWHDLIDKPSFVDHHLSISMDNKVTSSTYVLLKHNVLTDPSIKDDEKAVRATLFNPDSNQRDILLSSLNLGSLVDDGLEIENHIVPPPMRGYALSLEISGSCDGLICLNTFNSEDIVLCNPALEEYRVLPKSCILLPPRVPRQFEENEDDDYYEEDDDDEIESNPKCVGFGYDPNSKDYKVVRAAQFVSGVFTQHPSKVEVYSLAADTWREVPVDIQPHGSLNPSYQMYFKGFFYWIAYWTEERNVILSFDMSEEVFHDIALPESGPDAYEYTSIAVWKDSLVLLTYPVENEAPKTLDLWVFDEDLKGAKGLWTKHLAIGPLEKGVEAPLVFWKDEELLMVTTNGDVVNYSLDTQKLKHVPRHGLGEPTNIQAVPYVNSIVSIKPGNKIESI

SEQ ID NO: 19415 - protein, 377 aa, Prunus mume
MTFSLRKKEILIDILVRLPAKSLVRFLCTCKSWGDLIGSSSFVSIHLNRNVTKHAHVYLLCLHHPNFERQVDPDDPYVEQKFHWSIFSNETFEECSKLSHPLGSTERYGIYGSSNGLVCISDEILNFDSPIHIWNPSVRKLRTPPMSANINVKFSHVALQFGFHPGLNDYKVVRMMRTNKNALAVEVYSLRTDSWKMIETIPPWLKCTWQHHKGTFFNGVAYHIIEKGPLFSIMSFDSGSEEFEEFLAPDAICNSWGLCIDVYKEQICLLFTFYDCEEEDMEKSDFWVLQEKRWKQLSPFIYPSNCYSTMGISIDNELLMQRRDHIKGGADLYLCNYESKQVLETGLRLGTVTYGEIEFLFSVTYIETLVLLNSLQY

SEQ ID NO: 19416 - protein, 374 aa, Prunus mume
MAFTLRKKEIVIDILVRLPVKSLVRFLCTCKSWSDLIGSSSFVSTHLHRNVTKHAHVYLLCLNHPNVEYLDDRDDPYVKQEFQWSIFPNEIFEECSKLTHPLRSTEDYMIYGSSNGLVCVSDEILNFDSPILIWNPSVKKFRTPPMSININIKFSYVALQFGFHPGVNDYKAVRMMRTNKNALAIEVYSLGTDSWKMIEAIPPWLKCTWQHLKGTFFNGVAYHVIQKGPIFSIISFDSGSEEFEEFIAPDAISTPWGLCIDVYREQICLLFDCYPFGEEGMEKIDLWVLQEKMWKQLRPFIYPEDYCYGIIGINVDNELLMGRRDLAKGVADLYLCNYESKQVIETGIKLGLMSYGEIEFLFSITYIESLVLLN

SEQ ID NO: 19417 - protein, 409 aa, Prunus mume
MWEEMALRPILPRLPSKSLMRFKCVRKSWYSLINNPTFVENHLSNSMHSKLCTCVLFSRFVQRDTNSDGKELAFSFLYLRNDYDDDEHNVNFVVEDIKFPLSSGRFIGLEDVESPSILGHCNGIVCISPCSDNLVLCNPAIKEIKLLPKSGLPDWWGCAVGFGYDPKSKDYKVCRIASYQAEIDGLIPPPRVEIYTLSTDSWREIKNNSLETDTTCFFPDYFQMYFQGICYWVGYEQPKQSVEYEDEEQKPIVIFFDTGDEIFHNLLFPDSFYKYEEGSSYAYEMSYLMYCDLRIILWNGSIALFGFNRFSIFPDSYGVWVLDDFDGAKGSWTKHLTFEPLMGIKRVLEFWRSDEILMVTEDGDIVSYNLATEKLKNLPMNSLSDFETIVYVNSLVSITRGNKLESVDI

SEQ ID NO: 19418 - protein, 399 aa, Prunus mume
MWEEMALRHILPRLPSKSLMRFKCVRKSWYTVINNPTFVENHLSNSMHNKLSTCILVSRFVQSDTNSDEKELAFSFLHLRNDYDDAEHNLNFVVEDIKFPLSSGRFIGLEDVESPSILGHCNGIVCLSPCSDNLVLCNPAIKEIKLLPKSGLPDWWGCAVGFGYDPKSKDYKVSRIASYQAEIDGLIPPPRVEIYTLSTDSWREINNNSLETDSTCFFPDYFQIYFQGICYWVGYEQPKQSVEYEDEEQKPMVIFFDTGDEIFHNLLFPDSFYMYEEGSSYAYEMSYLMYCDLRIILWDGSIALFGFNRFSVCPDSYGVWVLDDFDGAKGSWTKHLNFEPLMGIKRVLEFWRSDEILMVTEDGDIVSFNLAIEKLKNLPMKIPSDFETIVYVNSLLPIT

SEQ ID NO: 19419 - protein, 408 aa, Arabidopsis thaliana
MATIPMDIVNDIFLRLPAKTLVRCRALSKPCYHLINDPDFIESHLHRVLQTGDHLMILLRGALRLYSVDLDSLDSVSDVEHPMKRGGPTEVFGSSNGLIGLSNSPTDLAVFNPSTRQIHRLPPSSIDLPDGSSTRGYVFYGLGYDSVSDDYKVVRMVQFKIDSEDELGCSFPYEVKVFSLKKNSWKRIESVASSIQLLFYFYYHLLYRRGYGVLAGNSLHWVLPRRPGLIAFNLIVRFDLALEEFEIVRFPEAVANGNVDIQMDIGVLDGCLCLMCNYDQSYVDVWMMKEYNVRDSWTKVFTVQKPKSVKSFSYMRPLVYSKDKKKVLLELNNTKLVWFDLESKKMSTLRIKDCPSSYSAELVVSSLVLGCKGDLNNIKYRKEQQAKEAREAKIMQNTKRRCDFFVLL

SEQ ID NO: 19420 - protein, 394 aa, Arabidopsis thaliana
MAECPTDLINEMFLRLRATTLVKCRVLSKPCFSLIDSPEFVSSHLRRRLETGEHLMILLRGPRLLRTVELDSPENVSDIPHPLQAGGFTEVFGSFNGVIGLCNSPVDLAIFNPSTRKIHRLPIEPIDFPERDITREYVFYGLGYDSVGDDFKVVRIVQCKLKEGKKKFPCPVEVKVFSLKKNSWKRVCLMFEFQILWISYYYHLLPRRGYGVVVNNHLHWILPRRQGVIAFNAIIKYDLASDDIGVLSFPQELYIEDNMDIGVLDGCVCLMCYDEYSHVDVWVLKEYEDYKSWTKLYRVPKPESVESVEFIRPLICSKDRSKILLEINNAANLMWFDLESQSLTTAGIECDSSFTADILVSSLVLGCKGDPTQAQRSKDQKMMPKSTKRWYALL

SEQ ID NO: 19421 - protein, 417 aa, Arabidopsis thaliana
MASEKSFKKRKITDDVDGVGVGGGLESLPEDIIADIFSRLPISSIARLMFVCRSWRSVLTQHGRLSSSSSSPTKPCLLLHCDSPIRNGLHFLDLSEEEKRIKTKKFTLRFASSMPEFDVVGSCNGLLCLSDSLYNDSLYLYNPFTTNSLELPECSNKYHDQELVFGFGFHEMTKEYKVLKIVYFRGSSSNNNGIYRGRGRIQYKQSEVQILTLSSKTTDQSLSWRSLGKAPYKFVKRSSEALVNGRLHFVTRPRRHVPDRKFVSFDLEDEEFKEIPKPDCGGLNRTNHRLVNLKGCLCAVVYGNYGKLDIWVMKTYGVKESWGKEYSIGTYLPKGLKQNLDRPMWIWKNAENGKVVRVLCLLENGEILLEYKSRVLVAYDPKLGKFKDLLFHGLPNWFHTVVHAGTLSWFDTPLDLW

SEQ ID NO: 19422 - protein, 377 aa, Prunus dulcis
MTFTLRKKETLIDILVRLPAKSLVRFLCTCKSWMDLIGSSSFVSTHLHRNVTKHAHVSLLCLHHQSFECQVDPDDPYVGQELQWSLFCDETFVLCSKLSHPLGSTEQYYGIYGSSNGLVCISDEILNFDSPIYIWNPSVRKLRTPPLSTNINIKFSHVALQFGFHPGVNDYKTVRMMRTNKSALAVEVYSLRTDCWKMIEAIPPWLKCTWRHHKGTFLNGVAYHIIEKGPIFSIMSFNAGTEEFQEFIAPDAVCSLWELRIDVYKENICLLLDLYPSEEDGMEKIDLWVLQEKRWKQLCPFIYPSDHYYRTIGMSMDNKLLMPRRDYTSGIADLHLCDYESKQVLETGIKLAVMKYGEIEFLFSISYIESLVLLNNY

SEQ ID NO: 19423 - protein, 374 aa, Prunus dulcis
MTFKLGKKEILIDILARLTAKSLVRFLCTCKSWSDLIGRSSFVSTHINRNVTKHAHVYLLCLHHPTFERQNDNDDPFVEEELLWSLFSNETFEQFSKLSNPLGSTEHYGIYGSSNGLVCISDEILNYDSPIHIWNPSVRKFRTPPISPNNIKFVYVALQFGFHSGVNDYKAVRMMRSNKDTFAVEVYSLRTDSWKMIETIPPWLKCTWQHHTGTFFNGAAYHIIEKGPLFSIMSFDSGSEEFEEFIAPDAICNSRGLCIDAYKDQICLLFRFYGCEEEGMRKVDLWVLQEKRWKQLCPFIIPWKYCRTIGTSIDNELLLQKKDFNKGAADLCLCNYESKQVLETGIKLAIMTYGEIDFLFSFTYIESLVLLNNY

SEQ ID NO: 19424 - protein, 380 aa, Prunus dulcis
MTFTPRKKEILIDILVRLPAKSLVRFLFTCKVWSDLISSSSFVSTHLNRNVTKHAHVYFLCFHHPNFECLVDPDDPCFEQELQWSLFSYETFEQCSELSHPLGSPEPYRIYGSTNGLICISDAILSLESPIHIWNPSVRKLRTLPMTTNNIEFSYIDLHFGFHPGVNDYKAVRMMGIDKDAFAVEIYSLSTDSWKRIEVIPPWLKCDWQHYKGIFLNGVVYHLIEKGPTFSLMSFDSGNAEFEEFITPGAICRSRGLFIAVYKEQICLLFDFYCCEEEGMEKIDFWVLEEKQWTQLAPFVYPSDSYKIIGISIDNELLLRKHDFSSVGLADLYLCNYESKQVRQAGIKLAVMEYGHHELFFATTYIESLLFLNKSLKRDV

SEQ ID NO: 19425 - protein, 376 aa, Prunus dulcis
MTFALRKKEILIDILVRLPAKSLVRFLCTCKSWSDLIGSSSFVGTHLHRNVTGHAQAYLLCLHHPNFECQRDDDDPYFKEELQWSLFSNVTFEESSKLSHPLGSTEHYVIYGSSNGLVCISDEIMNFDSPIHIWNPSVKKLRTTPISTSINIKFSHVALQFGFHSGVNDYRAVRMLRTNQNALAVEIYSLRTDSWTMIEAIPPWLKCTWQHHQGTFFNGVAYHIIEKGPTFSVISFDSGSEEFEEFIAPDAICSLWRLCIHVYKEQICLLFGYYSCEEEGMENIDLWVLQEKRWKQLCPFIYDPLDDFYQIIGISTDNKLIMARKDFSKGGVELQLGNYESKQVLETGIKLAIMRYGESEFLFAMTYVESLALLNN

SEQ ID NO: 19426 - protein, 409 aa, Prunus dulcis
MWEEMALRHILPRLPSKSLMRFKCVRKSWYTLINNPTFVENHLSNSMQSKLSTCVLFSRFVQSDANSDEKELAFSLLYLRNDYDDDEHNVNFVVEDIKFPLSSGRFIGLEDVESPSILGHCNGIVCLSPCSDNLVLCNPAIKEIKLLPKSGLPDWWGCAVGFGYDPKSKDYKVSRIASYQAEIDGLIPPPRVEIYTLSTDSWREINNNSLETDSTCFFPDYFQMYFQGICYWVGYEQPKQSVEYEDEEQKPMVIFFDTGDEIFHNLLFPDSFYMYEEGSSYAYEMSYLMYCDLRIILWNGSIALFGFNRFSVFPDSYGVWVLDDFDGAKGSWTKHLTFEPLMGIKRVLEFWKSDEILMVTIDGDIVSYNLDTEKLKNLPMNIPSDFETIVHVNSLVSITGGNKLESVDI

SEQ ID NO: 19427 - protein, 409 aa, Prunus dulcis
MWEEMALRHILPRLPSKSLMRFKCVRKSWYTLINNPTFVENHLSNSMQSKLSTCVLFSRFVQSDANSDEKELAFSFIYLRNDYDDDEHNLNFVVEDIKFPLSSGQFIGLEDVESPSILGHCNGIVCLSPCSDNLVLCNPAIKEIKLLPKSGLPDWWGCAVGFGYDPKSKDYKVSRIASYQVEIDGLIPPPRVEIYSLSTDSWREIKNNSLETDTTCFFPDYFQMYFQGICYWVGYEQPKQSVEYEDEEQKPMVIFFDTGDEIFNHILFPDSFYMYEEGSSYAYEMSYLMYCDLRIILWNGSIALFGFNRFSVFPDSYGVWVLDDFDGAKGSWTKHLTFEPLMGIKRVLEFWRSDEILMVTEDGDIVSYNLATQKLENLPMNSLSDFETIVYVNSLVSITRGNKLESVDI

SEQ ID NO: 19428 - protein, 325 aa, Prunus dulcis
DDEHNLNFVVEDIKFPLSSGQFIGLEDVESPSILGHCNGIVCLSPCSDNLVLCNPAIKEIKLLPKSGLPDWWGCAVGFGYDPKSKDYKVSRIASYQVEIDGLIPPPRVEIYSLSTDSWREIKNNSLETDTTCFFPDYFQMYFQGICYWVGYEQPKQSVEYEDEEQKPMVIFFDTGDEIFNHILFPDSFYMYEEGSSYAYEMSYLMYCDLRIILWNGSIALFGFNRFSVFPDSYGVWVLDDFDGAKGSWTKHLTFEPLMGIKRVLEFWRSDEILMVTEDGDIVSYNLATQKLENLPMNSLSDFETIVYVNSLVSITRGNKLESVDI

SEQ ID NO: 19429 - protein, 449 aa, Oryza sativa (japonica cultivar-group)
MDNAAAPPSSGAAGKEMATAGALPDDLLDEILLRMPARSILRCRAVCKAWRSRTSHPYFLRAHAARSRIIAAAVVDTTAIPDGEFRTTISIRPLGDGDGDRSGAAVSSSSSFASVRFGSRPFVLGSWDGVVCLVPAGVVRPLSRIDRYVLVNPLTKACTSVPPPATRGIVICGYAHPTTSRYHLLHADDAYPYNHMAAATIRILRVGEKNNVWRKIARHPAPACVESRTYIRFGGAPPVSLHGCLHWLVAPLSAASARPLLSVFDMEREEFRQMDAPEQWARHGNLPHMMGVQIARLSGKLCAFVNEPSASALGMWTLEDYSDPSSWRMERSIDYSRHGAGSRNIARTFRNRFSAATTAVEVLPDGVSGNGDVGGGGEEEIMFLFNQFDTREAVYNVGRAAWRWRRILPPPTRRVMAHKECMLPREVSFGGAAHFVEESDIGGHRCICI

SEQ ID NO: 19430 - protein, 852 aa, Oryza sativa
  unsure (1)..(852): unsure at all Xaa locations
MNREETFSAAVESLIMSRDQYNYSRRITTLFSEVFTYHRRNLAPDVGLHRLSISGEGSCFGTATATRGFLHRAQSVPGEFDIVGMMAKRCTDILLAPRPRKTKRIDINSCRSRFLLPYIPDEVMFDVLLRLPSKSLMRFKSVCKAWHAMISSPIFINAHLEWSKLKPSSLLMAPGFYQKQKNGQNIAFLMGLYKYQGGNNNVVHLHDFPRDFPQVLDTWTRPVHCDGLLLVSNMSKKMIIYNPSTREIVSLPKGSRNLHKGTGIGFGFDPRSSKYKVARVFYQRDDKTSMLVCKFEVLTLGTINVWRQTEDPPYPIGKSTPVHVKGAIYWITSLCPDPPNTLVRFCLTDEKFSLFPCPMXNVKPSCLTGLGDELYCGYFFSQPLQLEIWXXCNVCGQKPEWTRRCALQIPPDVIKRPVASPLVVFHGKMLLLALKKVYKYDIQACKLEKIPLVVEDFMCYDRENNMYQTYSKKELRYILQRNNYLLLLLLKLRKVLTKKCATVLLLFQTMIFQRMRTLQTSSLEERLNQARSSKLLILGTICVCIDIGVYVLAKCAAREVGTKVPRPRLFGHMRARHRYDEARHEATTDCLKASHNGGFTGVSCTFNRGHPPPSRAMRQKGVGVHIKQGPPEGPMQDQGYRLLYVEELVLQQLVRQVGMNMFELAFSHPPLSPKGQRDAMVGGHRHVDYEGEARDKEAASEPFSVAQTPSCLSHSSSRRVVCPRQTNHHHHLIARAVTVLSLAKGLGSAQLARRRPLPSSQVKGHNAFRCSATSTLILPHWGVLLAAKALLRHPPHRAGSGTPGGPMDQGCGQPSGCHSLPNCCAEPLLRLHVDVPCGAESCTVAHSIKINL

SEQ ID NO: 19431 - protein, 287 aa, Oryza sativa
  unsure (1)..(287): unsure at all Xaa locations
MRRSADICXAGKDGGLLLSLGQGSCPLXIPDDVIFDILLRLPSKSLIRFKSVCKAWHAIISNPCFISAHLECSKQKPSIFMVPGVYEKQNNGENTSFLMGLYQYQGGNIMEQIHVQXTFHKALVXWSRPIHCNGMLLISTMNHEMIVCNPSTREIVSLPKGSYNLHAGPRAGFGFDPHSNKYKVARFFYQRDDDTSVEVLTLGTNLWRQTEDPPYPIXXGLTPVHVKGAIYWITPLCPDPPNAFLRFCLTNEKFSLLQYPPCNLKPIXVHRSGGXTMLCLLLQSGER

SEQ ID NO: 19432 - protein, 353 aa, Oryza sativa
  unsure (1)..(353): unsure at all Xaa locations
ADSGSWGRAARGKPAGVGGFGGAGEVASDRYIPDDVMFNILSWLPSKSLIRFKSVCKAWHAMISSPCFTDAHLECSKRNPSILMVPGAYEKQEDGENIAFMMVLYKYHGGKTMELVHXAELSARHWXVWTRPVHCNGLLLIPTMNLEMMICNPSTRQIVFLPKVSGNICTGTRAGFGFDPHSNKYKVARSFYQRDSETQVEVLTLGTNAWRQTEDPPYPIDAXNSSPCEXGAIYWIVCSSLCPDLLRFCLTDEKFSLFPCPPXXNVKSVRFTEVEGELCCACFFSETLALEIWNCSGGQNLXXWTRRYVIQIPPDVVMKYPVERPPLIVFREKMLLLXHSKRSTAVLTMKRNX

SEQ ID NO: 19433 - protein, 412 aa, Oryza sativa
  unsure (1)..(412): unsure at all Xaa locations
MMRDSKRTRSAPPREPLEMTEDMTPRSKRRKXXVPFGEGAVLPEEMLTEVFLRLPIKSILRFRAACHSRYAMLSSQEFCQLYITRTEAMPPQPKLLFISPTANFNSTAGTRARHRSPLMTYCSHSMMCVETMWXVAPSPCHGLTLLYNAVAPAYYVFNATTRAITRLPPYHVIHATAGVGFDARTKEFKVVRLFRGKSHEIHSVXVXDIHSWGXGRGSLEAYRWWSTFQVLXSFALSAIRNAVANKLQPVFVNGFLHWLINPSFLLKAPRAAIISFSLTDETFRWIRSPPFXGIQSAXLAELDDQLCMVRDLRNGLPTGSMFEIWRLNDYNSGDWSLDYRIGLXXGNLPRDLLEPRIVKVIGSFGSYRSSKKIIIATSKHKVCAYDPVSRTLETIVSIDQHGDLQCLSKREI

SEQ ID NO: 19434 - protein, 415 aa, Oryza sativa
  unsure (1)..(415): unsure at all Xaa locations
MMQQDSKRKRSVLPETATLAPGSKRRRRKSVPSXSCXXAMLPDELLTEVCLRLPVKSILRFRAACRSWDAMLSSEEFGQLYAARAEAKLLFVSPTANFNSTAVYKCSPSKPTDDLLLTLDDVPETMWSAPCHGLSLLYDGIAPAYYVMNATTRAVTRLPPFRDVAFATAGLGCDARTKKYKVVRLFEGNLLEKEFLKCEIYTLGGDEGDIWRPAAGGVPFRFYSFARSAISNELQPLFFNGYLHWVDQPNHVKLPRASILSFSLTDETFRWIRSPPFXXASGVHLVELDGNLCMVRDLRDRSTAVCKLEIWKLKDYNSGDWSLDHRIDLXXGQLPRDYLSHRXVKVSGSSGSCRSGTKSIIATSKHKVCSYDPVSRTLETITSISETCTSYQNEKSDIRFSLFKECLTATASVLX

SEQ ID NO: 19435 - protein, 449 aa, Oryza sativa; identical to SEQ ID NO: 19429

SEQ ID NO: 19436 - protein, 413 aa, Triticum aestivum
FLRRVVLLAVVICKLAMEDNNDEHNVSLPQDIQHTILASLPARVVLKFRTVCRFWRDCIQEPNFVDRHLNNALRSHQSIACFTSVDEGLVCMYTFDPTTLNCKSMDLVLSSRFQMSDPCHGLVCAYDLEGAVEVLNPTRRIHLRLPVSELQSLASEYFLGPVPSTKEYKVLCIHHRVRFLTFEVCTVGTQSWRAVRESAGLLKTTKAVIVNDVMHWLLLDEISSNFTRNILSFNLTDEMFSETAVPDAVKDRELHLFEGGGKLHLLAMPGEGSAPKTSEIWVANSTCAVWDHMCNIAFVLPLGMRPLFLHNNKLFYCNQRRFYYVDLQDGSGSYLNMPFGECIISAGIFVESLVLHSVTGLVDSRTTLQSPHDARSFPIGRGPSARGAGSSSAGPRRSFKKAKSNINMQWRLA

SEQ ID NO: 19437 - protein, 468 aa, Zea mays
IFFFSLVATPGRPSLPPTVPRSSCPPFAGAEHEKNCSCILSMDCNSDDLDKQNEVTGSRVFIPQDAQGVILAFLPGRDVVKLRSVCKFWLECVEEHSFMDRHLNNACRYHQSIACFTSLDHGLVHMYTFDPATMNFRSVELVFSSRFNMSAPCNGLVCAYDIKGDAEVLNPTTRKHLRLPDSALKSRSLYSEYFVGFVHSTKQYKVVSIRHHVRFLTFEICTIGAPSWRTIHESAELLVATKAVIVKDGMYWLLLDEASSYSSREILTLNLTDERFSKIAIPDAVKSHKLELFEGEGKLRLLSTHSDGSSNIVSDIWVADLAREDWVHLQTIIPLTHLGISPFFQLKTKVFFGNQKRLLCVDLQDGTVSYINMPSGETLISCGMFVESFAPAATGLVSSTASYGDRSRLAEPSMADPGPSFRGAGSSSASRGRSSGLTGWSSADLEQSFKRTKRTTNMQWKISKHRAI

SEQ ID NO: 19438 - protein, 405 aa, Zea mays
  unsure (1)..(405): unsure at all Xaa locations
XQRTYPQIPNFFCSANWLRLAGAASRRGAPTMMADEAERVPPWQQGGXGSDDENIIYDILLRLPPKSVVRCRAVCKSWLRLASDHIFLVDHHRCQPSLPLLYFIXSTTSATRISANCPRILQPRQLVDAPWPXERRLALHGSCDGVLLLSSDDSLYLYNPTTRHWGCLPPLHSDNTIAGFYWHRISDDYRVLYFRRHEDGKYCYYVMEAGTKRQRLVSRQVSLIHSSWPTKCARRTPPVLLHGNLHWPXLSHQGPXTIAVFDTVAEVLRFMLSPAVYGTACLTQMXSCLTWMGDDGPSRVDLWFLEDYNDRVWVCKYRIELPVEDISRFHEFEDVWNAVVVSHEGDVLVDLWNRLLGYDREGNSVANLLCDCSLMEIGPHMLKRSLVPHALLGMNNHSPNKPPFL

SEQ ID NO: 19439 - protein, 376 aa, Antirrhinum hispanicum
MMDRRFPRQDVTSEILLFSSVKSLLRFRLVSKSWCSLIKSNDFIDNHLLRRQTNGNVMVVKRYVRTPERDMFSFYNINSPELDELLPDLPNPYFKNIKFDYDYFYLPQRVNLMGPCNGLICLAYGDCVLLSNPALREIKRLPPTPFANPEGHCTDIIGYGFGNTCNDCYKVVLIESVGPEDHHINIYVYYSDTNSWKHIEDDSTPIKYICHFPCNELFFKGAFHWNANSTDIFYADFILTFDIITEVFKEMAYPHCLAQFSNSFLSLMSLNECLAMVRYKEWMEEPELFDIWVMKQYGVRESWTKQYVIGPQVVVCSHVCWKSDECLIVEDGNGQLVSCAFRTNEIKKLPIYAVEETLRVLIVDESLISLNRVLNF

SEQ ID NO: 19440 - protein, 376 aa, Antirrhinum hispanicum
MMDRRFPRQDVISEILLFSSVKSLLRFRCVSKSWCSLIKSNDFIDNHLLRRQTNGNVMVVKRYVRTPERDMFSFYNINSPELDELLPDLPNPYFKNIKFDYDYFYLPQRVNLMGPCNGLICLAYGDCVLLSNPALREIKRLPPTPFANPEGHCTDIIGYGFGNTCNDCYKVVLIESVGPEDHHINIYVYYSDTNSWKHIEDDSTPIKYICHFPCNELFFKGAFHWNANSTDIFYADFILTFDIITEVFKEMAYPHCLAQFSNSFLSLMSLNECLAMVRYKEWMEDPELFDIWVMNQYGVRESWTKQYVIGPQVVVCSHVCWKNDECLIVEDGNGQLVSCAFRTNKIEKLPIYAVEETLRVLIVDESLISLNRVLNL

SEQ ID NO: 19441 - protein, 518 aa, Arabidopsis thaliana
MGQSTSAAGNSILNRRRSKSFTLKFPIESIESEISQPDYTSSLPDECLALVFQFLNSGNRKRCALVCRRWMIVEGQNRYRLSLHARSDLITSIPSLFSRFDSVTKLSLKCDRRSVSIGDEALVKISLRCRNLKRLKLRACRELTDVGMAAFAENCKDLKIFSCGSCDFGAKGVKAVLDHCSNLEELSIKRLRGFTDIAPEMIGPGVAASSLKSICLKELYNGQCFGPVIVGAKNLKSLKLFRCSGDWDLLLQEMSGKDHGVVEIHLERMQVSDVALSAISYCSSLESLHLVKTPECTNFGLAAIAEKCKRLRKLHIDGWKANLIGDEGLVAVAKFCSQLQELVLIGVNPTTLSLGMLAAKCLNLERLALCGCDTFGDPELSCIAAKCPALRKLCIKNCPISDVGIENLANGCPGLTKVKIKKCKGVLGGCADWLRTVRPMLSVNADTMEQEHEEAASNDVVGGSQENGIEFPQLNSQIMASSIASSSRNRSGYFKSGIGLFSGMSLVPCTSRQRRASR

SEQ ID NO: 19442 - protein, 554 aa, Arabidopsis thaliana
MNIYIFSKEKKRKKVVCDNLSKTRGSRREHCEPHRRRMGQSTSKFRRSKTTFTSPVLPNLREQNSGADEPYDYISNLPDECLSLIFQSLTCADLKRCSLVCRRWLTIEGQCRHRLSLKAQSDLISVIPSLFTRFDSVTKLVLRSDRRSLGICDNAFVMISVRCRNLTRLKLRGCPEISDLGIIGFTENCRSLKKVSFGSCGFGVKGMNALLNTCLGLEELSVKRLRGIGAGAELIGPGGAAGSLKVICLKELHNGQCFAPLLSGAKGLRILKIFRCSGDWDRVFEAVRDKVNAIVEIHLERIQMSDLGLTALSKCSGVEVLHLVKTPDCTNVGLALVAERCKLLRKLHIDGWKTNRIGDEGLIVVAKYCWNLQELVLIGVNPTKLSLEAIVSNCLNLERLALCGSDTVGDTELCCIAEKCLALRKLCIKNCPITDDGIKALGNGCPNLLKVKVKKCRGVTTQGADLLRKRRALLVVNLDAPETPIVEGSVGEGGAQENAVEFPPSRLQIPTIGLASGSTSRSSSFKLRLGFLSQRNFVSCALRRLGSRSRSRNE

SEQ ID NO: 19443 - protein, 550 aa, Nicotiana tabacum
MGQYSSTHCGGGPKLRHRNLHPSPLPNHHRSTSESDFFSLMNSDEDESILPSDFENPDYTYELPDECLALIFQCLSSGDRKKCSLVWRRWLLVEGQSRHRLSLNAKAEFLPHIPTIFSRFDSGTKLALRCDRKSVSINDEALTLISLRCVNLTRLKLRGCRDVTDVGMSAFAKNCKSLKKFSCGSCMFGAKGMNALLDHCSTLEELSVKRLRGINDGFAADPIGPGAAASSLKSICLKELYNGQCFEPLIIGSKNLRTLKLLRCLGDWDRLFETIGSRENHVAEIHLERLQVSDTGLNAISNCPNLEILHLVKTPECTDAGVVAVARKCKLLRKLHIDGWRTNRIGDEGLVAIAENSLNLKELVLIGLNPTSPSLLAIASNCQKLERLALCGSDTIGDPEVSCIATKCMALKKLCIKGCEVTDEGFESFAWGCPNLVKIKVKKCKHVTGDVADWLRARRRSLAVNLDVGEVDVEPVDGSASDGGALEDAVEFQPIANTLPVIGAADIPSTSNVGRSAAAKSWFGFFGGRGLVACTLRRLSNGNGDSNESL

SEQ ID NO: 19444 - protein, 462 aa, Oryza sativa
  unsure (1)..(462): unsure at all Xaa locations
XLLGSADRKRCSLVCRRWLSVDAASRLRLALDARAPLHAALPGILARFPAVSKLALKCDRRAESVADPTLALLADRLAALRRLKLRSIRLVTDDGVAALAAAATNLRKLSVGSCTFGAKGIEAVLRSCLHLEELSIKRLRGLAQSEPVAVSSLCLHSLCLKELYNGQCFSSLITNSPNLKTLKIIRCSGDWDPVLQDLPQDAMLAELHLEKLQVSDRGVSALSGLEVLYLAKAPEVTDVGLGKLATRSPRLRKLHVDGWKANRIGDRGLAAVAQKCAALQELVLIGVNLTSASLELIAANCPALERLALCGSDTFGDAEISCVATKCAALRKLCIKACPVSDAGMDKLAQGCPRLVKVKVKKCQGVTPECAERLRASRKALAVNVDTRAGELQDARSVDESGVLENAGSEPDDLDDRIGGPDLSCGSSGRPSGWKARMGAFMSRSLSVSMFRRRPRVSCYES

SEQ ID NO: 19445 - protein, 497 aa, Oryza sativa
  unsure (1)..(497): unsure at all Xaa locations
PFLSSSSSSSSHGAAQGAADDAGGGGGRAAHRRRRRKVRGAAXXERDHTQDLPDEILSLVFAWVTPTDRNACSLTCARWKEVDASTRHRLSLDARAALGYAAQGIFARFTAVSKLALRCARGSVSDDGARQVAAALPSARLARLKLRGLRQLSDDGLASLAGATPVIRKLSVASCSFGPKAFVAVLRSCPLLEDLSVKRLRGLPDTAGATTAITEAASSLRSVCLKDLYSALCFVPLVASSPNLRSLKILRCSGSWDLPLEVIAARVPGLVELHLEKLQVGDRGLSAVSACANLEVLFLVKTPECTDAGIISVAEKCHKLRKLHIDGWRTNRIGDHGLMAVARGCPDLQELVLIGVNPTVQSLRMLGEHCRSLERLALCGCETVGDPEIICLAERCAALKKLCIKGCPVSDRGMWALNGGCPSLVKVKLKRCRGVSYECIENLKVVRGGSFSISLDIVLERDAGGAIENGGQEAGQDEERHVSTQEEVWQSSSSVMX

SEQ ID NO: 19446 - protein, 277 aa, Oryza sativa
  unsure (1)..(277): unsure at all Xaa locations
XARVPGLVELHLEKLQVGDRGLSAVSACANLEVLFLVKTPECTDAGIISVAEKCHKLRKLHIDGWRTNRIGDHGLMAVARGCSDLQELVLMGVTPTVQSLRMLGEHCRSLERLALCGCETVGDPEIICLAERCAALKKLCIKGCPVSDRGMWALNGGCPSLVKVKLKRCRGVSYECIEXTLKVVRGGSFSISWDIVLEREAGGANEXMAGKRLDRCKIQSLLDQMAAMDLPTNARNCTIILKKGFGLAFGRGTPTAQKERKKKKKKKLETSSLPRAE

SEQ ID NO: 19447 - protein, 266 aa, Oryza sativa
  unsure (1)..(266): unsure at all Xaa locations
EVDASTRHRPSLDARAALGYAAQGIFARFTAVSKLALRCARGSGTDSLSDDGARQVAVPSARLARLKLRGLRQLSDDGLASLAGATPFWAQGLRRRPPVGPLLEDLSVKRLRGLPDTAGATTAITEAPASSLRSVCLKDLYSALCFVPLVASSPNLRSLKILRCSGSWALPLEVIAARVPGLVELHLEKLQVGDRGLSAVSACANLEVLFLVKTPECTDAGIISVAEKCHKLRKLHIDXWRTNRIGDHGLMAVARGCPDLQELVLX

SEQ ID NO: 19448 - protein, 172 aa, Oryza sativa
  unsure (1)..(172): unsure at all Xaa locations
XPTDRNACSLTCARWKEVDASTRHRPSLDARAALGYAAQGIFARFTAVSKLALRCARGSVSDDGARQVAAALPSARLARLKLRGLRQLSDDGLASLAGATPVIRKLSVASAGATTAITEEILFPPASSLRSVCLKDLYSALCFVPLVASSPNLRSLKILRCSGSWALPLEVX

SEQ ID NO: 19449 - protein, 222 aa, Oryza sativa
  unsure (1)..(222): unsure at all Xaa locations
XMLGEHCXRSLERXLALCGCETVGDPXXIICLAERCAALKKLCIKGCPVSDRGMWALNGGCPSLVKVKLKRCRGVSYECIENLKVVRXWLIGGGGGVLYMERDAGGAIENGGQEAGQVQITELTDQMAAMDLPTNASNAQSSAQAGSRMRSVMSALRRRFGNPPALXCEIKKIDEPICYFMHSNLIFMFLRLLILLSSSRKIIMMDNSVLPLLFHQQLLPFL

SEQ ID NO: 19450 - protein, 163 aa, Oryza sativa
  unsure (1)..(163): unsure at all Xaa locations
MASPSPPIAAPGIEFTAPPPGRDHTQDCSLTYAQWKEVDASTRHRLPLDARAALGYTAQRIFARFMAITKLTLRYAQGSGTDSLSDEGHAMWSPRCRRLARLKLRGLRQLFDDGIASLAGATPVIRKLSVASISFGPKAFVTVLRSCPLLEDLSVKRLRGLLX

SEQ ID NO: 19451 - protein, 363 aa, Triticum aestivum
  unsure (1)..(363): unsure at all Xaa locations
INLRKLSVGSCTFGAKGIEAVLRSCPQLEELSVKRLRGLADSEPITVSSPRLQSLALKELYNGQCFSCLITRSPNLKTLKIIRCSGDWDPVLQAIPQGALLAELHLEKLQVSDLGVAALXXGLEVLYLAKAPEVTDVGLAALATKSPRLRKLHVDGWKANRIGDRGLATVAQKCAALQELVLLGXVNLTSASLELVAANCPTLERLALCGSDTFGDAEISCXAIKCXSLRKLCIKACPVSDAXXDKLAAGCPRLVKVKVKKXRRVTFEFSERLRASRHGALAVNFDTPGGAGELQDASVDESGLLENAGSDVVQVDDQIGVPDLLCGTSGRPSGWKAWMSALIPRSLSVSMFRRRPRGSSHNS

SEQ ID NO: 19452 - protein, 163 aa, Triticum aestivum
  unsure (1)..(163): unsure at all Xaa locations
XSGAVTATAITEDILFPLAMSLRSVCLKDLYSALCFVPLVSSSPNLRSLKILRCSGAWDLPLEVIAARAPGLVEIHLEKLQVGDRGLTAVSACANLEVLFLVKTPECTDGGIISVAQNCHKLRKLHIDGWRTNRIGDCGLMAVARGCPDLQELVLIGVNPTVX

SEQ ID NO: 19453 - protein, 194 aa, Triticum aestivum
  unsure (1)..(194): unsure at all Xaa locations
XDLQELVLIGVNPTVQSLRMLGEHCRALERLALCGCETVGDTEIICLAERCAALKKLCIKGCPVTDRGMGALNGGCPSLVKVKLKRCRGVSYECVEHLKMARGDSFSISLDIVLEHDAVAPSENGVQETGQQAQVTELTGQMAAMDLPTNAAGAQSFAQANSRMRSVMSARDLATLHQRDVGWKSMNSFAIDRF

SEQ ID NO: 19454 - protein, 517 aa, Zea mays
  unsure (1)..(517): unsure at all Xaa locations
MGHSLSSHSKSTLSSPPRRSRSLSPMSPPPLRLTAPDYTQDLPDEILALVFASLSPTDRNACSLACSRWMEVDATTRHRLSLDARAALGNAAPALFARFTAVTKLALRWARGSVSDYGAAAVATALPSGRLSRLKLRGLRQLSDAGLASLAAAAPAIRKLSVASCTFGPKAFVAVLQSCPLLEDLSVKRLRGLPDTAGATTSIAEAASSLRSVCLKDLYNALCFVPLVASSPNLRSLKILRCSGAWDLPLEVIAARAPGLVELHLEKLQVGDRGLAALSACANLEVLFLVKTPECTDSGIISVAEKCHKLRKLHVDGWRTNRIGDFGLMAVARGCPDLQELVLIGVNPTVLSLRMLGEHCRLLERLALCGCETVGDAEIICLAERWAALKKLCIKGCPVSDRGMEALNGGCPGLVKVKLKRCRGVSYECIENLKVTRGESFSISLDVVLEHDAGSTSXXNGAQENGQEITELAGQMTGMDLLTNAAGTQSSIHTINRMRSVMSAXPAXVWQSSATMM

SEQ ID NO: 19455 - protein, 522 aa, Zea mays
  unsure (1)..(522): unsure at all Xaa locations
MGHSPSSLSKSGPSSPPRRSRSFSPMAPPQQLRLTAPLQDYTQDLPDEILALVFASLSPTDRNACSLTCSRWMEVDATTRHRLSLDARAALGNAATALFSRFTAVTKLALRCARDSVSDHGAAALAAALPSERLARLKLRGLRQLSDAGLASLAAGAPAIRKLSIASCTFGPRAFVAVLQSCPPXLEDLSVKRLPSVADTSGAASSIAEAASSLRSVCVKDLYNALCFVPLVASSPNLRSLKILRCSGAWDLPLEVIAARAPGLVELHLEKLQVGDRGLAALSACANLEVLFLVKTPECTDSGIISVAEKCHKLRKLHVDGWRTNRIGDFGLMAVARGCPDLQELVLIGVNPTVLSLRMLGEHCRLLERLALCGCETVGDAEIICLAERWAALKKLCIKGCPVSDRGMEALNGGCPSLVKVKLKRCRGVSYECIENLKVTRGESFSISLDVVLEHDAGSTSXXNGAQENGQTQITELAGQMTGMDLLTNAAGTQSSIHTINRMRSVMSAXPAXVWQSSATMM

SEQ ID NO: 19456 - protein, 336 aa, Zea mays
  unsure (1)..(336): unsure at all Xaa locations
LEELSVKRLRGLAESEPISVSSPRLQSLSLKDLYNGQCFSCLITQSPNLKTLKIIRCAGNWDIVLQDVPRDSLLAELHLEKLQVSDWGVAALXXGLEVLYLAKAPEVTDIGLAELAAKSPRLRKLHVDGWKANRIGDRGLAAVAQKCXSLQELVLIGVNLTSLSLELIATNCPTLERLALCGSDTFGDAEMSCVASKCSALRKLCIKACPVSDAGMNKLAEGCPRLVKVKVKKCRRVTSECAEHLRASRKALAVNFDTPGGAGELQDGRSVDGGALDNGDVLPEDLDDRIGPDLSSGSSGRPSRWKALMGALMLRSFSVSIFQRQPRGACSTSHES

SEQ ID NO: 19457 - protein, 333 aa, Zea mays
  unsure (1)..(333): unsure at all Xaa locations
XLSADLIRVIIDTAGATTSIGEATSSLRSVCLKDLYSALCFVPLVASSPELRSLKILRCSGAWDLPLEVITARAPGLVELHLEKLQVGDRGLAALSACANLEVLFLVKTPECTDSGIISVAEKCHRLRKLHVDGWRTNRIGDFGLMAVARGCPNLQELVLIGVNPTVLSLRMLGEHCRTLERLALCGCETVGDAEIICLAERWAALKKLCIKGCPVSDRGMEALNGGCPSLVKVKLKRCRGVSYECIENLKVTRGGSFSISLDIVLEHDARSASXXNGAQENGQEITALTDQMAGMDLPVNAAGAXXSSTHTITRMRSVVSALRRRFGNPPPP

SEQ ID NO: 19458 - protein, 215 aa, Zea mays
  unsure (1)..(215): unsure at all Xaa locations
HGPLSLLAFQIHPLLLVCAARVIIDRDYTQDLPDEILALVFASLSPTDRNACSLACSRWMEVDATTRHRLSLDARAALGNAAPALFARFTAVTKLALRCGSGADSLSDYGAAAVATXRCRRLSRLKLRGLRQLSDAGLASLAAAAPAIRKLSVASCTFGPKAFVAVLQSCPLLEDLSVKRLRGLHTAGATTFIAEDIKSSSLRSCCLKELYSALC

SEQ ID NO: 19459 - protein, 273 aa, Mus musculus
MHRLPTQKEERASSPPVEVGEPREFVLQPAPQGRAVRCRLTRDKKGMDRGMYPSYFLHLDTEKKVFLLAGRKRKRSKTANYLISSDPTNLSRGGENFIGKLRSNLLGNRFTVFDNGQNPQRGGGGDVGSLRQELAAVVYETNVLGFRGPRRMTVIIPGMNSDNERVPIRPRNASDGLLVRWQNKTLESLIELHNKPPIWNEDSGSYTLNFQGRVTQASVKNFQIVHADDPDYIVLQFGRVAEDAFTLDYRYPLCALQAFAIALSSFDGKLACE

SEQ ID NO: 19460 - protein, 543 aa, Mus musculus
MPLQEETLREVWASDSGHEEDCLSPEPPLRPKQRPAQGQKLRKKKPETPDSLESKPRKAGAGRRKHEEPPADSAEPRAAQTVYAKFLRDPEAKKRDPRENFLVARAPDLGGEENSEEDSDDDDNDDDEEEEEKKEGKKEKSSLPPKKAPKEREKKAKALGPRGDVGSPDAPRKPLRTKKKEVGEGTKLRKAKKKGPGETDKDPAGSPAALRKEFPAAMFLVGEGGAAEKGVKKKGPPKGSEEEKKEEEEEVEEEVASAVMKNSNQKGRAKGKGKKKVKEERASSPPVEVGEPREFVLQPAPQGRAVRCRLTRDKKGMDRGMYPSYFLHLDTEKKVFLLAGRKRKRSKTANYLISSDPTNLSRGGENFIGKLRSNLLGNRFTVFDNGQNPQRGGGGDVGSLRQELAAVVYETNVLGFRGPRRMTVIIPGMNSDNERVPIRPRNASDGLLVRWQNKTLESLIELHNKPPIWNEDSGSYTLNFQGRVTQASVKNFQIVHADDPDYIVLQFGRVAEDAFTLDYRYPLCALQAFAIALSSFDGKLACE

SEQ ID NO: 19461 - protein, 505 aa, Mus musculus
MTSKPHSDWIPYSVLDDEGSNLRQQKLDRQRALLEQKQKKKRQEPLMVQANADGRPRSRRARQSEEQAPLVESYLSSSGSTSYQVQEADSIASVQLGATRPPAPASAKKSKGAAASGGQGGAPRKEKKGKHKGTSGPATLAEDKSEAQGPVQILTVGQSDHDKDAGETAAGGGAQPSGQDLRATMQRKGISSSMSFDEDEDEDENSSSSSQLNSNTRPSSATSRKSIREAASAPSPAAPEPPVDIEVQDLEEFALRPAPQGITIKCRITRDKKGMDRGMYPTYFLHLDREDGKKVFLLAGRKRKKSKTSNYLISVDPTDLSRGGDSYIGKLRSNLMGTKFTVYDNGVNPQKASSSTLESGTLRQELAAVCYETNVLGFKGPRKMSVIVPGMNMVHERVCIRPRNEHETLLARWQNKNTESIIELQNKTPVWNDDTQSYVLNFHGRVTQASVKNFQIIHGNDPDYIVMQFGRVAEDVFTMDYNYPLCALQAFAIALSSFDSKLACE

SEQ ID NO: 19462 - protein, 265 aa, Mus musculus
GSVDIEVQDLEEFALRPAPQGITIKCRITRDKKGMDRGMFPTYFLHLDREDGKKVFLLAGRKRKKSKTSNYLISVDPTDLSRGGDSYIGKLRSNLMGTKFTVYDNGVNPQKASSSTLESGTLRQELAAVCYETNVLGFKGPRKMSVIVPGMNMVHERVCIRPRNEHETLLARWQNKNTESIIELQNKTPVWNDDTQSYVLNFHGRVTQASVKNFQIIHGNDPDYIVMQFGRVAEDVFTMDYNYPLCALQAFAIALSSFDSKLACE

SEQ ID NO: 19463 - protein, 459 aa, Mus musculus
MVQANADGRPRSRRARQSEEQAPLVESYLSSSGSTSYQVQEADSIASVQLGATRPPAPASAKKSKGAAASGGQGGAPRKEKKGKHKGTSGPATLAEDKSEAQGPVQILTVGQSDHDKDAGETAAGGGAQPSGQDLRATMQRKGISSSMSFDEDEDEDENSSSSSQLNSNTRPSSATSRKSIREAASAPSPAAPEPPVDIEVQDLEEFALRPAPQGITIKCRITRDKKGMDRGMYPTYFLHLDREDGKKVFLLAGRKRKKSKTSNYLISVDPTDLSRGGDSYIGKLRSNLMGTKFTVYDNGVNPQKASSSTLESGTLRQELAAVCYETNVLGFKGPRKMSVIVPGMNMVHERVCIRPRNEHETLLARWQNKNTESIIELQNKTPVWNDDTQSYVLNFHGRVTQASVKNFQIIHGNDPDYIVMQFGRVAEDVFTMDYNYPLCALQAFAIALSSFDSKLACE

SEQ ID NO: 19464 - protein, 265 aa, Mus musculus
GSVDIEVQDLEEFALRPAPQGITIKCRITRDKKGMDRGMFPTYFLHLDREDGKKVFLLAGRKRKKSKTSNYLISVDPTDLSRGGDSYIGKLRSNLMGTKFTVYDNGVNPQKASSSTLESGTLRQELAAVCYETNVLGFKGPRKMSVIVPGMNMVHERVCIRPRNEHETLLARWQNKNTESIIELQNKTPVWNDDTESYVLNFHGRVTQASVKNFQIIHGNDPDYIVMQFGRVAEDVFTMDYNYPLCALQAFAIALSSFDSKLACE

SEQ ID NO: 19465 - protein, 564 aa, Mus musculus
GTRDREGPRGPRSGASQENEQWKKETLEDEFSGVRLQKLEQQRQLFEKKQRRKRQEPLMVQANPDATLRHRRPRRGEERFQSDSSWGLGVGSPFLQENVPQAHLPSGAHSALVTMSYVADGSGERAPLLSPRGAVYTRGNGPAVRHHLCWLPDSSDSDVEEVTMEDIPVISRPPQTNLANLRRGWLASPGPGISQEEKEEEVGSTDARVEDKTPSPDPDPDPTVNSDGDHGDLAPCKVEENTAQKNTETASGIGDEDREKGEVTESTETNYAPVASKVLQGDDGDASNHNAWNMTCPQPRIPGPRLGEDMEAYVLLPAPRDHMVQWRIVRNKHGMDKGMFPSYYLYLEGEDGVAHFLLAGRKRKRSKTSNYLISLDPKDMSRNGSNFVGKVRSNVLGTKFTIFDNGVNPERSYWVPDSARIREELGVVCYETNVLGFRGPRKMTVILPGMDSRKQRMKVQPQNDQDSILSRVQKGAGHGLLLLQNKAPSWSDESGAYVLNFHGRVTRASVKNFQIVHPDEPDHLVLQFGRVAPNIFTMDFRYPLCPLQAFAICLSSFDGKLACE

SEQ ID NO: 19466 - protein, 460 aa, Mus musculus
MEAARCAPGPRGDSAFDDETLRLRQLKLDNQRALLEKKQRKKRLEPLMVQPNPEARLRRLKPRGSEEHTPLVDPQMPRSDVILHGIDGPAAFLKPEAQDLESKPQVLSVGSPAPEEGTEGSADGESPEETAPKPDLQEILQKHGILSSVNYDEEPDKEEDEGGNLSSPSARSEESAAASQKAASETGASGVTAQQGDAQLGEVENLEDFAYSPAPRGVTVKCKVTRDKKGMDRGLFPTYYMHLEREENRKIFLLAGRKRKKSKTSNYLVSTDPTDLSREGESYIGKLRSNLMGTKFTVYDHGVNPVKAQGLVEKAHTRQELAAICYETNVLGFKGPRKMSVIIPGMNMNHERIPFRPRNEHESLLSKWQNKSMENLIELHNKAPVWNDDTQSYVLNFHGRVTQASVKNFQIVHGNDPDYIVMQFGRVADDVFTLDYNYPLCALQAFAIGLSSFDSKLACE

SEQ ID NO: 19467 - protein, 271 aa, Mus musculus
MTCPQPRIPGPRLGEDMEAYVLVPAPRDHMVQWRIVRNKHGMDKGMFPSYYLYLEGEDGVAHFLLAGRKRKRSKTSNYLISLDPKDMSRNGSNFVGKVRSNVLGTKFTIFDNGVNPERSYWVPDSARIREELGVVCYETNVLGFRGPRKMTVILPGMDSRKQRMKVQPQNDQDSILSRVQKGAGHGLLLLQNKAPSWSDESGAYVLNFHGRVSRASVKNFQIVHPDEPDHLVLQFGRVAPNIFTMDFRYPLCPLQAFAICLSSFDGKLACE

SEQ ID NO: 19468 - protein, 562 aa, Mus musculus
MDREGPRGPRSGASQENEQWKKETLEDEFSGVRLQKLEQQRQLFEKKQRRKRQEPLMVQANPDATLRHRRPRRGEERFQSDSSWGLGVGSPFLQENVPQAHLPSGAHSALVTMSYVADGSGERAPLLSPRGAVYTRGNGPAVRHHLCWLPDSSDSDVEEVTMEDIPVISRPPQTNLANLRRGWLASPGPGISQEEKEEEVGSTDARVEDKTPSPDPDPDPTVNSDGDHGDLAPCKVEENTAQKNTETASGIGDEDREKGEVTESTETNYAPVASKVLQGDDGDASNHNAWNMTCPQPRIPGPRLGEDMEAYVLLPAPRDHMVQCRIVRNKHGMDKGMFPSYYLYLEAEDGVAHFLLAGRKRKRSKTSNYLISLDPKDMSRNGSNFVGKVRSNVLGTKFTIFDNGVNPERSYWVPDSARIREELGVVCYETNVLGFRGPRKMTVILPGMDSRKQRMKVQPQNDQDSILSRVQKGAGHGLLLLQNKAPSWSDESGAYVLNFHGRVTRASVKNFQIVHPDEPDHLVLQFGRVAPNIFTMDFRYPLCPLQAFAICLSSFDGKLAFF

SEQ ID NO: 19469 - protein, 269 aa, Mus musculus
MTCPQPRIPGPRLGEDMEAYVLLPAPRDHMVQCRIVRNKHGMDKGMFPSYYLYLEAEDGVAHFLLAGRKRKRSKTSNYLISLDPKDMSRNGSNFVGKVRSNVLGTKFTIFDNGVNPERSYWVPDSARIREELGVVCYETNVLGFRGPRKMTVILPGMDSRKQRMKVQPQNDQDSILSRVQKGAGHGLLLLQNKAPSWSDESGAYVLNFHGRVTRASVKNFQIVHPDEPDHLVLQFGRVAPNIFTMDFRYPLCPLQAFAICLSSFDGKLA

SEQ ID NO: 19470 - protein, 486 aa, Mus musculus
MPLQEETLREVWASDSGHEEDCLSPEPPLRPKQRPAQGQKLRKKKPETPDSLESKPRKAGAGRRKHEEPPADSAEPRAAQTVYAKFLRDPEAKKRDPRENFLVARAPDLGGEENSEEDSDDDDNDDDEEEEEKKEGKKEKSSLPPKKAPKEREKKAKALGPRGDVGSPDAPRKPLRTKKKEVGEGTKLRKAKKKGPGETDKDPAGSPAALRKEFPAAMFLVGEGGAAEKGVKKKGPPKGSEEEKKEEEEEVEEEVASAVMKNSNQKGRAKGKGKKKVKEERASSPPVEVGEPREFVLQPAPQGRAVRCRLTRDKKGMDRGMYPSYFLHLDTEKKVFLLAGRKRKRSKTANYLISSDPTNLSRGGENFIGKLRSNLLGNRFTVFDNGQNPQRGGGGDVGSLRQELAAVVYETNVLGFRGPRRMTVIIPGMNSDNERVPIRPRNVSFYHPTPYPSEPCFLFNHSTGPGIQLGQVTLESARASDSSGHS

SEQ ID NO: 19471 - protein, 512 aa, Rattus norvegicus
MPLQEETLREVWASDSGHEEDWLSPEPPPRPKQRPAQGQKLRKKKPETPESPESKPPRRAGAGRRKHGEPPADPAEPRTEQTVYAKFLRDPEAKKRDPRETFLVARAPDVGGGDVGSPDAPQKPLKTKKKEVGEGTKLRKVKKKGAGETDKNPSESPATVRKKIPASMFLVGEGGTAEKGVKKKGSRMFPKVQSPFWLDVFHCRDMLLSTLKGNVHRPEYTVNPETRLRVLSTAPLRRETTQEPAPKEERAPSPPVEVGEPREFVLQPAPQGRAVRCRLTRDKKGMDRGMYPSYFLHLDTEKKVFLLAGRKRKRSKTANYLISSDPTNLSRGGENFIGKLRSNLLGNRFTVFDNGQNPQRGGGGDVESLRQELAAVVYETNVLGFRGPRRMTVIIPGMNSDNERVPIRPRNSSDGLLVRWQNKTLESLIELHNKPPIWNEDSGSYTLNFQGRVTQASVKNFQIVHADDPDYIVLQFGRVAEDAFTLDYRYPLCALQAFAIALSSFDGKLACE

SEQ ID NO: 19472 - protein, 298 aa, Rattus norvegicus
MALRKELLKSIWYAFTALDVEKSGKVSKSQLKKEERAPSPPVEVGEPREFVLQPAPQGRAVRCRLTRDKKGMDRGMYPSYFLHLDTEKKVFLLAGRKRKRSKTANYLISSDPTNLSRGGENFIGKLRSNLLGNRFTVFDNGQNPQRGGGGDVESLRQELAAVVYETNVLGFRGPRRMTVIIPGMNSDNERVPIRPRNSSDGLLVRWQNKTLESLIELHNKPPIWNEDSGSYTLNFQGRVTQASVKNFQIVHADDPDYIVLQFGRVAEDAFTLDYRYPLCALQAFAIALSSFDGKLACE

SEQ ID NO: 19473 - protein, 505 aa, Rattus norvegicus
MTSKPHSDWIPYSVLDDEGSNLRQQKLDRQRALLEQKQKKKRQEPLMVQANADGRPRSRRARQSEEQAPLVESYLSSSGSTSYQVQEADSLASVQPGATRPPAPASAKKTKGAAASGGQGGAPRKEKKGKHKGTSGPATLAEDKSEAQGPVQILTVGQSDHAKDAGETAAGGGAQPSGQDLRATMQRKGISSSMSFDEEEDEDENSSSSSQLNSNTRPSSATSRKSTREAASAPSPAAPEPPVDIEVQDLEEFALRPAPQGITIKCRITRDKKGMDRGMYPTYFLHLDREDGKKVFLLAGRKRKKSKTSNYLISVDPTDLSRGGDSYIGKLRSNLMGTKFTVYDNGVNPQKASSSTLESGTLRQELAAVCYETNVLGFKGPRKMSVIVPGMNMVHERVCIRPRNEHETLLARWQNKNTESIIELQNKTPVWNDDTQSYVLNFHGRVTQASVKNFQIIHGNDPDYIVMQFGRVAEDVFTMDYNYPLCALQAFAIALSSFDSKLACE

SEQ ID NO: 19474 - protein, 122 aa, Rattus norvegicus
MTVILPGMDSRKQRMKVQPQNDQDSILSRVQKGARHGLLLLQNKAPSWSDESGAYVLNFHGRVTRASVKNFQIVHPDEPDHLVLQFGRVAPNIFTMDFRYPLCPLQAFAICLSSFDGKLACE

SEQ ID NO: 19475 - protein, 657 aa, Rattus norvegicus
MTVGGDWLRLCKSFISAKLCHSPFALVYFLHLVARGGFAKPPHPWQMQPRASSLSILLWWSSRLIISGLRELARRWTLFQVIEWFSNLPSSGKSCGLKVFVPYPSTIYFSAEQILLIPDPIDFRETEKPVAILKVKAVLLATPPPTPILVLPVAFEDETLRLRQLKLDNQRALLEKKQRKKRLEPLMVQPNPEARLRRLKPRGSEEHTPLRALLEKKQRKKRLEPLMVQPNPEARLRRLKPRGSEEHTPLVDPQTPCSDVILHGIDGPAAFLKPEAQDLESKPQVLSVGSSPTPEEGTEGSADGESPVETASKPDLQEILQKHGILSSVNYDEEPDEEAEDEGENLSSLPAQSEKESAGASQKAASDTGASGMTAQQGDAQLGEVENLEDFAYSPAPRGVTVKCRVTRDKKGMDRGLFPTYYMHLEKEENRKIFLLAGRKRKKSKTSNYLVSTDPTNLSREGESYIGKLRKLQIIMSVAFSPHTRSNLMGTKFTVYDHGVNPVKAQGLVEKAHTRQELAAICYETNVLGFKGPRKMSVIIPGMNMNHERIPFRPRNEHESLLSKWQNKSMENLIELHNKAPVWNDDTQSYVLNFHGRVTQASVKNFQIVHGNDPDYIVMQFGRVADDVFTLDYNYPLCALQAFAIGLSSFDSKLACE

SEQ ID NO: 19476 - protein, 450 aa, Anopheles gambiae str. PEST
RQLMEAYIRQKRATPGMVQASDLQLVRPMSGVNRNGREVHAYDGPMQFMMSPTNPDQIMPTSPVGPVPTVAVGGTGPNVTATSITTTPTSPYSDSTMEKLTPSSQDSEDEESTPVDVLPLPASTKSPANGGAGGAILYDRPTVDGHHLLSHSAPISPALNNNNHTHHTNSSSGNVKSSEDSGTPPSGGGGGAPDTEGDVIGPIEQWVTQPAAQGVLYKCRITRDRKGMDRGLFPIYYLHLERDYGKKLFCLAGRKRKKSKTSNYIISCDPTDLSRQADGFVGKLRSNVFGTTFFVYDSGTKNDAAAPRLDLAVVIYDTNILGFKGPRNMTVLLPGMTEDDQRVQISSVDDQQGLLDCWKSKNMDNVVELHNKTPIWNDETQSYVLNFHGRVTQASVKNFQLVHDSDPEYIVMQFGRTADDIFTMDFRYPLCAFQAFAIALSSFDGKLACE

SEQ ID NO: 19477 - protein, 1436 aa, Anopheles gambiae str. PEST
LQEEGWKLNRTNYYQEGWLATGNVRGIVGVTFTTSHCKKNVDYPLRTNYNLRGHRSDVILVKWNEPYQKLASCDSSGIIFVWIKYEGRWSVELINDRNTPVTHFSWSHDGRMALICYQDGFVLVGSVAGQRYWSSMLNLDATITCGIWTPDDQQVYFGTTQGQIIVMDVHGAMVSQVPLGSDVGITAMAWSCEKFKMEEGEDTEPGVTNASKRSFVLAVSFQNGYIYLLKSYDDITPNQIHTGMNGELGIVMEWSNSRELLAVAGTELGSPHMTDIHGATVYNNLLKFYTESGNLLYTAKIPNSTVSVSALTWGHNDKRIFIATGTQVHIAWVSRRVASLQLFCRLKVQTSLASEALLPRLPLPGRIKALIGNLFAQTIRCCVPDLKSLREFVSRPPACSTRLHCTMIRHDDDSNQSSGTCYTLYLEFLGGLVPLLKGKRTSKIRPEFVIFDPQVDEVSTYCTYSSDSTTTTTTTKSASTSSHSTTGTNGRSDSSESDIDDDCRSPRLDRKRKTGTKKRNPSSNDRSPNQNSDSTENNEDLAYLDTLPEHVKLVEVTSNIWGTKFKIHGLAKTLPANLGQVTYKTSLLHLQPRQMKLVITELRDDFPTGPDPNFNPNIFSEDEGQHHAQHHSNGTHHGPSLMSSARESCGASALSRKLLTESAPPIAPMSPRPNRFPSRPRRQQQHQPSALAGCSGSSSGGLARNGVPGLGPLARAESYEDDTDGGESTTVVVVSDLHSAAARTPPRQSIGYSLVSRPSSASSNQSRVAISPLYCEGSVPTLQSPKNAVAPSDIIFDRPPAGQTTLMSYSSNNDYIGSLVQVKNALVSSDHHHGRSTMSAGMPLNLNLNLDRSEAGGRSLCTNGSSSGRDSQPSSARSTPKKQNLKFIDEATDSTNGLETPTSETVGGGMHRTPTVASVMTFMPAAGSSSGTATTRIPDSITRSCSVGYLDNMTIVPGEEALSMMRRDAPYKRLVLVDKKRQKKYKRNLDELRQATRLRVDAKSKSLDSCSDILQEVPNLNRDLINLFRQMPKVSELGKDPSGAGSSSGKGGGFFDRKSNHQQQQQQQQVPGSGSECSASTSEPAPAAPSNSTPSRSVARIVTSFTDSPLFSRRNRQPKAPDADSSKPQSESNTPILLRWNANRHNRQSKADSLDSPKKHRRNGSCPGPSNESTDGGESMGTASTSSQTDEPRPGGSGGGHTGPAGLISRWRDMEEGGRQSTPPASPARLARSSPASPTPSKKSKRHQSASPIRHILNSPLLNRRQRKKQHTESSDDENGGSGGGSGSGAGVAGSAGPNHSSPSNHTDDSSGSTSAKQYRDLETFQKAQLRQKLKRGKIEPNGVASSSQSPAPVRREFVMHNKAPMWNENSQVYQLDFGGRVTQESAKNFQIEFRGKQVMQFGRIDGNAYTLDFQYPFSALQAFAVALANVTQRLK

SEQ ID NO: 19478 - protein, 219 aa, Pyrus communis
GKLRSNFLGTKFTIFDGQPSHSGARIAKSRSTRLVNLKQETPRVPAGNYPVAQIQYELNMLGSRGPRRMQCTMDSIPSSSIEPGGVAPTQAEFSHNNAELFPSLSFNRSKSNRMESFLSGPLARQKDGVLVLRNKSPRWHEQLQCWCLNFHGRVTVASVRLSVGGFSGNGPPGPEHEKIILQFGKVGKDQFTMDYRYPISAFQAFSICLSSFDTKIACE

SEQ ID NO: 19479 - protein, 445 aa, Arabidopsis thaliana
MSFRGIVQDLRDGFGSLSRRSFDFRLSSLHKGKAQGSSFREYSSSRDLLSPVIVQTSRWANLPPELLFDVIKRLEESESNWPARKHVVACASVCRSWRAMCQEIVLGPEICGKLTFPVSLKQPGPRDAMIQCFIKRDKSKLTFHLFLCLSPALLVENGKFLLSAKRTRRTTRTEYIISMDADNISRSSNSYLGKLRSNFLGTKFLVYDTQPPPNTSSSALITDRTSRSRFHSRRVSPKVPSGSYNIAQITYELNVLGTRGPRRMHCIMNSIPISSLEPGGSVPNQPEKLVPAPYSLDDSFRSNISFSKSSFDHRSLDFSSSRFSEMGISCDDNEEEASFRPLILKNKQPRWHEQLQCWCLNFRGRVTVASVKNFQLVAARQPQPQGTGAAAAPTSAPAHPEQDKVILQFGKVGKDMFTMDYRYPLSAFQAFAICLSSFDTKLACE

SEQ ID NO: 19480 - protein, 455 aa, Arabidopsis thaliana
MSFRSIVRDVRDSIGSLSRRSFDFKLSSLNKEGGKSRGSVQDSHEEQLVVTIQETPWANLPPELLRDVIKRLEESESVWPARRHVVACASVCRSWRDMCKEIVQSPELSGKITFPVSLKQPGPRDATMQCFIKRDKSNLTYHLYLCLSPALLVENGKFLLSAKRIRRTTYTEYVISMHADTISRSSNTYIGKIRSNFLGTKFIIYDTQPAYNSNIARAVQPVGLSRRFYSKRVSPKVPSGSYKIAQVSYELNVLGTRGPRRMHCAMNSIPASSLAEGGTVPGQPDIIVPRSILDESFRSITSSSSRKITYDYSNDFSSARFSDILGPLSEDQEVVLEEGKERNSPPLVLKNKPPRWHEQLQCWCLNFRGRVTVASVKNFQLIAANQPQPQPQPQPQPQPLTQPQPSGQTDGPDKIILQFGKVGKDMFTMDFRYPLSAFQAFAICLSSFDTKLACE

SEQ ID NO: 19481 - protein, 415 aa, Arabidopsis thaliana
SRRSFDFRLSSLHKGKAQGSSFREYSSSRDLLSPVIVQTSRWANLPPELLFDVIKRLEESESNWPARKHVVACASVCRSWRAMCQEIVLGPEICGKLTFPVSLKQPGPRDAMIQCFIKRDKSKLTFHLFLCLSPALLVENGKFLLSAKRTRRTTRTEYIISMDADNISRSSNSYLGKLRSNFLGTKFLVYDTQPPPNTSSSALITDRTSRSRFHSRRVSPKVPSGSYNIAQITYELNVLGTRGPRRMHCIMNSIPISSLEPGGSVPNQPEKLVPAPYSLDDSFRSNISFSKSSFDHRSLDFSSSRFSEMGISCDDNEEEASFRPLILKNKQPRWHEQLQCWCLNFRGRVTVASVKNFQLVAARQPQPQGTGAAAAPTSAPAHPEQDKVILQFGKVGKDMFTMDYRYPLSAFQAFA

SEQ ID NO: 19482 - protein, 415 aa, Arabidopsis thaliana
SRRSFDFRLSSLHKGKAQGSSFREYSSSRDLLSPVIVQTSRWANLPPELLFDVIKRLEESESNWPARKHVVACASVCRSWRAMCQEIVLGPEICGKITFPVSLKQPGPRDAMIQCFIKRDKSKLTFHLFLCLSPALLVENGKFLLSAKRTRRTTRTEYIISMDADNISRSSNSYLGKLRSNFLGTKFLVYDTQPPPNTSSSALITDRTSRSRFHSRRVSPKVPSGSYNIAQITYELNVLGTRGPRRMHCIMNSIPISSLEPGGSVPNQPEKLVPAPYSLDDSFRSNISFSKSSFDHRSLDFSSSRFSEMGISCDDNEEEASFRPLILKNKQPRWHEQLQCWCLNFRGRVTVASVKNFQLVAARQPQPQGTGAAAAPTSAPAHPEQDKVILQFGKVGKDMFTMDYRYPLSAFQAFA

SEQ ID NO: 19483 - protein, 415 aa, Arabidopsis thaliana
SRRSFDFRLSSLHKGKAQGSSFREYSSSRDLLSPVIVQTSRWANLPPELLFDVIKRLEESESNWPARKHVVACASVCRSWRAMCQEIVLGPEICGKLTFPVSLKQPGPRDAMIQCFIKRDKSKLTFHLFLCLSPALLVENGKFLLSAKRTRRTTRTEYIISMDADNISRSSNSYLGKLRSNFLGTKFLVYDTQPPPNTSSSALITDRTSRSRFHSRRVSPKVPSGSFNIAQITYELNVLGTRGPRRMHCIMNSIPISSLEPGGSVPNQPEKLVPAPYSLDDSFRSNISFSKSSFDHRSLDFSSSRFSEMGISCDDNEEEASFRPLILKNKQPRWHEQLQCWCLNFRGRVTVASVKNFQLVAARQPQPQGTGAAAAPTSAPAHPEQDKVILQFGKVGKDMFTMDYRYPLSAFQAFA

SEQ ID NO: 19484 - protein, 429 aa, Arabidopsis thaliana
MSFLSIVRDVRDTVGSFSRRSFDVRVSNGTTHQRSKSHGVEAHIEDLIVIKNTRWANLPAALLRDVMKKLDESESTWPARKQVVACAGVCKTWRLMCKDIVKSPEFSGKLTFPVSLKQPGPRDGIIQCYIKRDKSNMTYHLYLSLSPAILVESGKFLLSAKRSRRATYTEYVISMDADNISRSSSTYIGKLKSNFLGTKFIVYDTAPAYNSSQILSPPNRSRSFNSKKVSPKVPSGSYNIAQVTYELNLLGTRGPRRMNCIMHSIPSLALEPGGTVPSQPEFLQRSLDESFRSIGSSKIVNHSGDFTRPKEEEGKVRPLVLKTKPPRWLQPLRCWCLNFKGRVTVASVKNFQLMSAATVQPGSGSDGGALATRPSLSPQQPEQSNHDKIILHFGKVGKDMFTMDYRYPLSAFQAFAISLSTFDTKLACE

SEQ ID NO: 19485 - protein, 415 aa, Arabidopsis thaliana
MSFLSIVRDVRDTVGSFSRRSFDVRVSNGTTHQRSKSHGVEAHIEDLIVIKNTRWANLPAALLRDVMKKLDESESTWPARSWFRYSLLPFDIMSVILTTLLMVKPGPRDGIIQCYIKRDKSNMTYHLYLSLSPAILVESGKFLLSAKRSRRATYTEYVISMDADNISRSSSTYIGKLKSNFLGTKFIVYDTAPAYNSSQILSPPNRSRSFNSKKVSPKVPSGSYNIAQVTYELNLLGTRGPRRMNCIMHSIPSLALEPGGTVPSQPEFLQRSLDESFRSIGSSKIVNHSGDFTRPKEEEGKVRPLVLKTKPPRWLQPLRCWCLNFKGRVTVASVKNFQLMSAATVQPGSGSDGGALATRPSLSPQQPEQSNHDKIILHFGKVGKDMFTMDYRYPLSAFQAFAISLSTFDTKLACE

SEQ ID NO: 19486 - protein, 411 aa, Cicer arietinum
MPLKNIVREFKGMKNGIGSKSKRGGDSKHWLCRSKSHVAPDVTPFEPIQQGQWASLPPELLLDIIRRVEESETSWPARAVVVFCASVCKSWRSVTKEIIKTPQQCGRITFPISLKQPGPRDCPIQCFIRRNRESSTFLLYLGLVPSEHESNKLLLVARKIRRATGTEIVISLAADDFSRASNNYVGKLRSNFWGTKFTIYDSQPPHDIIVQPNCRGGKFNSKQVSPRAPACSYLVSSISYELNTLWTRGPRRMHCVMNSIPVSAIEEGGNAPTPTLLPQIFDEPFSPSPALKGKSPMTDSYSGNLSELPELSQGSVEPLVLKNKAPRWHEQLQCWCLNFVGRVTVASVKNFQLVAAVDPSHNVSSEEQERVILQFGKIGKDIFTMDYSYPLSAFQAFAICLTSFDTKPACE

SEQ ID NO: 19487 - protein, 429 aa, Glycine max
  unsure (1)..(429): unsure at all Xaa locations
MSFRSIVRDVRDSFGSLSRRSFDVRLTGHHRGKSQGSVQDLHDQPLVIQNSRWASLPPELLFDIIRRLEESENTWPARNGLIACAAVCQSWRNMCKDIVKSPEFCGKLTFPVSLKQPGPRDGIIQCFIKRDKSNLTYHLFLCLSPALLVENGKFLLSAKRTRRTTYTEYVISMDADNISRSSNTYIGKLRSNFLGTRFIICDTQPPYSSAHICPPMTGKTSRRFYSKKVSPKVPSGSYNIAQVTYELNVLGTRGPRKMHCVMHSIPASALDAGGTVPGQPELLPRPLEDSFRSISFSKSLXXRSIEFSSSRFSEIGESIIXXDDDGKMRPLVLKNKPPRWHEQLQCWCLNFRGRVTVASVKNFQLIAATQPPAGAPTPSQPAPPEHDKIILQFGKVGKDMFTMDYRYPLSAFQAFAICLSSFDTKLACE

SEQ ID NO: 19488 - protein, 432 aa, Glycine max
  unsure (1)..(432): unsure at all Xaa locations
MSFRSIVREVRDGXFGSLSRRSFEVRLXXGHNRGKSRSSVHELQDQPPVIQNSRWASLPPELLRDVINRLEASESTWPGRKHVVACAAVCKSWREMCKEIVSSPEFCGKITFPVSLKQPGHRDGPILCGIKRDRSNLTYHLFLGLSPALLVENGKFVLSAXRTKRTTCTDYVISMDADNISRSSSTYIGKLRSNCLGTKFIIYDTQPPYNIAMLASPGXXARRFSKKVSPKVPSGSYNIAQVTYELNVLGTRGPRRMNCTMYSIPASSMEPNGVVPGQPELLPRALEDSFRSXXSFSKSIDNSTEFSSSRFSDIMGTGIEDEEGKVRPLVLKNKSPRWHEQLQCWCLNFRGRVTVASVKNFQLIASTPPAAVAPTGTGPTPSQPTPSDPDKIILQFGKVGKDMFTMDYRYPLSAFQAFAICLTSFDTKLACE

SEQ ID NO: 19489 - protein, 335 aa, Glycine max
  unsure (1)..(335): unsure at all Xaa locations
MSFRSIVRDVRDSFGSLSRRSFDVRLTGHHRGKSQGSVQDLHDQPLVIQNSRWASLPPELLFDIIRRLEESENTWPARNGSSACAAVCQSWRNMCKDIVKSPEFCGKLTFPVSLKQPGPRDGIIQCFIKRDKSNLTYHLFLCLSPALLVENGKFLLSAKRTRRTTYTEYVISMDADNISRSSNTYIGKLRSNFLGTRFIICDTQPPYSSAHICPPMTGKTSRRFYSKKVSPKVPSGSYNIAQVTYELNVLGTRGPRKMHCVMHSIPASALDAGGTVPGQPELLPRPLEDSFRSISFSKSLXXRSIEFSSSRFSEIGESIIXXDDDGKMRPLVLKX

SEQ ID NO: 19490 - protein, 291 aa, Glycine max
  unsure (1)..(291): unsure at all Xaa locations
MSFRSIVRDVRDGFGSLSRRSFEVRLXXGHNRGKSRSSVHELQDQPPVIQNSRWASLPPELLRDVINRLEASESTWPGRKHVVACAAVCKSWREMCKEIVSSPEFCGKITFPVSLKQPGHRDGPIQCFIKRDKSKLTYHLFLCLSPALLVENGKFLLSAKRTRRTTCTEYIISMDADNISRSSSTYIGKLRSNFLGTKFIIYDTQPPYHNAMLSPPGRSRRFSKKVSTKVPSGSYNIAHVTYELNVLGTRGPRRMNCTMYSIPASSMEPNGIVPGQPELLPRALEDSFGDX

SEQ ID NO: 19491 - protein, 418 aa, Glycine max
  unsure (1)..(418): unsure at all Xaa locations
MTILNMVHVVRDGCWNLARTNVGVRISGGVKMNSVVHEAHDTRXLVIQNSRWASLPPELLCDVFKRLVESESTWPARKHVVAWAAVCKSXWREMCKEIVTSPEFCGKITFPVSLKQPGSRDGTIQCFIKRDKSNLTYHLFLCLSPALLVENGKFLLSAKRTIRTTCTEYIISMDADNISRSNSTYIXGKLMSNILGTKFIIYDTQPPYNNAPLSPPVRGGRFYSKKVSPKVPSSSYNIAQITYELNVLGTRGPRRMNSSMHXFPMSALEPACTVPGQLELLLRALEDYVQSISFHRLIDNKAGAITTEECMEKMQLIVPKNQSSRWHQQLQWXSLKCRXSKTVASVKNFQLITXXTQPPSAAAPTPSSLPAQSDSDNTILQFGKXRXDIFSKDYRYPLSAFQAFPICLTSFDTKLACE

SEQ ID NO: 19492 - protein, 320 aa, Glycine max
  unsure (1)..(320): unsure at all Xaa locations
MSFRSIVRDVRDGFGSLSRRSFDVRLSGGGKSNSLXSMRSTNAFFFVQNSRWASLPPELLCDVIKRLGKSETTWPARKHVVACAAVCRSWRGMCKEIVNSPEFCGKITFPVSLKQPGHRDGPIQCFIKRDKSKLTYHLFLCLSPALLVENGKFLLSAKRTRRTTCTEYIISMDADNISRSSSTYIGKLRSNFLGTKFIIYDTQPPYHNAXXLSPPGRSRRFSKKVSPKVPSGSYNIAHVTYELNVLGTRGPRRMNCTMYSIPASSMEPNGIVPGQPELLPRALEDSFRSISFSKSIXXNSTEFSSSRFSDIMGIGNEDEE

SEQ ID NO: 19493 - protein, 280 aa, Glycine max
  unsure (1)..(280): unsure at all Xaa locations
XENGKFLLSAKRTRRTTCTEYIISMDADNISRSNSTYIGKLRSNFLGTKFIIYDTQPPYNNAQLSPPGRSRRFYSKKVSPKVPSGSYNIAQITYELNVLGTRGPRRMNCTMHSIPMSALEPGCTVPGQPELLPRSLQYSFRSISFGXXSIDNSTEFSSSRFSDIFVAGNEEEQXXKGRPLVLKNKSPRWHEQLQCWCLNFRGRVTVASVKNFQLIAATQPPAAGAPTPSSQPAQSDHDKIILQFGKVGKDIFTMDYRYPLSAFQAFAICLTSFDTKLACE

SEQ ID NO: 19494 - protein, 448 aa, Oryza sativa (japonica cultivar-group)
MSFRSIVRDVRDGFGSLSRRSFEVTLASLYGLTGHHKGKTQSSLDELDDSPAIIPESRWASLPPELLREVIRRLEADESTWPSRRNVVCFAAVCRTWREMCKETVLSPEFCGKLTFPVSIKQPGPRDGMIQCYIKRNRSKSTYHLYLCLSNVVTAEGGKFVLAAKRHRKTTCTEYTISMVSGNISRSSRTNIGKLRSNFLGTKFIIYDTQPPYNGAVVPHVGRTSKRFNSTKVSPKVPSVTYNIAQVSYELNVLGTRGPRRMRCMMHSIPASSVEPGGIVPGQPEQIVPRALEDSFRSTTSFSQSFRSTTSFSKSIMDPSMDFSSARFSDISGSIMGGDDNGEIKERPLVLRNKPPRWHEQLQCWCLNFRGRVTIASVKNFQLVAAPSPPPAGAPTPSQPGPADPEKVILQFGKVARDMFTMDYRYPLSAFQAFAICLSSFDTKLACE

SEQ ID NO: 19495 - protein, 440 aa, Oryza sativa
  unsure (1)..(440): unsure at all Xaa locations
MSFRSIVRDVRDGFGSLSRRSFEVTLASLYGLTGHHKGKTQSSLDELDDSPAIIPESRWASLPPELLREVIRRLEADESTWPSRRNVVCFAAVCRTWREMCKETVLSPEFCGKLTFPVSIKQPGPRDGMIQCYIKRNRSKSTYHLYLCLSNVVTAEGGKFVLAAKRHRKTTCTEYTISMVSGNISRSSRTNIGKLRSNFLGTKFIIYDTQPPYNGAVVPHVGRTSKRFNSTKVSPKVPSVTYNIAQVSYELNVLGTRGPRRMRCMMHSIPASSVEPGGIVPGQPEQIVPRALEDSFRSTTTSFSKSIMDPSMDFSSARFSDISGSIMGGDDNGEIKERPLVLRNKPPRWHEQLQCWCLNFRGRVTIASVKNFQLVAAPSPPPAGAPTPSQPGXXADPEKVILQFGKVARDMFTMDYRYPLSAFQAFAICLSSFDTKLACE

SEQ ID NO: 19496 - protein, 440 aa, Oryza sativa; identical to SEQ ID NO: 19495
  unsure (1)..(440): unsure at all Xaa locations

SEQ ID NO: 19497 - protein, 631 aa, Oryza sativa
  unsure (1)..(631): unsure at all Xaa locations
MEIIASISSTEFSIQCIPQLFSVGHMHIHLHQTIAKHAKNASHKESSGLIEFFLLISIKNAYRLASTHPEAFHSCQPQSGPDLPFLKVHTGTYPCNLSGLHAVFTHRIFRNVSNNKTNPNFPAAKQNCKRRLHLRKGEEPIFRTIQRDNRDNSVHDDRGGEDTCRCLEDESRLSRRGAPISIRRAEQGRGSCIVRDVRDSFGSLSRRSFEVSLSGLTGHHRGKSQSTVHELCDADLIIQESRWASLPPELLRDVIRRLEASESTWPSRKDVVSCAAVCKAWREMCKEIVLSPEFCGKLTFPLSLKQPGPRDGMIQCFIKRDKSKSTYHLYLCLSTAVLADSGKFLLSAKRHRKTTCTEYVISMDADNISRSSSTYIGKLRSNFLGTKFIIYDTQPSYNGAVIPPVGRSSRRFNSKKVSPKMPSGSYNIAQVTYELNVLGTRGPRRMHCVMHSIPASSVEPGGIVPGQPEQIVPRAFEESFRSXXTSFSKSSIMDRSMDFSSSRDFSSARFSDIAGGTINGDEEGQNKERPLVLRNKAPRWHEQLQCWCLNFRGRVTIASVKNFQLIAAPAQPPAGAPTPSQPAPXXEQDKIILQFGKVAKDMFTMDYRYPLSAFQAFAICLSSFDTKLACE

SEQ ID NO: 19498 - protein, 448 aa, Oryza sativa
  unsure (1)..(448): unsure at all Xaa locations
MSFRSIVRDVRDSFGSLSRRSFEVTLAGLSGLTGHHRGKSQSTVHELCDADLIIQESRWASLPPELLRDVIRRLEASESTXWPSRKDVVSCAAVCKAWREMCKEIVLSPEFCGKLTFPLSLKQPGPRDGMIQCFIKRDKSKSTYHLYLCLSTAVLADSGKFLLSAKRHRKTTCTEYVISMDADNISRSSSTYIGKLRSNFLGTKFIIYDTQPSYNGAVIPPVXXRSSRRFNSKKVSPKMPSGSYNIAQVTYELNVLGTRGPRRMHCVMHSIPASSVEPGGIVPGQPEQIVPRAFEESFRSTTSFSKSSIMDRSMGFQXFPXDFSSARFSDIAGGTSDEEGQNKERPLVLRNKAPRWXHEQLQCWCLNFRGRVTIASVKNFQLIAAXQHRPPAGAPTPSQPAPPEQDKIILQFGKVAKDMFTMDYRYPLSAFQAFAICLSSFDTKLACE

SEQ ID NO: 19499 - protein, 440 aa, Triticum aestivum
  unsure (1)..(440): unsure at all Xaa locations
MSFRSIVRDVRDGFGSLSRRGFDVRXXLGHRRGKSHSAVHELHDPAPVIQSSCWANLPPELLHDVIERLEASEATWPSRKHVVACAAVCRTWREMCQEIVKNPEFCGKITFPVSLKQPGPRDGTIQCFIKRDKSTQTYYLYLCLTSAVVAENGKFLLLAKRHSRPTCTEYTIFMNTDNTSRSSNMYIGKLRSNLLGTKFVIYDTQHPCNIPNVSQSGKTSRRFYSRKVSPKASPSTYSIAQVSYELNVLGTRGPRRMNCVMNSIPASSLVAGGTVLCQPDSAVAHSLDESFGSISFSKSSIRDRSIRFSSTRFSGISIGGSRNGGQALGDNDECKEWPLTLRNKAPRWHDQLQCWCLNFKGRVTVASVKNFQLVAATESTAEAPTPSQPAPPPPSEHDKVILQFGKGAKDMFTMDYRYPLSAFRAFAICLSSFDTKLACE

SEQ ID NO: 19500 - protein, 345 aa, Leishmania major
MAQSVLPMDPRERIYYRPRHRLLQCYLERRKRKGLGIASLLPGRHQSFQFFLEHTGDFVLAAVPRSFKTRTMVEDTSSGVGGQFYPVSQGGANIVFTINQQQLDSDTRAFVGKLSRRGKGMEMVLFSEGSKDARKEILAVLLHNLADTNRSSFTVLLPAIDPESGYIKPLEGGEVEFLRDGRGSSHAGIDEAMVNSSDDDVDAAYSTMSRATPNFAAVCDSPGASGAPAPSRSETAGRQKKWFLHGVLAREYRRNPGSPNIIVLKSKEPQWDGVLRGYKLDFHGRSTKASEKNFQLVAVSDPGKVVMLFGKQDDDRFALDFRYPLCGLQAAAIATTILTARKAIL

SEQ ID NO: 19501 - protein, 413 aa, Arabidopsis lyrata
SRRSFDFRLSSLHKGKAQGSSFREYSSSRDLLSPVIVQTSRWANLPPELLFDVIKRLEESESNWPARKHVVACASVCRSWRAMCQEIVLGPEICGKLTFPVSLKQPGPRDAMIQCFIKRDKSKLTFHLFLCLSPALLVENGKFLLSAKRTRRTTRTEYIISMDADNISRSSNSYLGKLRSNFLGTKFLVYDTQPPPNTSSSALITDRTSRSRFHSRRVSPKVPSGSYNIAQITYELNVLGTRGPRRMHCIMNSIPTSSLEPGGSVPNQPEKLVPAPYSLDDSFRSNISFSKSSFDHRSLDFSSSRFSEMGISCNDNEEETSFRPLILKNKQPRWHEQLQCWCLNFRGRVTVASVKNFQLVAARPSQPQGTGTAPATAPAHPEQDKVILQFGKVGKDMFTMDYRYPLSAFQAFA

SEQ ID NO: 19502 - protein, 272 aa, Encephalitozoon cuniculi
MEQGNGHATASIDHPHDVGDGEHCSLSPLVYGFSYSPSEDRIIEYLDSMSDNQAPESHIAASHRGYALEERRAIVLDPYPIGRISRGKVDVSYGFFNEYLYESHEHGPSKLLKAHRVMCGFEIYSLGQGDEEKVGCLRSNLFGTKYILYQGEKAVLEIKYATSIFKRRGPRSFSVLFTGISGSSLKEPVVMRNKEPYYNAETNSYSLNFNGRVTTPSVKNFQLIHPLEPTYVTLTFGKISRFKYILDYTYPWSGVQAFAIALAALDYKVGCD

SEQ ID NO: 19503 - protein, 426 aa, Caenorhabditis elegans
MTDTNSQWIEMNLQRQRKMLEDKQKQKRHQSAGSVRTTSTAMSMNSMKDYPTFDNSLPFSISDNSSVSVSMNTPLIPTQDPIAQPRMQSMPRQQPQQVQESLISIGDYPDNDINAKLSKVNLTSCVVSDDEDEDKRSYADSPWNTDVVADRIPSEVLPDYNFIKNNLAKFVEDPAVEHCLYKCSITRQKSGVDKGMFPTYFLHLEEFDTDKRQKIFLLAARKRKKSTTANYLLSTDPTNLSREGEGYCAKVRSNALGTQFTVYDSGQNPKKTTNHAAIRQELAAVIYETNVLGFKGPRKMTIVMPGIEPPTENRPAVRCPVRPIQDKHTLLERYRLNDLDSLKILSNKSPQWNDETQSYVLNFHGRVTQASVKNFQIIHQSSPEYIVMQFGRISDDEFTMDFRYPLSAVQAFGIAMTSFHGKLACE

SEQ ID NO: 19504 - protein, 425 aa, Caenorhabditis elegans
MLEDKQKQKRHQSAGSVRTTSTAMSMNSMKDYPTFDNSLPFSISDNSSVSVSMNTPLIPTQDPIAQPRMQSMPRQQPQQVQESLISIGDYPDNDINAKLSKVNLTSCVVSDDEDEDKRSYADSPWNTDVVADRIPSEVLPDYNFIKNNLAKFVEDPAVEHCLYKCSITRQKSGVDKGMFPTYFLHLEEFDTDKRQKIFLLAARKRKKSTTANYLLSTDPTNLSREGEGYCAKVRSNALGTQFTVYDSGQNPKKTTNHAAIRQELAAVIYETNVLGFKGPRKMTIVMPGIEPPTENRPAVRCPVRPIQDKHTLLERYRLNDLDSLKILSNKSPQWNDETQSYVLNFHGRVTQASVKNFQIIHQSSPEYIVMQFGRISDDEFTMDFRYPLSAVQAFGIAMTSFHGKLAYNPGKSWVQERQKCPGIFQ

SEQ ID NO: 19505 - protein, 869 aa, Caenorhabditis elegans
MKILWESDWQGARIEQTITHLSWIQQQDKPDHGLLGVGTETGSVGVTLTDFKPTPDDLTRYNFNLRGHHNAIRMVTWNKSQSKLASCDASGIIYVWVRNDDRWSVELVNDRGVKVSDLSWSPCGGSALICYDDNFVLIGSANGQRVWSNSFPLPAAVTCGVWAPDSRQLVLGFSTGTIQVLSNAGVNITSRSFTEDKLTQMAFSPLRTKVREVEWTLAMLSSANKIYMISAYDQLHPAIYRSKFQVIRMEWNTDGTILALINANNELVMIDTTCRVIHRERIPIADKEKTLIPNPPPTQKLTAFTWAHNGNVVIIAAGGCLTVGRILFGVPSLFEIVTYDLWKMMGCSSKKVDKLPIPLKEMNALRELDHHVIRCRIPRSQDMCSYVCSVVDARCYCTIRPLARGSHTYVLCFEHLGGLVPLLLGRQVNRFLPQFQIFMYQSKPPTSSPPSGSSAQVEDVNSIFRYSTGRNSLWRRSKRQIRALMSRHVRPTRPDTRLLQVTSNVWCTRFNISSLSPSLLPTFLGQVIYKTSVLHLQPRQMTIDLAVLQRKDGKELPEASVDGTTHMTSSPDQGLTSEERQFFQKILAECLSLRAVINSSNFGKPPPPAAASTISLPCQPSTSKEPDSSAHTTPISTRTVESKHDVTSMASSVSTWHEEIEALAFIDGDADEKAMLVQPALKTGWAAMEQASKKDAEVIRSHVDKLASIAEQLSKRHGDFNVKRDKASINKMRSQMKTLLRRVNEIEQKVANGDVKTEVRQLLNTLNEMKKALGEGVPKSGRSLNSTCKIETMTNKTPFWNEQNQVYQLDFGGRVTQESAKNFQIELDSKQVLQFGRIEGGSYTLDFRYPFSAAQAFAVALASITQRLK

SEQ ID NO: 19506 - protein, 443 aa, Drosophila melanogaster
MEAYIRQKRASPGMVQASDLQINRPMSGMRSNSRELHAYDGPMQFISSPQNPDQILTNGSPGGINPVAMNTSRNHSNNMRSLSTINQEADLIEEISSHELEDEESSPVTVIEQHQQSASHSANSTQSQKPRARQHSFSDNLDEDDYTNRNVAGAAPVRPAGMASSPYKDATLDGSSNGTGNGTGGESEGDVIGNIDQFVMQPAPQGVLYKCRITRDRKGMDRGLFPIYYLHLERDYGKKIFLLGGRKRKKSKTSNYIVSCDPTDLSRNADGFCGKLRSNVFGTSFTVFDNGNKESTESPRLDLAVIIYDTNILGFKGPRNMTVILPGMTEDDQRVKISSADPKQQGILDLWKMKNMDNIVELHNKTPVWNDETQSYVLNFHGRVTQASVKNFQLVHDSDPEYIVMQFGRTSEDVFTMDYRYPLCAMQAFAIALSSFDGKIACE

SEQ ID NO: 19507 - protein, 460 aa, Drosophila melanogaster
MSGINSRNQKMEQQRQLMEAYIRQKRASPGMVQASDLQINRPMSGMRSNSRELHAYDGPMQFISSPQNPDQILTNGSPGGINPVAMNTSRNHSNNMRSLSTINQEADLIEEISSHELEDEESSPVTVIEQHQQSASHSANSTQSQKPRARQHSFSDNLDEDDYTNRNVAGAAPVRPAGMASSPYKDATLDGSSNGTGNGTGGESEGDVIGNIDQFVMQPAPQGVLYKCRITRDRKGMDRGLFPIYYLHLERDYGKKIFLLGGRKRKKSKTSNYIVSCDPTDLSRNADGFCGKLRSNVFGTSFTVFDNGNKESTESPRLDLAVIIYDTNILGFKGPRNMTVILPGMTEDDQRVKISSADPKQQGILDLWKMKNMDNIVELHNKTPVWNDETQSYVLNFHGRVTQASVKNFQLVHDSDPEYIVMQFGRTSEDVFTMDYRYPLCAMQAFAIALSSFDGKIACE

SEQ ID NO: 19508 - protein, 460 aa, Drosophila melanogaster
MSAINSRNQKMEQQRQLMEAYIRQKRASPGMVQASDLQINRPMSGMRSNSRELHAYDGPMQFISSPQNPDQILTNGSPGGINPVAMNTSRNHSNNMRSLSTINQEADLIEEISSHELEDEESSPVTVIEQHQQSASHSANSTQSQKPRARQHSFSDNLDEDDYTNRNVAGAAPVRPAGMASPPYKDATLDGSSNGTGNGTGGESEGDVIGNIDQFVMQPAPQGVLYKCRITRDRKGMDRGLFPIYYLHLERDYGKKIFLLGGRKRKKSKTSNYIVSCDPTDLSRNADGFCGKLRSNVFGTSFTVFDNGNKESTESPRLDLAVIIYDTNILGFKGPRNMTVILPGMTEDDQRVKISSADPKQQGILDLWKMKNMDNIVELHNKTPVWNDETQSYVLNFHGRVTQASVKNFQLVHDSDPEYIVMQFGRTSEDVFTMDYRYPLCAMQAFAIALSSFDGKIACE

SEQ ID NO: 19509 - protein, 1497 aa, Drosophila melanogaster
MQSESGAYLPSQPAACRWWKMCEWARDDGSLACGNPFWKPVNGHLTRNWRLLRRTAKQLSAAVDIVFKWLSFSSPFFQDEGWKLNRTNYYQEGWLATGNVRGIVGVTFTTSHCRKNMDYPLRTNYNLRGHRSDVSCVVTIQSFKAPIIFGQQVILVKWNEPYQKLASCDSSGIIFVWIKYEGRWSIELINDRNTPVTHFSWSHDGRMALICYQDGFVLVGSVAGQRYWSSMLNLESTITCGIWTPDDQQVYFGTTQGQVIVMDVHGAMVSQVQLSNDVPITSMAWSCEKFKMEEGEEAEPGVTNAAKRSFVLAVSFQNGYIYLLKSFDDVSPAHINTCLNGALGMVMEWSNSRELLAVAGTLRTGVDGTKTEDMGTPSCYTNLVKFYTETGTCLYQAHIPCSSATVSAITWGHNDKRLFIATGTQVHIAWVSRRVASLQLLCRLEIQASVGSESLLPLLPLPSRIKSLIGNLFAQTIRCCVPDLKSLRDFVSRPPLCSTRLHCTMIRHDDDSNLSSGTCYTLYLEYLGGLVPLLKGKRTSKIRPEFVIFDPQVNDSPLYFQYSAEAKSSSGSSQSTTTGNSGRTDSSDSDFEERSRFGSPRTPRKKRVRPKRRHQAGDRLSASGGGVSNDPDSLDELAYVDTLPEEVKLVEVTSNIWGTKFKIHGLAKTVPANLGQVTYKTSLLHLQPRQMTLVITELRDDFPPGPDPSFNPNIFSEDEDEHHQHQGIHHDAVPQVNVITAQDGASLKPPIIPQRRLTDGASAPLIAPMSPRPNRILARHKNSLTVNGERGSGSSAGLSPLARAESYDDDSSNESQEAGAAGSQSTTVLLHQAPSNGSGPGPSCSKSITRPKTISSFKNSYSRSSSNSSCQSRHAISPLYCDGAVPTLQSPKNAVAPSDIIFERPAVPAAGQTTLMSYSSNADYANNVVQVKNALMSEPVRSANSHVNPVPLNLNLNLERMDARVKCTAPTTSSTAKRREMLYIDEETQSPTPTPSSSSMKRTPTVVSIAPALPDSITRSCSVGYLDSVAITPSDEALSALRKDAPNKRLILVDKKRNRRKRQQQEDARRHKLQQTGKSKSLDSCDLLSLQTKLSSKEHEQVVRKLQEISDSSACSSAANTLCFKCRNNMSPSSACKRCQPSASSVLDEITAVVPAVEPAKESPAVQAKPAPKKRFDVITSFTDSPLFTRKHRFGIGRSKETAGTENSTPLLGRKQDNGFSFVKQLSEVRWRRKEQPAQAQVNGSSNASTLERQPQPEITGAACGTVEATPVEAKASVSLHTQALTTLENIISRLRDLDEGRLTPPSTPQRLPRSSPASPAASKKNKRQQSNSPIRHILNSPLLNRRQRKKQSIIESSDDEGNQTNGSGEESNNAGNGKQYRDLETFQKAQLRQKLKRGKIEPNGSASCANPAPVRREFVMHNKAPMWNEMSQVYQLDFGGRVTQESAKNFQIEFRGKQVMQFGRIDGNAYTLDFQYPFSALQAFAVALANVTQRLK

SEQ ID NO: 19510 - protein, 428 aa, Lemna paucicostata
MSFRSILSDVRDSIGSFSRRRGAEVRISGVSDNHRGRNRVTAGDFPGEIGGEIPAIYQSRWAGLPPELLRDVIKRLEESESSWPARKHVVACAAVCTAWREMCKEIVSGPEFCGKLTFPVSLKQPGPREGTIQCFIKRDKSKSRYHLFLGLSPTLPAENGKFLLSQSASRALPARNTSSPWNADDISRSSSTYIGKLRSNFLGTKFIMFDTQPPTRHCRPAPSSGRVSRRFYSKVSPKVPSGNYAIAQVTYELNVLGKRGPRRMHCTMNSIPSSALDAGGRVPAAPERILSRSLEDSFRSVSLSKDLGSSRFSEFGGEMEREEEEEGDRKKSGPLVLKNKAPRWHEQLQCWCLNFRGRVTVASVKNFQLIADGQATAAQAGASEHDKIILQFGKVGKDTFTMDNRYPLSAFQAFAICLSSFDTKLACE

SEQ ID NO: 19511 - protein, 358 aa, Gallus gallus
MHHFSISPCLHVPTSLCPPAATGSDEEDDSDASTKPIRSGKKNPASLFQTGGDPPRERKTRKKAPKTAESEEETLETQQKNSNKKGKGKKSKKKEERPLSPVIEVDNLEKFVLSPAPQGVTIKCRVTRDKRGMDRGLYPTHYLHLDNDKKVFLLAGRKRKKSKTSNYLISIDPTDLSRGGENFIGKLRSNLMGTKFTVFDNGANPDRASADWSNVRQELSAVVYETNVLGFKGPRKMTVIIPGMNSDNERVPIRPRNDNDGLLMRWQNKNMDNIIELHNKAPVWNDETQSYVLNFHGRVTHASVKNFQIVHGSDPDYIVMQFGRVADDAFTMDYNYPLCAVQAFAIALSSFDGKLACE

SEQ ID NO: 19512 - protein, 489 aa, Homo sapiens
MPLRDETLREVWASDSGHEEESLSPEAPRRPKQRPAPAQRLRKKRTEAPESPCPTGSKPRKPGEEEEEEEDEEDEEEEAEEKKEKILLPPKKPLREKSSADLKERRAKAQGPRGDLGSPDPPPKPLRVRNKEAPAGEGTKMRKTKKKGSGEADKDPSGSPASARKSPAAMFLVGEGSPDKKALKKKGTPKGARKEEEEEEEAATVIKNSNQKGKAKGKGKKKAKEERAPSPPVEVDEPREFVLRPAPQGRTVRCRLTRDKKGMDRGMYPSYFLHLDTEKKVFLLAGRKRKRSKTANYLISIDPTNLSRGGENFIGKLRSNLLGNRFTVFDNGQNPQRGYSTNVASLRQELAAVIYETNVLGFRGPRRMTVIIPGMSAENERVPIRPRNASDGLLVRWQNKTLESLIELHNKPPVWNDDSGSYTLNFQGRVTQASVKNFQIVHADDPDYIVLQFGRVAEDAFTLDYRYPLCALQAFAIALSSFDGKLACE

SEQ ID NO: 19513 - protein, 542 aa, Homo sapiens
  unsure (1)..(542): unsure at all Xaa locations
MPLRDETLREVWASDSGHEEESLSPEAPRRPKQRPAPAQRLRKKRTEAPESPCPTGSKPRKPGAGRRGRPREEPSPDPAQARAPQTVYARFLRDPEAKKRDPRETFLVARAPDAEDEEEEEEEDEEDEEEEAEEKKEKILLPPKKPLREKSSADLKERRAKAQGPRGDLGSPDPPPKPLRVRNKEAPAGEGTKMRKTKKKGSGEADKDPSGSPASARKSPAAMFLVGEXSPDKKALKKKGTPKGARKEEEEEEEAATVIKNSNQKGKAKGKGKKKAKEERAPSPPVEVDEPREFVLRPAPQGRTVRCRLTRDKKGMDRGMYPSYFLHLDTEKKVFLLAGRKRKRSKTANYLISIDPTNLSRGGENFIGKLRSNLLGNRFTVFDNGQNPQRGYSTNVASLRQELAAVIYETNVLGFRGPRRMTVIIPGMSAENERVPIRPRNASDGLLVRWQNKTLESLIELHNKPPVWNDDSGSYTLNFQGRVTQASVKNFQIVHADDPDYIVLQFGRVAEDAFTLDYRYPLCALQAFAIALSSFDGKLACE

SEQ ID NO: 19514 - protein, 542 aa, Homo sapiens
MPLRDETLREVWASDSGHEEESLSPEAPRRPKQRPAPAQRLRKKRTEAPESPCPTGSKPRKPGAGRRGRPREEPSPDPAQARAPQTVYARFLRDPEAKKRDPRETFLVARAPDAEDEEEEEEEDEEDEEEEAEEKKEKILLPPKKPLREKSSADLKERRAKAQGPRGDLGSPDPPPKPLRVRNKEAPAGEGTKMRKTKKKGSGEADKDPSGSPASARKSPAAMFLVGEGSPDKKALKKKGTPKGARKEEEEEEEAATVIKNSNQKGKAKGKGKKKAKEERAPSPPVEVDEPREFVLRPAPQGRTVRCRLTRDKKGMDRGMYPSYFLHLDTEKKVFLLAGRKRKRSKTANYLISIDPTNLSRGGENFIGKLRSNLLGNRFTVFDNGQNPQRGYSTNVASLRQELAAVIYETNVLGFRGPRRMTVIIPGMSAENERVPIRPRNASDGLLVRWQNKTLESLIELHNKPPVWNDDSGSYTLNFQGRVTQASVKNFQIVHADDPDYIVLQFGRVAEDAFTLDYRYPLCALQAFAIALSSFDGKLACE

SEQ ID NO: 19515 - protein, 420 aa, Homo sapiens
QEADSLASVQLGATRPTAPASAKRTKAAATAGGQGGAARKEKKGKHKGTSGPAALAEDKSEAQGPVQILTVGQSDHAQDAGETAAGGGERPSGQDLRATMQRKGISSSMSFDEDEEDEEENSSSSSQLNSNTRPSSATSRKSVEAASAPSPTAPEQPVDVEVQDLEEFALRPAPQGITIKCRITRDKKGMDRGMYPTYFLHLDREDGKKVFLLAGRKRKKSKTSNYLISVDPTDLSRGGDSYIGKLRSNLMGTKFTVYDNGVNPQKASSSTLESGTLRQELAAVCYETNVLGFKGPRKMSVIVPGMNMVHERVSIRPRNEHETLLARWQNKNTESIIELQNKTPVWNDDTQSYVLNFHGRVTQASVKNFQIIHGNDPDYIVMQFGRVAEDVFTMDYNYPLCALQAFAIALSSFDSKLACE

SEQ ID NO: 19516 - protein, 561 aa, Homo sapiens
MGARTPLPSFWVSFFAETGILFPGGTPWPMGSQHSKQHRKPGPLKRGHRRDRRTTRRKYWKEGREIARVLDDEGRNLRQQKLDRQRALLEQKQKKKRQEPLMVQANADGRPRSRRARQSEEQAPLVESYLSSSGSTSYQVQEADSLASVQLGATRPTAPASAKRTKAAATAGGQGGAARKEKKGKHKGTSGPAALAEDKSEAQGPVQILTVGQSDHAQDAGETAAGGGERPSGQDLRATMQRKGISSSMSFDEDEEDEEENSSSSSQLNSNTRPSSATSRKSVREAASAPSPTAPEQPVDVEVQDLEEFALRPAPQGITIKCRITRDKKGMDRGMYPTYFLHLDREDGKKVFLLAGRKRKKSKTSNYLISVDPTDLSRGGDSYIGKLRSNLMGTKFTVYDNGVNPQKASSSTLESGTLRQELAAVCYETNVLGFKGPRKMSVIVPGMNMVHERVSIRPRNEHETLLARWQNKNTESIIELQNKTPVWNDDTQSYVLNFHGRVTQASVKNFQIIHGNDPDYIVMQFGRVAEDVFTMDYNYPLCALQAFAIALSSFDSKLACE

SEQ ID NO: 19517 - protein, 506 aa, Homo sapiens
MTSKPHSDWIPYSVLDDEGRNLRQQKLDRQRALLEQKQKKKRQEPLMVQANADGRPRSRRARQSEEQAPLVESYLSSSGSTSYQVQEADSLASVQLGATRPTAPASAKRTKAAATAGGQGGAARKEKKGKHKGTSGPAALAEDKSEAQGPVQILTVGQSDHAQDAGETAAGGGERPSGQDLRATMQRKGISSSMSFDEDEEDEEENSSSSSQLNSNTRPSSATSRKSVREAASAPSPTAPEQPVDVEVQDLEEFALRPAPQGITIKCRITRDKKGMDRGMYPTYFLHLDREDGKKVFLLAGRKRKKSKTSNYLISVDPTDLSRGGDSYIGKLRSNLMGTKFTVYDNGVNPQKASSSTLESGTLRQELAAVCYETNVLGFKGPRKMSVIVPGMNMVHERVSIRPRNEHETLLARWQNKNTESIIELQNKTPVWNDDTQSYVLNFHGRVTQASVKNFQIIHGNDPDYIVMQFGRVAEDVFTMDYNYPLCALQAFAIALSSFDSKLACE

SEQ ID NO: 19518 - protein, 442 aa, Homo sapiens [sequence omitted]

SEQ ID NO: 19519 - protein, 442 aa, Homo sapiens
MEASRCRLSPSGDSVFHEEMMKMRQAKLDYQRLLLEKRQRKKRLEPFMVQPNPEARLRRAKPRASDEQTPLVNCHTPHSNVILHGIDGPAAVLKPDEVHAPSVSSSVVEEDAENTVDTASKPGLQERLQKHDISESVNFDEETDGISQSACLERPNSASSQNSTDTGTSGSATAAQPADNLLGDIDDLEDFVYSPAPQGVTVRCRIIRDKRGMDRGLFPTYYMYLEKEENQKIFLLAARKRKKSKTANYLISIDPVDLSREGESYVGKLRSNLMGTKFTVYDRGICPMKGRGLVGAAHTRQELAAISYETNVLGFKGPRKMSVIIPGMTLNHKQIPYQPQNNHDSLLSRWQNRTMENLVELHNKAPVWNSDTQSYVLNFRGRVTQASVKNFQIVHKNDPDYIVMQFGRVADDVFTLDYNYPLCAVQAFGIGLSSFDSKLACE

SEQ ID NO: 19520 - protein, 442 aa, Homo sapiens
MEASRCRLSPSGDSVFHEEMMKMRQAKLDYQRLLLEKRQRKKRLEPFMVQPNPEARLRRAKPRASDEQTPLVNCHTPHSNVILHGIDGPAAVLKPDEVHAPSVSSSVVEEDAENTVDTASKPGLQERLQKHDISESVNFDEETDGISQSACLERPNSASSQNSTDTGTSGSATAAQPADNLLGDIDYLEDFVYSPAPQGVTVRCRIIRDKRGMDRGLFPTYYMYLEKEENQKIFLLAARKRKKSKTANYLISIDPVDLSREGESYVGKLRSNLMGTKFTVYDRGICPMKGRGLVGAAHTRQELAAISYETNVLGFKGPRKMSVIIPGMTLNHKQIPYQPQNNHDSLLSRWQNRTMENLVELHNKAPVWNSDTQSYVLNFRGRVTQASVKNFQIVHKNDPDYIVMQFGRVADDVFTLDYNYPLCAVQAFGIGLSSFDSKLACE

SEQ ID NO: 19521 - protein, 520 aa, Homo sapiens
MSQDNDTLMRDILGHELAAMRLQKLEQQRRLFEKKQRQKRQELLMVQANPDASPWLWRSCLREERLLGDRGLGNPFLRKKVSEAHLPSGIHSALGTVSCGGDGRGERGLPTPRTEAVFRNLGLQSPFLSWLPDNSDAELEEVSVENGSVSPPPFKQSPRIRRKGWQAHQRPGTRAEGESDSQDMGDAHKSPNMGPNPGMDGDCVYENLAFQKEEDLEKKREASESTGTNSSAAHNEELSKALKGEGGTDSDHMRHEASLAIRSPCPGLEEDMEAYVLRPALPGTMMQCYLTRDKHGVDKGLFPLYYLYLETSDSLQRFLLAGRKRRRSKTSNYLISLDPTHLSRDGDNFVGKVRSNVFSTKFTIFDNGVNPDREHLTRNTARIRQELGAVCYEPNVLGYLGPRKMTVILPGTNSQNQRINVQPLNEQESLLSRYQRGDKQGLLLLHNKTPSWDKENGVYTLNFHGRVTRASVKNFQIVDPKHQEHLVLQFGRVGPDTFTMDFCFPFSPLQAFSICLSSFN

SEQ ID NO: 19522 - protein, 520 aa, Homo sapiens
MSQDNDTLMRDILGHELAAMRLQKLEQQRRLFEKKQRQKRQELLMVQANPDASPWLWRSCLREERLLGDRGLGNPFLRKKVSEAHLPSGIHSALGTVSCGGDGRGERGLPTPRTEAVFRNLGLQSPFLSWLPDNSDAELEEVSVENGSVSPPPFKQSPRIRRKGWQAHQRPGTRAEGESDSQDMGDAHKSPNMGPNPGMDGDCVYENLAFQKEEDLEKKREASESTGTNSSAAHNEELSKALKGEGGTDSDHMRHEASLAIRSPCPGLEEDMEAYVLRPALPGTMMQCYLTRDKHGVDKGLFPLYYLYLETSDSLQRFLLAGRKRRRSKTSNYLISLDPTLLSRDGDNFVGKVRSNVFSTKFTIFDNGVNPDREHLTRNTARIRQELGAVCYEPNVLGYLGPRKMTVILPGTNSQNQRINVQPLNEQESLLSRYQRGDKQGLLLLHNKTPSWDKENGVYTLNFHGRVTRASVKNFQIVDPKHQEHLVLQFGRVGPDTFTMDFCFPFSPLQAFSICLSSFN

SEQ ID NO: 19523 - protein, 379 aa, Arabidopsis thaliana
MPLSRSLLSRRISNSFRFHQGETTTAPESESIPPPSNMAGSSSWSAMLPELLGEIIRRVEETEDRWPQRRDVVTCACVSKKWREITHDFARSSLNSGKITFPSCLKLPGPRDFSNQCLIKRNKKTSTFYLYLALTPSFTDKGKFLLAARRFRTGAYTEYIISLDADDFSQGSNAYVGKLRSDFLGTNFTVYDSQPPHNGAKPSNGKASRRFASKQISPQVPAGNFEVGHVSYKFNLLKSRGPRRMVSTLRCPSPSPSSSSAGLSSDQKPCDVTKIMKKPNKDGSSLTILKNKAPRWHEHLQCWCLNFHGRVTVASVKNFQLVATVDQSQPSGKGDEETVLLQFGKVGDDTFTMDYRQPLSAFQAFAICLTSFGTKLACE

SEQ ID NO: 19524 - protein, 579 aa, Arabidopsis thaliana
MDESSANSRVSMNGNLYWTAYNSKTVMEQCKRTREIEIWVTKNKIGNGDDGNDVVWIKFMTVSIPNFPMVLCHNSTSYFVDDSISGKSFVLCFSTKKPKQAWVYIVRGDLCKKIKIDEVVFLKAIEITIPISRFVFKSWVDEISLLVGGLSLVAVVSITNRNISLHKMPLSRSLLSRRISNSFRFHQGETTTAPESESIPPPSNMAGSSSWSAMLPELLGEIIRRVEETEDRWPQRRDVVTCACVSKKWREITHDFARSSLNSGKITFPSCLKLPGPRDFSNQCLIKRNKKTSTFYLYLALTPSFTDKGKFLLAARRFRTGAYTEYIISLDADDFSQGSNAYVGKLRSFKFVLRFVFFCLEDECGLKTKGSWFFFGNFNRSDFLGTNFTVYDSQPPHNGAKPSNGKASRRFASKQISPQVPAGNFEVGHVSYKFNLLKSRGPRRMVSTLRCPSPSPSSSSAGLSSDQKPCDVTKIMKKPNKDGSSLTILKNKAPRWHEHLQCWCLNFHGRVTVASVKNFQLVATVDQSQPSGKGDEETVLLQFGKVGDDTFTMDYRQPLSAFQAFAICLTSFGTKLACE

SEQ ID NO: 19525 - protein, 379 aa, Glycine max
  unsure (1)..(379): unsure at all Xaa locations
MSLRKVFRSRKFSKSFKXRCCRRRAPPSRAGSPAPSRRRRXGNNNGWSSMLPEILGEIVRRVDAAEEQWPNRQNVVACACVCKRWRDITREVVRVPSHTGKITFPSCLKQPGPRDVPHQCLIKRNQKTSTFYLYLALTPSFTDKGKFLLAARRYRCGTHTEYIISLDADDLSQGSNAYVGKLSSDFLGTNFTIYDSQPPHSGAKPSSGRASRRFASKQISPQVPAGNFEVGQVSYKFNLLKSRGPRRMVCSLKCPVTPVSPTSGSSDSTPVNGHKMHDKEQAASGYTILKNKAPRWHEHLQCWCLNFHGRVTVASVKNFQLVATVDQSQPGGKGDEETVLLQFGKVGDDTFTMDYRQPLSAFQAFAICLTSFGTKLACE

SEQ ID NO: 19526 - protein, 379 aa, Glycine max; identical to SEQ ID NO: 19525
  unsure (1)..(379): unsure at all Xaa locations

SEQ ID NO: 19527 - protein, 374 aa, Oryza sativa (japonica cultivar-group)
MPRETPPPPPPEGGEVHEVVEGEDGQAEDQEERWARLLPELMSEVVRRVEASGGERWPARKDVVSCACVCRRWRDAAVAVVRPPAESGKITFPSSLKQSSYPSIDGGFWPLIRSMVPGPREFPMQCFIKRNKKNSTFYLYLGLTNATVDKGKFLMAARRFRRGPHTEYIVSLDADDLSQGSNAYMGKLRSDFWGTNFKIYDSKPPYDGAKASSSRSSRRFGSRRISPQVSAGNYEVGQVSYKYNLLKSRGPRRMYCALECPSTQETWENCLKTKFRKPTGNTVLRNKAPRWHEHLQCWCLNFHGRVTVASVKNFQLVAAADPNDPASSKDEETVLLQFGKVDDNIFTMDYRQPLSAFQAFAISLSSFGTKLACE

SEQ ID NO: 19528 - protein, 338 aa, Oryza sativa
  unsure (1)..(338): unsure at all Xaa locations
XETPPPPPPEGGEERWARLLPELMSEVVRRVEASGGERWPARKDVVSCACVCRRWRDAAVAVVRPPAESGKITFPSSLKQPGPREFPMQCFIKRNKKNSTFYLYLGLTNATVDKGKFLMAARRFRRGPHTEYIVSLDADDLSQGSNAYMGKLRSDFWGTNFKIYDSKPPYDGAKASSSRSSRRFGSRRISPQVSAGNYEVGQVSYKYNLLKSRGPRRMYCALECPSTQETWENCLKTKFRKPTGNTVLRNKAPRWHEHLQCWCLNFHGRVTVASVKNFQLVAAADPNDPASSKDEETVLLQFGKVDDNIFTMDYRQPLSAFQAFAISLSSFGTKLACE

SEQ ID NO: 19529 - protein, 354 aa, Oryza sativa
  unsure (1)..(354): unsure at all Xaa locations
LLPELVEEVVRRVEASGGERWPARKDLVSCACVCRRWREAAAAVVRPLPESGRITFPSSLKQPGPKDFPIQCFVKRNKKKSMFYLYLGLLNGTMDKGKFLMAARRFRRGPHTEYVISLDADDLSQGSNAYVGKLRXLSRILXXXSFTFHCSCSLAPCVFFCFCCTIFRSDFWGTNFKIYDNQPPYDDAKTSSTRSSQRFGSTQICPQISAGNFNVGQISYKYNLLKSRGPRRMFCTMECPSTQETWENSLKTKSLRCTGTTXVLRNKAPRWHEHLQCWCLNFHGRVTVASVKNFQLVATADPSHPDSVGDEETVILQFGKVDSNIFTMDYRQPLSAFQAFAICLSSFGTKLACE

SEQ ID NO: 19530 - protein, 435 aa, Triticum aestivum
  unsure (1)..(435): unsure at all Xaa locations
LFFPGWSYCAALVVVVSLPPADPLYPPVVPPAPPRLSPRKLPRALGERDHSPGRPSPAWLCGGAARPGSXSLLARAGRHRRREXLAKGPPRVAPQDAAEQIHEEAEDEERWSRLLPELLTDIVRRVDAGAERWPPRRDVVACACVCRRWRDAAVAVVRPPLECGRITFPSSLKQPGPRDAPMHCFIRRNKSTSTFYLYLSLTQALTDKGKXLLAARRFRRPXGAHTEYIISYDSDDLYPGSNSGVGKLRSDFLGTKFVMYDNQKPYDGAKSLKSRSSRRFATKQISPHVSGDNLEVGQVSYRFNFLKSRGPRRMHCSIQCPVGQGTASDPSKXXKPPSTSSSLSLKNKAPRWHDHLQCWCLNFHGRVTVASVKNFQLVAPAGTSDPWGVGDEETVILQFGKIEDDAFTMDFRHPLSAYQAFAICLTSFGTKLACE

SEQ ID NO: 19531 - protein, 294 aa, Triticum aestivum
  unsure (1)..(294): unsure at all Xaa locations
TPSLASEASTSSRGERSQPRAVAVVRPPLECGRITFPSSLKQPGPRDAPMHCFIRRNKSTSTFYLYLSXTQALTDKGKFLLAARRFRHGAHTEYIISYDSDDLYPGSNSGVGKLRSDFLGTKFVMYDNQKPYDGAKSLKSRSSRRFATKQISPHVSGDNLEVGQVSYRFNFLKSRGPRRMHCSIQCPVGQGTASDPSKXXKPPSTSISRLVXXWHDPAQCWFXHPRVTVASPHNFQLVAPADTSDPWGVWDEETVIQFGKIEDDAFTMDFRHPLSAYQAFAICLTSFGTKLACE

SEQ ID NO: 19532 - protein, 211 aa, Triticum aestivum
  unsure (1)..(211): unsure at all Xaa locations
MPREEPPAXXEVSEVAETGEEKEDGQPEEQEERWARLLPELLSEVVRRVEASGGERWPARKDVVSCACVCRRWRDAAVAVVRPPAVSGKITFPSSLKQPGPREFPMQCFIKRNKKNSTFYLYLGLTTATVDKGKFLMAARRFRRRPHTEYIISLDADDLSQGSNAYMGXKLRSDFCGTNLQVYDTKPPHDGAKASRTRSSRRFGRRRISPX

SEQ ID NO: 19533 - protein, 373 aa, Homo sapiens
MTSKPHSDWIPYSVLDDEGRNLRQQKLDRQRALLEQKQKKKRQEPLMVQANADGRPRSRRARQSEEQAPLVESYLSSSGSTSYQVQEADSLASVQLGATRPTAPASAKRTKAAATAGGQGGAARKEKKGKHKGTSGPAALAEDKSEAQGPVQILTVGQSDHAQDAGETAAGGGERPSGQDLRATMQRKGISSSMSFDEDEEDEEENSSSSSQLNSNTRPSSATSRKSVREAASAPSPTAPEQPVDVEVQDLEEFALRPAPQGITIKCRITRDKKGMDRGMYPTYFLHLDREDGKKVFLLAGRKRKKSKTSNYLISVDPTDLSRGGDSYIGKLRSNLMGTKFTVYDNGVNPQKASSSTLESGTLRQELAAVCYV

SEQ ID NO: 19534 - protein, 520 aa, Cricetulus griseus
MPGSLPLNAEACWPKDVGIVALEIYFPSQYVDQAELEKYDGVDAGKYTIGLGQARMGFCTDREDINSLCLTVVQNLMERNSLSYDCIGRLEVGTETIIDKSKSVKSNLMQLFEESGNTDIEGIDTTNACYGGTAAVFNAVNWIESSSWDGRYALVVAGDIAIYATGNARPTGGVGAVALLIGPNAPLIFDRGLRGTHMQHAYDFYKPDMLSEYPIVDGKLSIQCYLSALDRCYSVYRKKIRAQWQKEGNDNDFTLNDFGFMISHSPYCKLVQKSLARMFLNDFLNDQNRDKNSIYSGLEAFGDVKLEDTYFDRDVEKAFMKASSELFNQKTKASLLVSNQNGNMYTSSVYGSLASVLAQYSPQQLAGKRIGVFSYGSGLAATLYSLKVTQDATPGSALDKVTASLCDLKSRLDSRTCVAPDVFAENMKLREDTHHLANYIPQCSIDSLFEGTWYLVRVDEKHRRTYARRPSTNDHNLGDGVGLVHSNTATEHIPSPAKKVPRLPATAAESESAVISNGEH

SEQ ID NO: 19535 - protein, 508 aa, Mus musculus
MQRLLAPARRVLQVKRAMQETSLTPAHLLSAAQQRFSTIPPAPLAKTDTWPKDVGILALEVYFPAQYVDQTDLEKFNNVEAGKYTVGLGQTRMGFCSVQEDINSLCLTVVQRLMERTKLPWDAVGRLEVGTETIIDKSKAVKTVLMELFQDSGNTDIEGIDTTNACYGGTASLFNAANWMESSYWDGRYALVVCGDIAVYPSGNARPTGGAGAVAMLIGPKAPLVLEQGLRGTHMENAYDFYKPNLASEYPLVDGKLSIQCYLRALDRCYAAYRKKIQNQWKQAGNNQPFTLDDVQYMIFHTPFCKMVQKSLARLMFNDFLSSSSDKQNNLYKGLEAFRGLKLEETYTNKDVDKALLKASLDMFNQKTKASLYLSTNNGNMYTSSLYGCLASLLSHHSAQELAGSRIGAFSYGSGLAASFFSFRVSKDASPGSPLEKLVSSVSDLPKRLDSRRRMSPEEFTEIMNQREQFYHKVNFSPPGDTSNLFPGTWYLERVDEMHRRKYARCPV

SEQ ID NO: 19536 - protein, 508 aa, Mus musculus
MQRLLAPARRVLQVKRAMQETSLTPAHLLSAAQQWFSTIPPAPLAKTDTWPKDVGILALEVYFPAQYVDQTDLEKFNNVEAGKYTVGLGQTRMGFCSVQEDINSLCLTVVQRLMERTKLPWDAVGRLEVGTETIIDKSKAVKTVLMELFQDSGNTDIEGIDTTNACYGGTASLFNAANWMESSYWDGRYALVVCGDIAVYPSGNARPTGGAGAVAMLIGPKAPLVLEQGLRGTHMENAYDFYKPNLASEYPLVDGKLSIQCYLRALDRCYAAYRKKIQNQWKQAGNNQPFTLDDVQYMIFHTPFCKMVQKSLARLMFNDFLSSSSDKQNNLYKGLEAFRGLKLEETYTNKDVDKALLKASLDMFNQKTKASLYLSTNNGNMYTSSLYGCLASLLSHHSAQELAGSRIGAFSYGSGLAASFFSFRVSKDASPGSTLEKLVSSVSDLPKRLDSRRRMSPEEFTEIMNQREQFYHKVNFSPPGDTSNLFPGTWYLERVDEMHRRKYARCPV

SEQ ID NO: 19537 - protein, 480 aa, Mus musculus
EFRAQQRFSTIPPAPLAKTDTWPKDVGILALEVYFPAQYVDQTDLEKFNNVEAGKYTVGLGQTRMGFCSVQEDINSLCLTVVQRLMERTKLPWDAVGRLEVGTETIIDKSKAVKTVLMELFQDSGNTDIEGIDTTNACYGGTASLFNAANWMESSYWDGRYALVVCGDIAVYPSGNARPTGGAGAVAMLIGPKAPLVLEQGLRGTHMENAYDFYKPNLASEYPLVDGKLSIQCYLRALDRCYAAYRKKIQNQWKQAGNNQPFTLDDVQYMIFHTPFCKMVQKSLARLMFNDFLSSSSDKQNNLYKGLEAFRGLKLEETYTNKDVDKALLKASLDMFNQKTKASLYLSTNNGNMYTSSLYGCLASLLSHHSAQELAGSRIGAFSYGSGLAASFFSFRVSKDASPGSPLEKLVSSVSDLPKRLDSRRRMSPEEFTEIMNQREQFYHKVNFSPPGDTSNLFPGTWYLERVDEMHRRKYARCPV

SEQ ID NO: 19538 - protein, 471 aa, Mus musculus
TIPPAPLAKTDTWPKDVGILALEVYFPAQYVDQTDLEKFNNVEAGKYTVGLGQTRMGFCSVQEDINSLCLTVVQRLMERTKLPWDAVGRLEVGTETIIDKSKAVKTVLMELFQDSGNTDIEGIDTTNACYGGTASLFNAANWMESSYWDGRYALVVCGDIAVYPSGNARPTGGAGAVAMLIGPKAPLVLEQGLRGTHMENAYDFYKPNLASEYPLVDGKLSIQCYLRALDRCYAAYRKKIQNQWKQAGNNQPFTLDDVQYMIFHTPFCKMVQKSLARLMFNDFLSSSSDKQNNLYKGLEAFRGLKLEETYTNKDVDKALLKASLDMFNQKTKASLYLSTNNGNMYTSSLYGCLASLLSHHSAQELAGSRIGAFSYGSGLAASFFSFRVSKDASPGSPLEKLVSSVSDLPKRLDSRRRMSPEEFTEIMNQREQFYHKVNFSPPGDTSNLFPGTWYLERVDEMHRRKYARCPV

SEQ ID NO: 19539 - protein, 520 aa, Mus musculus
MPGSLPLNAEACWPKDVGIVALEIYFPSQYVDQAELEKYDGVDAGKYTIGLGQARMGFCTDREDINSLCLTVVQKLMERHSLSYDCIGRLEVGTETIIDKSKSVKSNLMQLFEESGNTDIEGIDTTNACYGGTAAVFNAVNWVESSSWDGRYALVVAGDIAIYATGNARPTGGVGAVALLIGPNAPLIFDRGLRGTHMQHAYDFYKPDMLSEYPVVDGKLSIQCYLSALDRCYSVYRKKIRAQWQKEGKDKDFTLNDFGFMIFHSPYCKLVQKSLARMFLNDFLNDQNRDKNSIYSGLEAFGDVKLEDTYFDRDVEKAFMKASSELFNQKTKASLLVSNQNGNMYTSSVYGSLASVLAQYSPQQLAGKRVGVFSYGSGLAATLYSLKVTQDATPGSALDKITASLCDLKSRLDSRTCVAPDVFAENMKLREDTHHLANYIPQCSIDSLFEGTWYLVRVDEKHRRTYARRPFTNDHSLDEGMGLVHSNTATEHIPSPAKKVPRLPATSAESESAVISNGEH

SEQ ID NO: 19540 - protein, 508 aa, Mus musculus
MQRLLAPARRVLQVKRAMQETSLTPAHLLSAAQQRFSTIPPAPLAKTDTWPKDVGILALEVYFPAQYVDQTDLEKFNNVEAGKYTVGLGQTRMGFCSVQEDINSLCLTVVQRLMERTKLPWDAVGRLEVGTETIIDKSKAVKTVLMELFQDSGNTDIEGIDTTNACYGGTASLFNAANWMESSYWDGRYALVVCGDIAVYPSGNARPTGGAGAVAMLIGPKAPLVLEQGLRGTHMENAYDFYKPNLASEYPLVDGKLSIQCYLRALDRCYAAYRKKIQNQWKQAGNNQPFTLDDVQYMIFHTPFCKMVQKSLARLMFNDFLSSSSDKQNNLYKGLEAFRGLKLEETYTNKDVDKALLKASLDMFNQKTKASLYLSTNNGNMYTSSLYGCLASLISHHSAQELAGSRIGAFSYGSGLAASFFSFRVSKDASPGSPLEKLVSSVSDLPKRLDSRRRMSPEEFTEIMNQREQFYHKVNFSPPGDTSNLFPGTWYLERVDEMHRRKYARCPV

SEQ ID NO: 19541 - protein, 520 aa, Mus musculus
MPGSLPLNAEACWPKDVGIVALEIYFPSQYVDQAELEKYDGVDAGKYTIGLGQARMGFCTDREDINSLCPTVVQKLMERHSLSYDCIGRLEVGTETIIDKSKSVKSNLMQLFEESGNTDIEGIDTTNACYGGTAAVFNAVNWVESSSWDGRYALVVAGDIAIYATGNARPTGGVGAVALLIGPNAPLIFDRGLRGTHMQHAYDFYKPDMLSEYPVVDGKLSIQCYLSALDRCYSVYRKKIRAQWQKEGKDKDFTLNDFGFMIFHSPYCKLVQKSLARMFLNDFLNDQNRDKNSIYSGLEAFGDVKLEDTYFDRDVEKAFMKASSELFNQKTKASLLVSNQNGNMYTSSVYGSLASVLAQYSPQQLAGKRVGVFSYGSGLAATLYSLKVTQDATPGSALDKITASLCDLKSRLDSRTCVAPDVFAENMKLREDTHHLANYIPQCSIDSLFEGTWYLVRVDEKHRRTYARRPFTNDHSLDEGMGLVHSNTATEHIPSPAKKVPRLPATSAESESAVISNGEH

SEQ ID NO: 19542 - protein, 432 aa, Mus musculus
EFRAQQRFSTIPPAPLAKTDTWPKDVGILALEVYFPAQYVDQTDLEKFNNVEAGKYTVGLGQTRMGFCSVQEDINSLCLTVVQRLMERTKLPWDAVGRLEVGTETIIDKSKAVKTVLMELFQDSGNTDIEGIDTTNACYGGTASLFNAANWMESSYWDGRYALVVCGDIAVYPSGNARPTGGAGAVAMLIGPKAPLVLEQGLRGTHMENAYDFYKPNLASEYPLVDGKLSIQCYLRALDRCYAAYRKKIQNQWKQAGNNQPFTLDDVQYMIFHTPFCKMVQKSLARLMFNDFLSSSSDKQNNLYKGLEAFRGLKLEETYTNKDVDKALLKASLDMFNQKTKASLYLSTNNGNMYTSSLYGCLASLLSHHSAQELAGSRIGAFSYGSGLAASFFSFRVSKDASPGSPLEKLVSSVSDLPKRLDSRRRMSPEEF

SEQ ID NO: 19543 - protein, 268 aa, Mus musculus
MPGSLPLNAEACWPKDVGIVALEIYFPSQYVDQAELEKYDGVDAGKYTIGLGQARMGFCTDREDINSLCLTVVQKLMERHSLSYDCIGRLEVGTETIIDKSKSVKSNLMQLFEESGNTDIEGIDTTNACYGGTAAVFNAVNWVESSSWDGRYALVVAGDIAIYATGNARPTGGVGAVALLIGPNAPLIFDRGLRGTHMQHAYDFYKPDMLSEYPVVDGKLSIQCYLSALDRCYSVYRKKIRAQWQKGGFSFSQFSCTRCWCLEGSVIM

SEQ ID NO: 19544 - protein, 139 aa, Mus musculus
ASLYLSTNNGNMYTSSLYGCLASLLSHHSAQELAGSRIGAFSYGSGLAASFFSFRVSKDASPGSPLEKLVSSVSDLPKRLDSRRRMSPEEFTEIMNQREQFYHKVNFSPPGDTSNLFPGTWYLERVDEMHRRKYARCPV

SEQ ID NO: 19545 - protein, 520 aa, Rattus norvegicus
MPGSLPLNAEACWPKDVGIVALEIYFPSQYVDQAELEKYDGVDAGKYTIGLGQARMGFCTDREDINSLCLTVVQKLMERNSLSYDCIGRLEVGTETIIDKSKSVKSNLMQLFEESGNTDIEGIDTTNACYGGTAAVFNAVNWIESSSWDGRYALVVAGDIAIYASGNARPTGGVGAVALLIGPNAPVIFDRGLRGTHMQHAYDFYKPDMLSEYPVVDGKLSIQCYLSALDRCYSVYRKKIRAQWQKEGKDKDFTLNDFGFMIFHSPYCKLVQKSLARMFLNDFLNDQNRDKNSIYSGLEAFGDVKLEDTYFDRDVEKAFMKASAELFNQKTKASLLVSNQNGNMYTSSVYGSLASVLAQYSPQQLAGKRIGVFSYGSGLAATLYSLKVTQDATPGSALDKITASLCDLKSRLDSRTCVAPDVFAENMKLREDTHHLANYIPQCSIDSLFEGTWYLVRVDEKHRRTYARRPSTNDHSLDEGVGLVHSNTATEHIPSPAKKVPRLPATSGEPESAVISNGEH

SEQ ID NO: 19546 - protein, 508 aa, Rattus norvegicus
MQRLLAPARRVLQVKRVMQESSLSPAHLLPAAQQRFSTIPPAPLAKTDTWPKDVGILALEVYFPAQYVDQTDLEKFNNVEAGKYTVGLGQTRMGFCSVQEDINSLCLTVVQRLMERTKLPWDAVGRLEVGTETIIDKSKAVKTVLMELFQDSGNTDIEGIDTTNACYGGTASLFNAANWMESSYWDGRYALVVCGDIAVYPSGNPRPTGGAGAVAMLIGPKAPLVLEQGLRGTHMENAYDFYKPNLASEYPLVDGKLSIQCYLRALDRCYAAYRRKIQNQWKQAGNNQPFTLDDVQYMIFHTPFCKMVQKSLARLMFNDFLSSSSDKQNNLYKGLEAFKGLKLEETYTNKDVDKALLKASLDMFNKKTKASLYLSTNNGNMYTSSLYGCLASLLSHHSAQELAGSRIGAFSYGSGLAASFFSFRVSKDASPGSPLEKLVSSVSDLPKRLDSRRRMSPEEFTEIMNQREQFYHKVNFSPPGDTSNLFPGTWYLERVDEMHRRKYARRPV

SEQ ID NO: 19547 - protein, 416 aa, Rattus norvegicus
MGFCSVQEDINSLCLTVVQRLMERTKLPWDAVGRLEVGTETIIDKSKAVKTVLMELFQDSGNTDIEGIDTTNACYGGTASLFNAANWMESSYWDGRYALVVCGDIAVYPSGNARPTGGAGAVAMLIGPKAPLVLEQGLRGTHMENAYDFYKPNLASEYPLVDGKLSIQCYLRALDRCYAAYRRKIQNQWKQAGNNQPFTLDDVQYMIFHTPFCKMVQKSLARLMFNDFLSSSSDKQNNLYKGLEAFKGLKLEETYTNKDVDKALLKASLDMFNKKTKASLYLSTNNGNMYTSSLYGCLASLLSHHSAQELAGSRIGAFSYGSGLAASFFSFRVSKDASPGSPLEKLVSSVSDLPKRLDSRRRMSPEEFTEIMNQREQFYHKVNFSPPGDTSNLFPGTWYLERVDEMHRRKYARRPV

SEQ ID NO: 19548 - protein, 113 aa, Aerides japonica
TIGLGQDCMAFCTELEDVISMSLTVVTSLLEKYQIDPKQIGRLEVGSETVIDKSKSIKTWLMRIFEEYGNTDIEGVDSTNACYGGTAALFNCVNWVESSSWDGRYGLVVCTCP

SEQ ID NO: 19549 - protein, 388 aa, Staphylococcus aureus
MTIGIDKINFYVPKYYVDMAKLAEARQVDPNKFLIGIGQTEMAVSPVNQDIVSMGANAAKDIITDEDKKKIGMVIVATESAVDAAKAAAVQIHNLLGIQPFARCFEMKEACYAATPAIQLAKDYLATRPNEKVLVIATDTARYGLNSGGEPTQGAGAVAMVIAHNPSILALNEDAVAYTEDVYDFWRPTGHKYPLVDGALSKDAYIRSFQQSWNEYAKRQGKSLADFASLCFHVPFTKMGKKALESIIDNADETTQERLRSGYEDAVDYNRYVGNIYTGSLYLSLISLLENRDLQAGETIGLFSYGSGSVVEFYSATLVVGYKDHLDQAAHKALLNNRTEVSVDAYETFFKRFDDVEFDEEQDAVHEDRHIFYLSNIENNVREYHRPE

SEQ ID NO: 19550 - protein, 389 aa, Staphylococcus carnosus
MTIGIDQLNFYIPNFYVDMAELAEARGVDPNKFLIGIGQSQMAVSPVSQDIVSMGANAAQPILSEQDKKDITMVIVATESAIDSAKASAVQIHHLLGIQPFARCFEMKEACYAATPAIQLAKDYLVPRPKEKVLVIASDTARYGLNSGGEPTQGAGAVAMVISHNPSILELHDDSVAYTEDVYDFWRPSGEIYPLVAGKLSKDAYIKSFQESWNEYAKRHHKSLSDFAALCFHVPFTKMGQKALDSILTDSASEDTQARLNEGYKSATDYNRYVGNVYTGSLYLSLISLLENHKLNGGDNIGLFSYGSGSVGEFFSATLVDNYQDHLDVKAHKAMLDNRKALSVEEYEKFFNRFDNLEFDTETELEVEPKGNFYLKEISDNIRYYDTVK

SEQ ID NO: 19551 - protein, 388 aa, Staphylococcus epidermidis
MNIGIDKISFYVPKYYVDMAKLAEARQVDPNKFLIGIGQTEMTVSPVNQDIVSMGANAAKDIITEEDKKNIGMVIVATESAIDNAKAAAVQIHHLLGIQPFARCFEMKEACYAATPAIQLAKDYLAQRPNEKVLVIASDTARYGIHSGGEPTQGAGAVAMMISHDPSILKLNDDAVAYTEDVYDFWRPTGHQYPLVAGALSKDAYIKSFQESWNEYARRHNKTLADFASLCFHVPFTKMGQKALDSIINHADETTQDRLNSSYQDAVDYNRYVGNIYTGSLYLSLISLLETRDLKGGQTIGLFSYGSGSVGEFFSGTLVDGFKEQLDVERHKSLLNNRIEVSVDEYEHFFKRFDQLELNHELEKSNADRDIFYLKSIDNNIREYHIAE

SEQ ID NO: 19552 - protein, 388 aa, Staphylococcus haemolyticus
MSIGIDKINFYVPKYYVDMAKLAEARQVDPNKFLIGIGQTQMAVSPVSQDIVSMGANAAKDIITDDDKKHIGMVIVATESAIDNAKAAAVQIHNLLGVQPFARCFEMKEACYAATPAIQLAKDYIEKRPNEKVLVIASDTARYGIQSGGEPTQGAGAVAMLISNNPSILELNDDAVAYTEDVYDFWRPTGHKYPLVAGALSKDAYIKSFQESWNEYARREDKTLSDFESLCFHVPFTKMGKKALDSIINDADETTQERLTSGYEDAVYYNRYVGNIYTGSLYLSLISLLENRSLKGGQTIGLFSYGSGSVGEFFSATLVEGYEKQLDIEGHKALLNERQEVSVEDYESFFKRFDDLEFDHATEQTDDDKSIYYLENIQDDIRQYHIPK

SEQ ID NO: 19553 - protein, 398 aa, Streptococcus pneumoniae
MNDKTEVNMTIGIDKIGFATSQYVLKLQDLAEARGIDPEKLSKGLLLKELSIAPLTEDIVTLAASASDSILTEQERQEVDMVIVATESGIDQSKAAAVFVHGLLGIQPFARSFEIKEACYGATAALHYAKLHVENSPESKVLVIASDIAKYGIETPGEPTQGAGSVAMLITQNPRMMAFNNDNVAQTRDIMDFWRPNYSTTPYVNGVYSTQQYLDSLKTTWLEYQKRYQLTLDDFAAVCFHLPYPKLALKGLKKIMDKNLPQEKKDLLQKHFDQSILYSQKVGNIYTGSLFLGLLSLLENTDSLKAGDKIALYSYGSGAVAEFFSGELVEGYEAYLDKDRLNKLNQRTALSVADYEKVFFEEVNLDETNSAQFAGYENQDFALVEILDHQRRYSKVEK

SEQ ID NO: 19554 - protein, 383 aa, Enterococcus faecalis
MTIGIDKISFFVPPYYIDMTALAEARNVDPGKFHIGIGQDQMAVNPISQDIVTFAANAAEAILTKEDKEAIDMVIVGTESSIDESKAAAVVLHRLMGIQPFARSFEIKEACYGATAGLQLAKNHVALHPDKKVLVVAADIAKYGLNSGGEPTQGAGAVAMLVASEPRILALKEDNVMLTQDIYDFWRPTGHPYPMVDGPLSNETYIQSFAQVWDEHKKRTGLDFADYDALAFHIPYTKMGKKALLAKISDQTEAEQERILARYEESIIYSRRVGNLYTGSLYLGLISLLENATTLTAGNQIGLFSYGSGAVAEFFTGELVAGYQNHLQKETHLALLDNRTELSIAEYEAMFAETLDTDIDQTLEDELKYSISAINNTVRSYRN

SEQ ID NO: 19555 - protein, 384 aa, Enterococcus faecium
MKIGIDRLSFFIPNLYLDMTELAESRGDDPAKYHIGIGQDQMAVNRANEDIITLGANAASKIVTEKDRELIDMVIVGTESGIDHSKASAVIIHHLLKIQSFARSFEVKEACYGGTAALHMAKEYVKNHPERKVLVIASDIARYGLASGGEVTQGVGAVAMMITQNPRILSIEDDSVFLTEDIYDFWRPDYSEFPVVDGPLSNSTYIESFQKVWNRHKELSGRGLEDYQAIAFHIPYTKMGKKALQSVLDQTDEDNQERLMARYEESIRYSRRIGNLYTGSLYLGLTSLLENSKSLQPGDRIGLFSYGSGAVSEFFTGYLEENYQEYLFAQSHQEMLDSRTRITVDEYETIFSETLPEHGECAEYTSDVPFSITKIENDIRYYKI

SEQ ID NO: 19556 - protein, 384 aa, Enterococcus faecium
MKIGIDRLSFFIPNLYLDMTELAESRGDDPAKYHIGIGQDQMAVNRANEDIITLGANAASKIVTEKDRELIDMVIVGTESGIDHSKASAVIIHHLLKIQSFARSFEVKEACYGGTAALHMAKEYVKNHPERKVLVIASDIARYGLASGGEVTQGVGAVAMMITQNPRILSIEDDSVFLTEDIYDFWRPDYSEFPVVDGPLSNSTYIESFQKVWNRHKELSGRGLEDYQAIAFHIPYTKMGKKALQSVLDQTDEENQERLMARYEESIRYSRRIGNLYTGSLYLGLTSLLENSKSLQPGDRIGLFSYGSGAVSEFFTGYLEENYQEYLFAQSHQEMLDSRTRITVDEYETIFSETLPEHGECAEYTSDVPFSITKIENDIRYYKI

SEQ ID NO: 19557 - protein, 384 aa, Lactococcus lactis subsp. lactis
MKVGIDKLGFFVPNTFVDMRDLANARNVDPAKFQIGIGQDEMAVNPATQDIITFAANAAASILTEEDKKAIDMIIVGTESSLDESKASAVVVHDLLGIQPFARSIEMKEACYATTAGLTLARDHVLLNPDTKVLVIASDIAKYGLNTGGEPTQGAGSVAMLITADPKILALNNDNVALTQDIYDFWRPFGQAYPSVDGKFSNETYIDAFAKIWKEYSHRTNLKFEDFAAIAFHTPYTKMGKKALLPMLESEKPANAEELMEQFEHGIVYNRRVGNLYTGSLYLSLISLLENSDKLSAGQRIGLFSYGSGTVAEFFSGELVEGYENHLLKIEHQSMLDARTRLSIPEYENMFNQYLDLNHNISFNDETDYSVSEVVDNHRKYKKR

SEQ ID NO: 19558 - protein, 346 aa, Methanothermobacter thermautotrophicus
MAGIVGYGVYIPSYRIKVEEIARVWGDDPQAISRGLVVEEKSVPGPDEDTATISVEAARNALRRSQIDPSEIGAVYVGSESHPYAVKPTATIVAEAVEATPEMTAADLEFACKAGTAGIQACMGLVDSGIIKYGLAVGADTAQGAPGDALEYTASAGGAAYVIGGKNCLADIKETYSFTTDTPDFYRREGMPYPRHGGRFTGEPAYFKHVLGAARGMMEKTGLSADDFDYAVFHQPNGKFYLKAARKLGFESEQVKPGLLTPVIGNTYSGATPVGLAATLDVAEPGARILAVSYGSGAGSDAFIIEVNDLIEERRDLAPSVAEIIKNKRYVDYALYAKFKGKLRMA

SEQ ID NO: 19559 - protein, 388 aa, Staphylococcus aureus subsp. aureus Mu50
MTIGIDKINFYVPKYYVDMAKLAEARQVDPNKFLIGIGQTEMAVSPVNQDIVSMGANAAKDIITDEDKKKIGMVIVATESAVDAAKAAAVQIHNLLGIQPFARCFEMKEACYAATPAIQLAKDYLATRPNEKVLVIATDTARYGLNSGGEPTQGAGAVAMVIAHNPSILALNEDAVAYTEDVYDFWRPTGHKYPLVDGALSKDAYIRSFQQSWNEYAKRQGKSLADFASLCFHVPFTKMGKKALESIIDNADETTQERLRSGYEDAVDYNRYVGNIYTGSLYLSLISLLENRDLQAGETIGLFSYGSGSVGEFYSATLVEGYKDHLDQAAHKALLNNRTEVSVDAYETFFKRFDDVEFDEEQDAVHEDRHIFYLSNIENNVREYHRPE

SEQ ID NO: 19560 - protein, 387 aa, Lactobacillus gasseri
MKVGIDQIGYFTPNKYVDMVDLAHARNQDPNKFLIGIGQKKMSVADPTQDAVSMGINATLRYIDKIDQSKVGLLIFGTESSVDQSKSGSLFVKSALKLDPAVRAFEVKEACFGLTAGLMIAQDFVRLHPDQTAIVIGSDIARYGINTAGEVTQGAGSVSLLVSSNPRILELNEGHSAYSEDINDFWRPNYSKTAKVDGKYSTQVYLDFFKHTFSDYKRQKGLETKDFAAIAYHLPFTKMGLKANRLAIEGVDEETNARLMDSFTASKELNANVGNIYTGSLYLSLLSLLENGGLKAGDLIGLFSYGSGAMAEFYSANVVEGYENELDKAADEALLDKRRKLSVPEYEKIFSASLVDPQNNVELTSDEKKGRYYFAGICDDIRQYRVK

SEQ ID NO: 19561 - protein, 388 aa, Listeria innocua
MKIGIDKIGFYTPAFYVDMTELAEARNIDPNKFTIGIGQDKMAFAPITQDSVTMGANAALQILDEEDLEKIDLVILATESGIDESKAGAVYIHRLLGIQPFSRAIEIKEACYGATAGINLAKDYVAKHPDSKVLVIGSDIARYGLETGGEATQGAGAVAMVISANPRCITLLDDNVFYTEDIMDFWRPVYSEYACVEGKYSTEQYIHFFQTIWNKYSEKFGKKLDDFAAICFHLPYTKMGKKALDTIIETAPSDVQERLLENYRLSTLYSRNVGNIYTGSLYLSFISLLDNQANLQADDKIGFFSYGSGAVGEFFHGELQPDYKQYIRKEAHAELLANRTKLSIPDYETKFKEQLPKDGSTLEIDPASDPAPIILTGIQDHKRQYIKK

SEQ ID NO: 19562 - protein, 388 aa, Listeria monocytogenes EGD-e
MKIGIDKIGFYTPAFYVDMVELAEARNIDPNKFTIGIGQDKMAFAPITQDSVTMGANAALQILDEEDLKKIDLVILATESGIDESKAGAVYIHRLLGIQPFSRAIEIKEACYGATAGINLAKDYVAKHPDSKVLVIGSDIARYGLATGGEATQGAGAVAMVIAADPRCITLEDDNVFYTEDIMDFWRPVYSEYACVEGKYSTEQYIHFFQTIWEKYSAKFGKNLEDFAAICFHLPYTKMGKKALDTIIETAPSDVQEKLLENYRLSTLYSRNVGNIYTGSLYLSFISLLDNQPDLQAEDKIGFFSYGSGAVGEFFHGVLQPDYKKYIRKDEHAELLANRTKLAIPDYETKFKQQLPKDGSIFEVDPASDPAAIVLTGIQEHKRQYIKK

SEQ ID NO: 19563 - protein, 398 aa, Streptococcus pneumoniae TIGR4
MNDKTEVNMTIGIDKIGFATSQYVLKLQDLAEARGIDPEKLSKGLLLKELSIAPLTEDIVTLAASASDSILTEQERQEVDMVIVATESGIDQSKAAAVFVHGLLGIQPFARSFEIKEACYGATAALHYAKLHVENSPESKVLVIASDIAKYGIETPGEPTQGAGSVAMLITQNPRMMAFNNDNVAQTRDIMDFWRPNYSTTPYVNGVYSTQQYLDSLKTTWLEYQKRYQLTLDDFAAVCFHLPYPKLALKGLKKIMDKSLPQEKKDLLQKHFDQSILYSQKVGNIYTGSLFLGLLSLLENTDSLKAGDKIALYSYGSGAVAEFFSGELVEGYEAYLDKDRLNKLNQRTALSVADYEKVFFEEVNLDETNSAQFAGYENQDFALVEILDHQRRYSKVEK

SEQ ID NO: 19564 - protein, 398 aa, Streptococcus pneumoniae R6
MNDKTEVNMTIGIDKIGFATSQYVLKLQDLAEARGIDPEKLSKGLLLKELSIAPLTEDIVTLAASASDSILTEQERQEVDMVIVATESGIDQSKAAAVFVHGLLGIQPFARSFEIKEACYGATAALHYAKLHVENSPESKVLVIASDIAKYGIETPGEPTQGAGSVAMLITQNPRMMAFNNDNVAQTRDIMDFWRPNYSTTPYVNGVYSTQQYLDSLKTTWLEYQKRYQLTLDDFAAVCFHLPYPKLALKGLKKIMDKSLPQEKKDLLQKHFDQSILYSQKVGNIYTGSLFLGLLSLLENTDSLKAGDKIVLYSYGSGAVAEFFSGELVEGYEAYLDKDRLNKLNQRTALSVADYEKVFFEEVNLDETNSAQFAGYENQDFALVEILDHQRRYSKVEK

SEQ ID NO: 19565 - protein, 388 aa, Staphylococcus epidermidis ATCC 12228
MNIGIDKISFYVPKYYVDMAKLAEARQVDPNKFLIGIGQTEMTVSPVNQDIVSMGANAAKDIITEEDKKNIGMVIVATESAIDNAKAAAVQIHHLLGIQPFARCFEMKEACYAATPAIQLAKDYLAQRPNEKVLVIASDTARYGIHSGGEPTQGAGAVAMMISHNPSILKLNDDAVAYTEDVYDFWRPTGHQYPLVAGALSKDAYIKSFQESWNEYARRHNKTLADFASLCFHVPFTKMGQKALDSIINHADETTQDRLNSSYQDAVDYNRYVGNIYTGSLYLSLISLLETRDLKGGQTIGLFSYGSGSVGEFFSGTLVDGFKEQLDVERHKSLLNNRIEVSVDEYEHFFKRFDQLELNHELEKSNADRDIFYLKSIDNNIREYHIAE

SEQ ID NO: 19566 - protein, 350 aa, Pyrobaculum aerophilum str. IM2
MSKVGIVSWGAYIPKYRIRTEEVARIWGDDPLRIVDVYLVDEKSVESLDEDAVTIAVEAARRALKRAGINPKRIGAVYVGTESKPYAVKPISSILVDALGLSNNVFAVDMEFACKAGSEGLVAAIGLVESGRIEYGMTVGTDTSQGEPGEHLEYSASSGGASLIVGRDGVVAELEAVYSYVSDTPDFWRREGSPYPMHGEGFTGEPAYFRHIIGAARGLMERYGYKPSDFAYVVFHQPNGRFPVRAASMLNIPMEKVKPGIVVTHIGNTYNASALMGFAKVLDIAKPGDKILLVPFGSGAGSNAFVFTVTELITERQKSGVPTVEDMLRDKIYIDYAQYLKMRKMIKLFE

SEQ ID NO: 19567 - protein, 482 aa, Anopheles gambiae str. PEST
RKLPNRSVCGAKMSSSNSTTSGQWPEDVGILGLEIVFPSQYVDQTELEAFDGVSAGKYTIGLGQQRMGFCSDREDINSLCLTAARNLLERHSIPLDRIGRLEVGTETIVDKSKSVKSVLMQLFEPEGVTDLEGIDTTNACYGGTAALLNAINWIESSSWDGRLALVVCGDIAVYAQGSARPTGGAGAVAMLIGPNAPLRFERGLRATYMKHAYDFYKPDLSSEYPVVDGKLSIQCYLSALDACYQLYRKKFAQRHPDLVAPVTLDTFDAVIFHSPYCKLVQKSLARIGLNDFVLTPADQRPALFPGFEQFANVRLEDTYFDRDVEKAFMAQYAPVFAAKTKRSLHLASQVGNMYTPSVYSCLVSLLVGSDVDELLGKRVGVFSYGSGLASSMYSIAVTTDRERLAEFKRHLNYVQPLLDRRTKVEPAEFTRLMEVREKNNHAAPYEPSGSVEVLFPGTYYLKAVDSMHRRTYERVPPEQPSS

SEQ ID NO: 19568 - protein, 390 aa, Anopheles gambiae str. PEST
VGVEAASYYVPHLYLEIKELAENRGIDPLKLEKGLGLHKMAFPDVHEDAATFAAEALFRLINDYNINPKEISRVYLGTESALDAAKPTATLAVQMVEQALEEKHGSRSFKNCDALDMTFACIGGVDALQNAIDFVRVNPGKKAVVIASDYAKYELASGGEYTQGGGAVALLVSSQPNLLEIENHWGIGMESVFDFFKPRRHYNKADLNNAPENFPDKIEIFSDEPVFDGQYSNECFKDRIREAYQHFKEEKGVSGNAFADWRFLIFHLPYAFHGKRIFSEIFAIENNLPHTTNEDLKAVAGSDTYKALVNEKIETSQRASSEIGNMYTASVFMALLSALQVSANEGEDLSRKKIGFFAYGSGSKSKVFEATIGANWKSVVEKWNLFENAE

SEQ ID NO: 19569 - protein, 489 aa, Giardia lamblia ATCC 50803
MSRDTHVEHAPLQPPAEVRIAAIAVYIPPIVVSQEEVSSLCKIPLEKITKGLGQHQMAVTVDSEDSVSLALNSLQLLIDDKATQDILSKVTIGRLEVGTESSVDKAKSIKSVLADMLGAVRTTGADIINACLGGVLALENAALWLSAAKYDDETNKYPAAIVVTTDISIYNDIASIPTGGAGAVALLLVKDYPSGIVCDASFNSYWENTTDFYKPHIASPVPVVHGATSIECYLRANLLAAMSNEQQRRLFLDADFACFHTPYCTLPKKMHALLYHALHLESDKEDELFAAIQSRDSNVLSVLSKNCLADPSISEDCERRCVPSLKLSSQTGNIYTGSIFLALVSILEHIEAIAASQVATASPTHYRTPLKDEYLIYASGYGSGMGSLAFKFSVYPNQMPCVLKIKRVAAPPSEGMLRLSLQSNKRLLMHRLSQDPLVQEFLQDRFRQQVKPETDEYITGDREHFSCGEWYLDRVGCDGVRHYKRWLDK

SEQ ID NO: 19570 - protein, 391 aa, Streptococcus pyogenes MGAS8232
MTIGIDKIGFATSQYVLKLEDLALARQVDPAKFSQGLLIESFSVAPITEDIITLAASAADQILTDEDRAKIDMVILATESSTDQSKASAIYVHHLVGIQPFARSFEVKQACYSATAALDYAKLHVASKPDSRVLVIASDIARYGVGSPGESTQGSGSIALLVTANPRILALNKDNVAQTRDIMDFWRPNYSFTPYVDGIYSTKQYLNCLETTWQAYQKRENLQLSDFAAVCFHIPFPKLALKGLNNIMDNTVPPEHREKLIEAFQASITYSKQIGNIYTGSLYLGLLSLLENSKVLQSGDKIGFFSYGSGAVSEFYSGQLVAGYDKMLMTNRQALLDQRTRLSVSKYEDLFYEQVQLDDNGNANFDIYLTGKFALTAIKEHQRIYRTNDKN

SEQ ID NO: 19571 - protein, 388 aa, Paracoccus zeaxanthinifaciens
MKVPKMTVTGIEAISFYTPQNYVGLDILAAHHGIDPEKFSKGIGQEKIALPGHDEDIVTMAAEAALPIIERAGTQGIDTVLFATESGIDQSKAAAIYLRRLLDLSPNCRCVELKQACYSATAALQMACAHVARKPDRKVLVIASDVARYDRESSGEATQGAGAVAILVSADPKVAEIGTVSGLFTEDIMDFWRPNHRRTPLFDGKASTLRYLNALVEAWNDYRANGGHEFADFAHFCYHVPFSRMGEKANSHLAKANKTPVDMGQVQTGLIYNRQVGNCYTGSIYLAFASLLENAQEDLTGALVGLFSYGSGATGEFFDARIAPGYRDHLFAERHRELLQDRTPVTYDEYVALWDEIDLTQGAPDKARGRFRLAGIEDEKRIYVDRQA

SEQ ID NO: 19572 - protein, 349 aa, Methanothermobacter thermautotrophicus str. Delta H
MILMAGIVGYGVYIPSYRIKVEEIARVWGDDPQAISRGLVVEEKSVPGPDEDTATISVEAARNALRRSQIDPSEIGAVYVGSESHPYAVKPTATIVAEAVEATPEMTAADLEFACKAGTAGIQACMGLVDSGIIKYGLAVGADTAQGAPGDALEYTASAGGAAYVIGGKNCLADIKETYSFTTDTPDFYRREGMPYPRHGGRFTGEPAYFKHVLGAARGMMEKTGLSADDFDYAVFHQPNGKFYLKAARKLGFESEQVKPGLLTPVIGNTYSGATPVGLAATLDVAEPGARILAVSYGSGAGSDAFIIEVNDLIEERRDLAPSVAEIIKNKRYVDYALYAKFKGKLRMA

SEQ ID NO: 19573 - protein, 350 aa, Methanopyrus kandleri AV19
MIPSERVGIVGYGAYVPRYRIKAEEIAAVWGDDVDSIKSGLMIEEKSVPSETEDSATIAVEAAKNAVARAEIDPKDIGAIYVGSESPPYAVKPTATIVAAAIGATPDLTAADYEFACKAGTAAIQTCAGLVASGMIKYGLAIGADTAQGAPGDPLEYTAAAGGAAFVIGRKKLVAEMEGTYSYTTDTPDFWRREGQPYPRHGGRFTGAPAYFKHIIRAARGLMEELDLSPEDFDYAVFHQPNGKFPRKVARSLGFEPEQVEPTIVVDRVGNTYSGSSLLGFTAALDRAEPGDRILVVSYGSGAGSDAFSFVVTERIEEVREKAPLLEEYLEDRVYVTYGEYAKMKKKLKF

SEQ ID NO: 19574 - protein, 391 aa, Streptococcus pyogenes MGAS315
MTIGIDKIGFATSQYVLKLEDLALARQVDPAKFSQGLLIESFSVAPITEDIITLAASAADQILTDEDRAKIDMVILATESSTDQSKASAIYVHHLVGIQPFARSFEVKQACYSATAALDYAKLHVASKPDSRVLVIASDIARYGVGSPGESTQGSGSIALLVTADPRILALNEDNVAQTRDIMDFWRPNYSFTPYVDGIYSTKQYLNCLETTWQAYQKRENLQLSDFAAVCFHIPFPKLALKGLNNIMDNTVPPEHREKLIEAFQASITYSKQIGNIYTGSLYLGLLSLLENSKVLQSGDKIGFFSYGSGAVSEFYSGQLVAGYDKMLMTNRQALLDQRTRLSVSKYEDLFYEQVQLDDNGNANFDIYLTGKFALTAIKEHQRIYHTNDKN

SEQ ID NO: 19575 - protein, 385 aa, Leuconostoc mesenteroides subsp. mesenteroides ATCC 8293
MAIGIDKLSFYTSEYVLDLVELAQRRGVDPNKYTIGIGQDKQSVIPNYEDVVTMGANAAAKIIDNDDRQQIDLIIFATESGIDNSKSSALYVQKLLNLSEFSRTIEIKQACYAGTFGLMQARDYVASHSGKRVLVIASDIARYGLNTPGEVTQGGGAVAMIVSESPHIATINSDSVYMSRDVADFWRPIDRTEAIVDGHLSTDIYKEMFLTLWQRYKDQSGRTIADFAGFTFHLPYTKMGKKAFDQIIDEADERTQGRLLKNLKASQKFSREVGNLYTGSVYLSLLSLLSYAQDLVAGEQLAIFSYGSGAEAELYSITLQENFFKYVPANETKNELADRKKVSVDQYEQIFNSQLLDSHENVSSDHPDADHFQFLGWQNGERQYK

SEQ ID NO: 19576 - protein, 389 aa, Oenococcus oeni MCW
MEIGIDQISFFTPNLYLDLTELAEKRGVDPNKYLVGIGQEKQSIVPPTQDSVSMAANAASILLEQKSTEFLNSIDEILFASESGIDNSKSGAVYLQKLLNLKKNMRAIEIKQACYGGTFALMTAFDYVKLHPNKRILVVASDIARYGLKSAGEVTQGAGAVAMLVSTQPRLASYNWDSVFQSEDLMDFWRPLDQSEALVFGKMSQEIYEKFFYEIWQTYSQKNLKKVSDFAAFVFHLPFTKMGKKALDQINDQIDESKKDQLEKNRLAGQIYNRKVGNLYTGSLYLSLISLLKNNILKNNDRIAMFSYGSGAEGELYSLSLAADYRQAILGDPAQMIASRRKVSVDEYEGLFRAFPEDSEDHELTNSYDSSHFQLKRIKDHQRIYGDNF

SEQ ID NO: 19577 - protein, 346 aa, Kitasatospora griseola
MSVPAADEDIVTLAATAAAPIVARHGSDRIRTVVLATESSIDQAKSAGVYVHSLLGLPSATRVVELKQACYGATAGLQFAIGLVQRDPAQQVLVIASDVSKYDLDSPGEATQGAAAVAMLVGADPGLVRIEDPSGLFTVDVMDFWRPNYRTTALVDGQESIGAYLQAVEGAWKDYSERGGHSLEQFAAFCYHQPFTKMAHKAHRHLLNYCSHDIHHDDVTRAVGRTTAYNRVIGNSYTASVYLGLAALLDQADDLTGERIGFLSYGSGSVAEFFGGIVVAGYRDRLRTAANIEAVSRRRPIDYAGYRELHEWAFPARRGAHSTPQQTTGPFRLSGISGHKRLYRAC

SEQ ID NO: 19578 - protein, 390 aa, Streptococcus agalactiae 2603V/R
MKIGIDKIGFATSQYVLEMTDLAIARQVDPEKFSKGLLLDSLSITPVTEDIVTLAASAANDILSDEDKETIDMVIVATESSIDQSKAASVYVHQLLEIQPFARSFEMKEACYSATAALDYAKLHVEKHPDSKVLVIASDIAKYGIKSTGESTQGAGSIAMLISQNPSILELKEDHLAQTRDIMDFWRPNYSDVPYVNGMFSTKQYLDMLKTTWKVYQKRFNTSLSDYAAFCFHIPFPKLALKGFNKILDNNLDEQKKAELQENFEHSITYSKKIGNCYTGSLYLGLLSLLENSQNLKAGDQIAFFSYGSGAVAEIFTGQLVDGYQNKLQSDRMDQLNKRQKITVTEYEKLFFEKTILDENGNANFNTYRTGTFSLDSICEHQRIYKKINN

SEQ ID NO: 19579 - protein, 391 aa, Streptococcus mutans UA159
MRIGIDKIGFTSSQYVLNMKDLAEARGEDPQKFSKGLLLNALSIAPITDDVVTLAAGSANEILTAEDKEKIDMVILATESSVDQSKAGAVYVHSLLGIQPFARSFEMKEACYSATAALNYAKLHVEKHPDTRVLVLASDIAKYGIGTPGESTQGAGSIAMLVKKDPRILILHDETLAQTRDIMDFWRPNYTTTPYVNGMYSTKQYLDMLKTTWAEYQKRFDVSLTDFAAFCFHLPFPKLALKGFNKIMDKQVPSDLQEKLKVNFEASILYSKQIGNIYTGSLFLGLLSLLENSQNLVAGDKIALFSYGSGAVAEIFTGTLVKGFKEQLQTNRLDKLKRRTPLSVENYEKIFFEEAQLDDKGNASFKEYQTGPFALKEILEHQRIYGKVNES

SEQ ID NO: 19580 - protein, 390 aa, Streptococcus agalactiae NEM316
MKIGIDKIGFATSQYVLEMTDLAIARQVDPEKFSKGLLLDSLSITPVTEDIVTLAASAANDILSDEDKETIDMVIVATESSIDQSKAASVYVHQLLEIQPFARSFEMKEACYSATAALDYAKLHVEKHPDSKVLVIASDIAKYGIKSTGESTQGAGSIAMLISQNPSILELKEDRLAQTRDIMDFWRPNYSDVPYVNGMFSTKQYLDMLKTTWKEYQKRFNTSLSDYAAFCFHIPFPKLALKGFNKILDNNLDEQKKAELQENFEHSITYSKKIGNCYTGSLYLGLLSLLENSQNLKAGDQIAFFSYGSGAVAEIFTGQLVDGYQNKLQSDRMDQLNKRQKITVTEYEKLFFEKTILDENGNANFNTYRTGTFSLDSICEHQRIYKKINN

SEQ ID NO: 19581 - protein, 412 aa, Yersinia pestis CO92
MNSIGIEKISIYPSSLALKLSELAQARGGDNKYIQESLMVIKRSLVPQWEDAVTLAVNSAKDMLNDQDRSDIGLFIIATESGLDQEKAISTWAHRYLGLPATCRVFELKSACHAGAAALKMAESWISSGLNRGKKVLLINVDISNNMICHGKMEYSLGAGAIALLISDNPVFAVIETGKSGIHTHEVTDVIRPLPWKEVAFDVEASLFSYMDGLENAFEEYCHQTPEARESTYFNYNLYHVPFPGISKEAHKVLLELQGLFGKEALATSFKQKVMPSLYYAQKIGATYCGSIFLSLFSLMVKAPEIKSGDRIGVYSYGSGSCAEYFSMQVGDQAVEIAQQQGAALDILLTQRKILDVAAYEQLENARSAQMQGKDYRLDGDNLQDWYTHHYSGSGLLILERIDNHLRRYRYA

SEQ ID NO: 19582 - protein, 345 aa, Methanocaldococcus jannaschii
MAGIVGYGAYIPKYRIKVEEIARVWNKDPESIKKGLLVYEKAVPSLDEDTATIAVEAARNALKRAEIDPKDIGAVYVGSESHPYAVKPTATIVAEAIDATPDLTAADLEFACKAGTAGIQMCMGLVESGLIKYGLAIGADTAQGAPGDALEYTAAAGGAAYIIGKSNVIAEFNGTYSYTTDTPDFWRREGKPYPRHGGRFTGEPAYFRHVINAAKGLMEKMGTKPEDYDYCVFHQPNGKFYIRVAKILGFKEEQYKIGLLTPYIGNTYSGAVPLGLSNVLDNCEGGERILAVSYGSGAGSDAFDITVTDRINKVKDKAPKTAYYLERKEYIDYAIYAKFRKKIKM

SEQ ID NO: 19583 - protein, 389 aa, Lactobacillus plantarum WCFS1
MKVGIDKLHFATSHLYVDMAELATARQAEPDKYLIGIGQSKMAVIPPSQDAVTLAANAAAPMLTATDIAAIDLLVVGTESGIDNSKASAIYVAKLLGLSQRVRTIEMKEACYAATAGVQLAQDHVRVHPDKKALVIGSDVARYGLNTPGEPTQGGGAVAMLISADPKVLALGTESSLLSEDVMDFWRPLYHTEALVDGKYSSNIYIDYFQDVFKNYLQTTQTSPDTLTALVFHLPYTKMGLKALRSVLPLVDAEKQAQWLTHFEHARQLNRQVGNLYTGSLYLSLLSQLLTDPQLQPGNRLGLFSYGSGAEGEFYTGVIQPDYQAGLDHGLPQRLARRRRVSVAEYEALFSHQLQWRADDQSVSYADDPHRFVLTGQKDEQRQYLDQQV

SEQ ID NO: 19584 - protein, 388 aa, Oceanobacillus iheyensis HTE831
MKIGIDKIGFYAPHLYLDMNELAEERGVEPEKFTIGIGQEKMAVPPITQDTVTLAANAAAQILDETDKQDIDMVIFGTESGIDHSKSAAVNVHQLLGLQPHARAIELKQACYGATAGIQMARGHIALNPNRKVLVLGSDIARYGLRTPGESTQGAGAVALLISADPSIMAIEQESTYYTDDIMDFWRPVYSDIAFVDGKYSNEQYIAFFQKVWNAYKEQTNRGLEDFAAICFHLPYTKMGLKALRTVLDEVEENTQTHLKEQYRLSTQYNRNIGNIYTGSLYLSLLSLLENSNELTAGDKIGMYSYGSGAVGEFFSGVLQEGFEKQLHQTKHNAMFEKRQKISVSEYEKIFEQQIPTDGSVTEWSTKEDPAEICLTGIQNHQRIYQVK

SEQ ID NO: 19585 - protein, 343 aa, Archaeoglobus fulgidus
MIGIVSYGSYVPKFRIRVEEIARVWGEDAKKIKDGLGVHEKSVPGMDEDAATIAVEAAREAIRRAGINPEEIGAVFVGSESHPYAVKPTATIVGEALGVGNDYFAADLEFACKAGTAGMQICYSMVKAGMIKYGLAIGADTSQARPGDALEYAAAAGGAAFIIGENPIAEVEATYSFTSDTPDFWRRDLQPYPSHGGRFTGLPAYFRHVISAAKGLMEKYGYKVEDFDYAVFHMPNAKFPVRAAKMLGFSMEHISQGLVVKAIGNTYSGSSLLGLAATLDVAEPDERILLVSFGSGAGSDAFAIRVTDAIENYPREPKVWEKIERKAYVDYAIYLKHRRKIKA

SEQ ID NO: 19586 - protein, 303 aa, Archaeoglobus fulgidus DSM 4304
MIGIVSYGSYVPKFRIRVEEIARVWGEDAKKIKDGLGVHEKSVPGMDEDAATIAVEAAREAIRRAGINPEEIGAVFVGSESHPYAVKPTATIVGEALGVGNDYFAADLEFACKAGTAGMQICYSMVKAGMIKYGLAIGADTSQARPGDALEYAAAAGGAAFIIGENPIAEVEATYSFTSDTPDFWRRDLQPYPSHGGRFTGLPAYFRHVISAAKGLMEKYGYKVEDFDYAVFHMPNAKFPVRAAKMLGFSMEHISQGLVVKAIGNTYSGSSLLGLAATLDVAEPDERILLVSSAQELEVMPLP

SEQ ID NO: 19587 - protein, 407 aa, Borrelia burgdorferi B31
MRIGISDIRIFLPLNYLDFSVLLENPLYFSNEVFFKKINRAIDATLQKGFRFTSPNEDSVTMASSAVKLIFDNNNLDLSKIRILLGGTETGVDHSKAISSYVFGALKQSGICLGNNFLTFQVQHACAGAAMSLHTVASVLSHSNNSEYGIVFSSDIAHYSNLTTAEITQGAGATAILIEKNPKLLSINLSEFGVYTDDVDDFFRPFGSVEAKVRGQYSVECYNNANENALRDFAFKKQLSMKDLFSNYRFVLHVPFAKMPIDSMHYILKKYYSDDESVRNAYLESIDFYDGVEAAMEVGNLYTGSIFLSLAFYLKRVFSKKDITGEKILFCSYGSGNIMIIYELTIEKSAFDVIKLWDLEGLIKNRNNANFEEYKDFFQNKIIPGESRGFYLKELRNDGYRVYGYRA

SEQ ID NO: 19588 - protein, 383 aa, Enterococcus faecalis V583
MTIGIDKISFFVPPYYIDMTALAEARNVDPGKFHIGIGQDQMAVNPISQDIVTFAANAAEAILTKEDKEAIDMVIVGTESSIDESKAAAVVLHRLMGIQPFARSFEIKEACYGATAGLQLAKNHVALHPDKKVLVVAADIAKYGLNSGGEPTQGAGAVAMLVASEPRILALKEDNVMLTQDIYDFWRPTGHPYPMVDGPLSNETYIQSFAQVWDEHKKRTGLDFADYDALAFHIPYTKMGKKALLAKISDQTEAEQERILARYEESIVYSRRVGNLYTGSLYLGLISLLENATTLTAGNQIGLFSYGSGAVAEFFTGELVAGYQNHLQKETHLALLDNRTELSIAEYEAMFAETLDTDIDQTLEDELKYSISAINNTVRSYRN

SEQ ID NO: 19589 - protein, 351 aa, Thermoplasma acidophilum
MSGIVTYGSYIPRYRIKPDEIARVWGENPDHIKNGIYILSKSVPAPDEDVATISVEAARNALKRKKIDPKEIGAIYVGSESHPYAVKPTATIVGSAIGVDFSLFAADYEFACKAGTAGMQNVKAMVDSGMIKYGLAIGADTSQGAPGDALEYSASAGGTAFIIGKDDTIAEINSTLSVASDTPDFWRREGQPYPSHGERFTGEPAYFRHVITAAKMMMERMETQPKDYDYVVFHQPNGKFPTRAAKMLGFEEKQYKDGLLTPYIGNTYSGSMMTGLSSILDVSKPGDHILAVSFGSGAGSDAFDITVTDRIEEMDRNRAPTIKKMLENVKWVDYAIYAKYKKKIIVGDGIE

SEQ ID NO: 19590 - protein, 474 aa, Pinus sylvestris
MASRPENVGILAMEIYFPTTCVQQEDLETFDGVSKGKYTIGLGQDCMTFCTDLEDVISMSLTAVTSLLEKYEIDPKQIGRLEVGSETVIDKSKSIKTWLMHIFEKCGNTEIEGVDSTNACYGGTAALFNCINWIESSSWDGRYGLVVATDSAVYAEGAARPTGGAAAVAMLIGPNAPIATESKYRGTHMAHVYDFYKPNLASEYPVVDGKLSQTCYLMALDSCYKRFCNKFEKEEGRQFSLLDTDYIAFHSPYNKLVQKSFGRLLFNDFSRHARSVGKDAQEKLEPFAGLSEQDSYNSRDLEKVSQQLAKPLYDAKIQPSTLLPKQVGNMYTASLYAALASIIHNKHTTLDGQRVMMFSYGSGLASTLFSFKIREGQFPFTLSNITEVMDVQNKLDSRHEFLPEDFVENLKRMETLYGAKDFVSTSQLSLLRPGAFYLTKVDSMYRRFYSRKVISAGDNFEKSKLANGTTHDEL

SEQ ID NO: 19591 - protein, 420 aa, Myxococcus xanthus
MGPVGIEAMNAYCGIARLDVLQLATHRGLDTSRFANLLMEEKTVPLPYEDPVTYGVNAARPILDQLTAAERDSIELLVACTESSFDFGKAMSTYLHQHLGLSRNCRLIELKSACYSGVAGLQMAVNFILSGVSPGAKALVVASDLSRFSIAEGGDASTEDWSFAEPSSGAGAVAMLVSDTPRVFRVDVGANGYYGYEVMDTCRPVADSEAGDADLSLLSYLDCCENAFREYTRRVPAANYAESFGYLAFHTPFGGMVKGAHRTMMRKFSGKNRGDIEADFQRRVAPGLTYCQRVGNIMGATMALSLLGTIDHGDFATAKRIGCFSYGSGCSSEFFSGVVTEEGQQRQRALGLGEALGRRQQLSMPDYDALLKGNGLVRFGTRNAELDFGVVGSIRPGGWGRPLLFLSAIRDFHRDYQWIS

SEQ ID NO: 19592 - protein, 461 aa, Arabidopsis thaliana
MAKNVGILAMDIYFPPTCVQQEALEAHDGASKGKYTIGLGQDCLAFCTELEDVISMSFNAVTSLFEKYKIDPNQIGRLEVGSETVIDKSKSIKTFLMQLFEKCGNTDVEGVDSTNACYGGTAALLNCVNWVESNSWDGRYGLVICTDSAVYAEGPARPTGGAAAIAMLIGPDAPIVFESKLRASHMAHVYDFYKPNLASEYPVVDGKLSQTCYLMALDSCYKHLCNKFEKIEGKEFSINDADYIVFHSPYNKLVQKSFARLLYNDFLRNASSIDEAAKEKFTPYSSLTLDESYQSRDLEKVSQQISKPFYDAKVQPTTLIPKEVGNMYTASLYAAFASLIHNKHNDLAGKRVVMFSYGSGSTATMFSLRLNDNKPPFSISNIASVMDVGGKLKARHEYAPEKFVETMKLMEHRYGAKDFVTTKEGIIDLLAPGTYYLKEVDSLYRRFYGKKGEDGSVANGH

SEQ ID NO: 19593 - protein, 461 aa, Arabidopsis thaliana
MAKNVGILAMDIYFPPTCVQQEALEAHDGASKGKYTIGLGQDCLAFCTELEDVISMSFNAVTSLFEKYKIDPNQIGRLEVGSETVIDKSKSIKTFLMQLFEKCGNTDVEGVDSTNACYGGTAALLNCVNWVESNSWDGRYGLVICTDSAVYAEGPARPTGGAAAIAMLIGPDAPIVFESKLRASHMAHVYDFYKPNLASEYPVVDGKLSQTCYLMALDSCYKHLCNKFEKIEGKEFSINDADYIVFHSPYNKLVQKSFARLLYNDFLRNASSIDEAAKEKFTPYSSLTLDESYQSRDLEKVSQQIAKPFYDAKVQPTTLIPKEVGNMYTASLYAAFASLIHKKHNDLAGKRVVMFSYGSGSTATMFSLRLNDNKPPFSISNIASVMDVGGKLKARHEYAPEKFVETMKLMEHRYGAKDFVTTKEGIIDLLAPGTYYLKEVDSLYRRFYGKKGEDGSVANGH

SEQ ID NO: 19594 - protein, 406 aa, Arabidopsis thaliana
MSFNAVTSLFEKYKIDPNQIGRLEVGSETVIDKSKSIKTFLMQLFEKCGNTDVEGVDSTNACYGGTAALLNCVNWVESNSWDGRYGLVICTDSAVYAEGPARPTGGAAAIAMLIGPDAPIVFESKLRASHMAHVYDFYKPNLASEYPVVDGKLSQTCYLMALDSCYKHLCNKFEKIEGKEFSINDADYIVFHSPYNKLVQKSFARLLYNDFLRNASSIDEAAKEKFTPYSSLTLDESYQSRDLEKVSQQIAKPFYDAKVQPTTLIPKEVGNMYTASLYAAFASLIHKKHNDLAGKRVVMFSYGSGSTATMFSLRLNDNKPPFSISNIASVMDVGGKLKARHEYAPEKFVETMKLMEHRYGAKDFVTTKEGIIDLLAPGTYYLKEVDSLYRRFYGKKGEDGSVANGH

SEQ ID NO: 19595 - protein, 461 aa, Brassica juncea
MAKNVGILAMDIYFPPTCVQQEALEAHDGASKGKYTIGLGQDCLAFCTELEDVISMSFNAVTSLLEKYKIDPKQIGRLEVGSETVIDKSKSIKTFLMQLFEKCGNTDVEGVDSTNACYGGTAALLNCVNWVESNSWDGRYGLVICTDSAVYAEGPARPTGGAAAIAMLIGPDAPIVFESKLRGSHMAHVYDFYKPNLASEYPVVDGKLSQTCYLMALDSCYKHLCNKFEKLEGKEFSINDADYFVFHSPYNKLVQKSFARLLYNDFLRNASSIDEAAKEKFTPYSSLSLDESYQSRDLEKVSQQLAKTYYDAKVQPTTLVPKQVGNMYTASLYAAFASLVHNKHSDLAGKRVVMFSYGSGSTATMFSLRLCENQSPFSLSNIASVMDVGGKLKARHEYAPEKFVETMKLMEHRYGAKEFVTSKEGILDLLAPGTYYLKEVDSLYRRFYGKKGDDGSITNGH

SEQ ID NO: 19596 - protein, 461 aa, Brassica juncea
MAKNVGILAMDIYFPPTCVQQEALEAHDGASKGKYTIGLGQDCLAFCTELEDVISMSFNAVTSLLDKYKIDPKQIGRLEVGSETVIDKSKSIKTFLMQLLEKCGNTDVEGVDSTNACYGGTAALLNCVNWVESNSWDGRYGLVICTDSAVYAEGPARPTGGAAAIAMLIGPNAPIVFESKLRGSHMAHVYDFYKPNLASEYPVVDGKLSQTCYLMALDSCYKHMCNKFEKLEGKEFSINDADYFVFHSPYNKLVQKSFARLLYNDFLRNASSIDEAAKEKFTPYSSLSLDESYQSRDLEKVSQQVAKTFYDAKVQPTTLVPKEVGNMYTASLYAAFASLIHNEHSDLAGKRVVMFSYGSGSTATMFSLRLCENQSPFSLSNIASVMDIGGKLKARHEYAPEKFVETMKLMEHRYGAKEFVTSKEGILELLAPGTYYLKEVDSLYRRFYGKKGDDGSIANGH

SEQ ID NO: 19597 - protein, 461 aa, Brassica juncea
MAENVGILAMDIYFPPTCVQQEALEAHDGASKGKYTIGLGQDCLAFCTELEDVISMSFNAVTSLLDKYKIDPMQIGRLEVGSETVIDKSKSIKTFLMQLFEKCGNTDVEGVDSTNACYGGTAALLNCVNWVESNSWDGRYGLVICTDSAVYAEGPARPTGGAAAIAMLIGPNAPIVFESKLRGSHMAHVYDFYKPNLASEYPVVDGKLSQTCYLMALDSCYKHLCNKFEKLEGKEFSINDADYFVFHSPYNKLVQKSFARLLYNDFLRNASSIDEAAKEKFIPYSSLSLDESYQSRDLEKVSQQVAKTFYDGKVQPTTLVPKEVGNMYTASLYAAFASLIHNKHSDLAGKRVVMFSYGSGSTATMFSLRLCENKSPFSLSNIASVMDIGGKLKARHEYAPEKFVETMKLMEHRYGAKDFVTSKEGILELLAPGTYYLKEVDSLYRRFYGKKGDDGSIANGH

SEQ ID NO: 19598 - protein, 453 aa, Brassica juncea
MAKNVGILAMDIYFPPTCVQQEALEAHDGASKGKYTIGLGQDCLAFCTELEDVISMSFNAVTSLLEKYKIDPNQIGRLEVGSETVIDKSKSIKTFVMQLFEKCGNTDVEGVDSTNACYGGTAALLNCVNWVESNSWDGRYGLVICTDSAVYAEGPARPTGGAAAIAMLIGPDAPIVFESKLRGSHIPHVYDFYKPNLASEYPVVDGKLSQTCYLMALDSCYKHLCNKFEKLEGKEFSINDADYFVFHSPYNKLVQKSFARLLYNDFLRNASSIDEAAKEKFTPYSSLSLDESYQSRDLEKVSQQLAKTFYDAKVQPTTLVPKQVGNMYTASLYAAFASLIHNKHNDLVGKRVVMFSYGSGSTATMFSLRLCENQSPFSLSNIASVMDVGVSPEKFVETMKLMEHRYGAKEFVTSKEGILDLLAPGTYYLKEVDSLYRRFYGKKGDDGSVANGQ

SEQ ID NO: 19599 - protein, 463 aa, Oryza sativa (japonica cultivar-group)
MAAERKDVGILAMDIYFPPTCVLQDELENHDGVSKGKYTIGLGQDSMAFCTEVEDVISMSLTVVKSLLENYKIDPKCIGRLEVGSETVIDKSKSIKTWLMQIFEECGNTDIEGVDSSNACYGGTAALFNCVNWVESNSWDGRYGLVVCTDSAVYAEGPARPTGGAAAIAMLIGPNAPVSFESKYRGSHMAHVYDFYKPDLASEYPVVDGKLSQTCYLMALDSCYNVFCKKYEKLEGKQFSIHDADYFVFHSPYNKLVQKSFARLYYNDFLRKCSTVEDGSREKLEPYSGLSSEESYQSRELEKASQQVAKHLYDSKVQPITLIPKQVGNMYTASLYAALASVMHNKNETLAGQRIVMFSYGSGLTSTMFSFKINEGQHPFILSNIAGILDVSKKLESRHVVAPEKFVAALKLMEHRYGAKDFTTSQDTSLLAPGTYYLTHVDSMYRRFYAVKGQAVTEVSNGH

SEQ ID NO: 19600 - protein, 468 aa, Dictyostelium discoideum
MKKTKDIGICAIDIYFPQTYVNQSELKKYDKVSNGKYTIGLGQTNMSFVGDREDIVSMAMTSVKMMMSKYSIDYQSIGRLEVGTETIIDKSKSVKSSIMSLFQEYGNTSLEGVDTLNACYGGTNALFNSLQWIESSYWDGRYALVVTGDIAVYSKGAARPTGGAGVVTMLIGPNATLIFDQSLRGTHMENVNDFYKPDLSSEYPYVDGKLSIECYLRALDKCYLEYKKKFESINDDNKFSMDSFDYVCFHSPYNRLVQKSYARLIYNDFLQNPNNPKYQDLLPFKDLSTGKDSYINSKLDQITLKLSLDDFKTKVNPSTLLSKECGNSYCGSVYSGILSLLSNVNDLNNKKVLVFSYGSGLAASLFSFRINNNKNRNNNNNNNNCFFKTTNDIGKISNIKERLSNRVKVSPEEFTRILDIREKSHQMVGARTPIDTLDYISAGTFYLEKIDEKLIRHYKSKPIISSKL

SEQ ID NO: 19601 - protein, 163 aa, Dictyostelium discoideum
RHENDYATKVAPTTLLAKQLGNTYCGSTYSGLLSLLDEKSNDLVGKRVLTFSYGSGLAASAFSFKVEKPINHIVEKVDLKNRLAKRVRVEPEIFTEKLSLRETRHNLKNYVPSDETTNMFPGSFYLSSVDKAGIRKFDRTYSTSAVLGAFQRRQQISHQQSNL

SEQ ID NO: 19602 - protein, 2003 aa, Oryza sativa
  unsure (1)..(2003): unsure at all Xaa locations
MASSRRQQHKGSWSWTSRVAAAADAASWCLALSLVALLLVCSLGPGGAAGGEQRGGVAAVLRGAALSARACEEIYVVAEGETLHSISDKCGDPYILEQNPHVHDPDDVFPGLVIKITPSKPRDELVNVYETHKCSSESIAQAWNGSMHQNARSGFDRCISANVKPMEGRFQLLPLYRWREAPVTVETRPLQLPLARRGPRVLDPNVPVGVTGAQSSEQNHGYFMPLCSYQNIRKDWQEKCSKGPLLNADAAISEHNQGKIWWYIEKVVIIGATKEIGRTAIAAISGMEEALEIPVLNDLTMVLGSIAQTRATGVVVDFSEPSTVYDNVKQAAAFGLNSVVYVPKIELDTVTELSAFCEKASMGCLVTPTLSIGSVLLQQAAIQASFHYNNVEIVESRPNPSDLPSQDAIQIANNITDLGQIYNREDMDSDNPTPTGDGKHEGKLAAVEALIDADLKYFDHHCPYSSVSIFDICCTLIGIYSSSNRIATRHPHRFTRRYMRNHNFDNVVVPQKGYNFRFARHARDAPLVSYYNYIVVGGGTAGCPLAATLSERSRVLLLERGGLPYGNRNVSSEYHFADALADTSPRSPAQRFVSEDGVVNARARVLGGGSCLNAGFYTRASSGYVRAAGWDPRLVNASYRWVERELVFRPDVPRWQCALREGLLQAGVTPDNGYTLEHVQGTKIGGTIFDRAGRRHTAADFLRRAHPRRLTVFLRATVSQILFRRTGTSKTDTTKGTATPVAYGVVFTDPAGVRHHVYLRGGAKSEVIVTAGTLGSPQLLMLSGVGPRGELEKHGILPVLDQPRVGQGVADNPMNSVFVPSPVPVALSLVQIVGVSRFGTFIEGVSGSQFGIPLHGRAASRRARSFGMFSPMTGQLGTVPPKERTPEAMRRAAEAMRRLDRRAFRGGFILEKILGPMSTGHVALRSADPDANPAVTFNYFRDPRDVERCVRGIETIERVVRSRAFARFTYANVTAMEAAVLGRRAGHLPVNLLPRRATDTRPLQQYCRETVMTIWHYHGGCHVGAVVDQDYRVLGVRGLRVVDSSTFKYSPGTNPQATVMMLGSFLLVALAQADEHHLLPGTYPPRSLTLLVKNAATDREENSTTSTMHLPLFVVIDCGQSVLACMAAWSPRLIIQLRPVDAGEDGAIDPDSVHVLGSEGNQRIEGDTTEGCQLSPQYSYYSTSFSRLRLPPNLVVSAAAAAAAVREMAAERKDVGILAMDIYFPPTCVLQDELENHDGVSKGKYTIGLGQDSMAFCTEVEDVISMSLTVVKSLLENYKIDPKCIGRLEVGSETVIDKSKSIKTWLMQIFEECGNTDIEGVDSSNACYGGTAALFNCVNWVESNSWDGRYGLVVCTDSXAVYAEGPARPTGGAAAIAMLIGPNAPVSFESKYRGSHMAHVYDFYKPDLASEYPVVDGKLSQTCYLMALDSCYNVFCKKYEKLEGKQFSIHDADYFVFHSPYNKLVQRSFARLYYNDFLRKCSTVEDGSREKLEPYSGLSSEESYQSRELEKASQQVAKHLYDSKVQPTTLIPKQVGNMYTASLYAALASVMHNKNETLAGQRIVMFSYGSGLTSTMFSFKINEGQHPFILSNIAGILDVSKKLESRHVVAPEKFVAALKLMEHRYGAKDFTTSQDTSLLAPGTYYLTHVDSMYRRFYAVKATAVSFSLRRRRNRNGAEEKMWEAEEIEDEETLEALLEASRSAQGRAALSDALADTLHLLPASTHRLLLLRLRLLRNLLAGDDLNQGTFVLLSGPAAVVSSALSSPSDSPDVARAGLQALGNAALAGEHHRAAVWDALFPGSLLELARVREKGVLDPLCMVIDTCCSGEGGRGRLEELCHEELGLPILVEIVTTAWQDTQAPVDSLMQTGLVKHLLTYLRELEPPSMIRKSMARGQGDHQPALGTAKVCPYIGYRRDVVAVIANCLHRSKKVQDEQCVVDEENPYLREWGLFAVKNLLEGNEENQKEVSGLKMQEAVITPEIADIGLRVEIDKETGHPKLVNN

SEQ ID NO: 19603 - protein, 499 aa, Oryza sativa
  unsure (1)..(499): unsure at all Xaa locations
MEQPNDVGILAMDIYFPPACVHQEALEAHDGASKGKYTIGLGQDCMAYCSEVEDVISMSLTVVASLLKKYNIDPKQIGRLEVGSETVIDKSKSIKTWLMHIFEESGNTDIEGVDSSNACYGGTAALLNCVNWVESKSWDGRYGLVVCTDSAVYAEGPARPTGGAAAIAMLIGPNAPISFESKYRASHMAHVYDFYKPDLASEYPVVDGKLSQTCYLMALDSCYRQYCTKYEKIVGEQFSISDAEYCVFHSPYNKLVQKSFARLYFNDFMRNCSTVDNDAKEKLQPFANLTSEESYQSRDLEKASQQVAKHLYDIKVQPSTLLPKQIGNMYTASLYAALASVIYNKHDSLDDQRILMFSXGSGLTSTMFSLRLQNGQKPFRLINIASVLNATTKLESRHVTLPEKFVETLKLMEHRYGAKDLETCKDTSLLPPGTFYLTRVDSMYRRFYEKKADEGKAKATNGFANGHFRSGTHGSRMIGHLAAEFDKFIIRVFSLEFLK

SEQ ID NO: 19604 - protein, 437 aa, Oryza sativa
MAAERKDVGILAMDIYFPPTCVLQDELENHDGVSKGKYTIGLGQDSMAFCTEVEDVISMSETVIDKSKSIKTWLMQIFEECGNTDIEGVDSSNACYGGTAALFNCVNWVESNSWDGRYGLVVCTDSAVYAEGPARPTGGAAAIAMLIGPNAPVSFESKYRGSHMAHVYDFYKPDLASEYPVVDGKLSQTCYLMALDSCYNVFCKKYEKLEGKQFSIHDADYFVFHSPYNKLVQKSFARLYYNDFLRKCSTVEDGSREKLEPYSGLSSEESYQSRELEKASQQVAKHLYDSKVQPITLIPKQVGNMYTASLYAALASVMHNKNETLAGQRIVMFSYGSGLTSTMFSFKINEGQHPFILSNIAGILDVSKKLESRHVVAPEKFVAALKLMEHRYGAKDFTTSQDTSLLAPGTYYLTHVDSMYRRFYAVKGQAAEVSNGH

SEQ ID NO: 19605 - protein, 404 aa, Oryza sativa
  unsure (1)..(404): unsure at all Xaa locations
IDPMQIVRLEVGSETEIDKSKSIKTWLMHIFEESGNTDIEGVDSSNACYGGTAALLNXVNWVESKSWDGRYGLVVCTDSAVYAEGPARPTSGAAAIAMLIGPNAPISFESKYRAAHMAHVYEIYKRELAREYPVADGKLSQTCYLMALDSCYRQYCTKYEKIVGEQFSISDAEYCVFHSAYNKLVQKSFARLYFNDFMRNCSTVDNDAKEKLQPFANLTGEESYQSRDLEKASQQVAKPLYDIKVQPSTLLPKQIGNMYTASLYAALASVLYNKHASLDDQRIVMFSYGSGLTSTMFSLKLNNGQDPFSLSNIASVLNATEKLESRHMTLPEKFVETLKLMEHRYGAKDFETCKDTSLLPPGTFYLTRVDSMYRRFYERKADEETAAKAKYSNGHATNGYANGH

SEQ ID NO: 19606 - protein, 279 aa, Oryza sativa
  unsure (1)..(279): unsure at all Xaa locations
MDGRKDVGILAMDIYFPPTCVLQESLEAHDGASKGKYTIGLGQDCMAFCSEVEDVISMSMTVVTSLLKKYKVDPKLIGRLEVGSETVIDKSKSIKTWLMQIFEECGNTDIEGVDSSNACYGGTAALLNCVNWVESNSWDGRYGLVVCTDSAVYAEGPARPTGGAAAIAMLIGPNAPIAFESKYKASHMAHVYDFYKPDLASEYPXVVDGKLSQTCYLMALDSCYRQFCKKYEKLAGKQFSISDADYFVFHSPYNKLVQKSFARLYYNDFTRDCSFCDND

SEQ ID NO: 19607 - protein, 128 aa, Oryza sativa
  unsure (1)..(128): unsure at all Xaa locations
XVIYNKHDSLDGQRILMFSYGSGLTSTMFSLRLHDGQHPFSLMNIASVLDVTTKLESRHVTSPEKFIETLKLMEHRYGAKDFETSKDTSLLPPGTFYLTKVDSMYRRFYDKKAAEGKIKGCNGIANGH

SEQ ID NO: 19608 - protein, 151 aa, Oryza sativa
  unsure (1)..(151): unsure at all Xaa locations
XLFTDDCSNACWGGXTAALFNCVNRDESSSWDXGRYGLAVCTDSAVHSQSPVGPTGCAVAVPXMFAPKASDNLESKSXRCNLGQGDGSHLPDLGSENPVXTEDCLSQTSYLKTLXDSCYFVSKGSYEKTXGKPFPLHHAYYLGFHSPYNKX

SEQ ID NO: 19609 - protein, 289 aa, Triticum aestivum
  unsure (1)..(289): unsure at all Xaa locations
MAAERVKDVGILAMDIYFPPNCVLQEELETHDGVSKGXKYTIGLGQDSMAFCTEVEDVISMSLTVVKTLLKNYNIDPKCIGRLEVGSETVIDKSKSIKTWLMQIFEECGNTDIEGVDSSNACYGGTAALFNCVNWAESNSWDGRYGLVVCTDSAVYAEGPARPTGGAAAIAMLIGPNAPISLESKFRGSHMAHVYDFYKPDLASEYPVVDGKLSQTCYLMALDSCYKTFCKRHASLRRSTQLLPPTPQLNQHNQTQWLTEELLAVEALLPEVVTVAEVADEAKKKKAPX

SEQ ID NO: 19610 - protein, 202 aa, Triticum aestivum
  unsure (1)..(202): unsure at all Xaa locations
MECKDVGILAMDMYFPPTCVQQEALEVHDGASKGKYTIGLGQDCMAFCSEVEDVISMSLTVVKSLLEKYHIDPKLIGRLEVGSETVIDKSKSIKTWLMQIFEESGNTDIEGVDSSNACYGGTAALLNCVNWVESRCWDGRYGLVVCTDSAVYAEGPARPTGGAAAIAMLIGPNAPISFESKYRASHMAHVYDFYKPDLASEX

SEQ ID NO: 19611 - protein, 189 aa, Triticum aestivum
  unsure (1)..(189): unsure at all Xaa locations
MAAERVKDVGILAMDIYFPPNCVLQEELEAHDGVSKGKYTIGLGQDSMAFCTEVEDVISMSLTVVKTLLKNYNIDPKCIGRLEVGSETVIDKSKSIKTWLMQIFEECGNTDIEGVDSSNACYGGTAALFNCVNWVESNSWDGRYGLVVCTDSAVYAEGPARPTGGAAAIAMLIGPNAPIHGKKKKKGPX

SEQ ID NO: 19612 - protein, 182 aa, Triticum aestivum
LPSQVGYLCPASLQGSQQLAKHLYDIKVQPSTLLPKQIGNMYTASLYAALASVIYNKHASLTGQRIVMFSYGSGLTSTMFSFKLNEGQHPFNLANIASVLDVTAKLESRHVTSPEKFIDTLKLMEHRYGAKDFETSKDISLLPPGTFYLTKVDSMYRRFYEKKTDGIVDGKIKCSNGIANGH

SEQ ID NO: 19613 - protein, 171 aa, Triticum aestivum
  unsure (1)..(171): unsure at all Xaa locations
AGRAGLGDTIEGRPKPXLYDTKVQPTTLIPKQLGNMYTASLYAAFASVVHNKHDALVGQRIVMFSYGSGMTSTMFSFKINEGQHPFSLSNIASILDISNKLESRHVVPPKKFVEALKLMEHRYGAKDFVTSQDTRLLVPGTYYLTHVDSMYRRFYAVKGDAAATPXXTNGH

SEQ ID NO: 19614 - protein, 176 aa, Triticum aestivum
  unsure (1)..(176): unsure at all Xaa locations
SYKXKKKKMAATNYPQNVGILAMEMYFPQRCVNQPEMESFDGVSAGKYTIGLGQEKMAFIDDREDIQSICLTAVQNLMEKYNIAYTDIGRLEVGTETIIDKSKAVKTCLMTLFSEHGNNEIEGIDTTNACYGGFSAFSNAVNWIESSSWDGRYAIVVAGDLALYASGSARPTSGAX

SEQ ID NO: 19615 - protein, 95 aa, Triticum aestivum
  unsure (1)..(95): unsure at all Xaa locations
MAAERVKDAGVLAMDIYFPPNCVLQEELETHDGVSKGKYTIGLGQDSMAFCTEVEDVISMSLTVVKTLLKNYNIXDPKCIGRLEGGRETVIDKSX

SEQ ID NO: 19616 - protein, 104 aa, Triticum aestivum
  unsure (1)..(104): unsure at all Xaa locations
SGMTSTMXSLKINECQHPFSLSNIPIRRRVATKLESRHVVPPKKFVEALKLMEHRYGAKDFVTSQDTRLLVPGTYYLTLVDSMYRRFYAVKGDAAATPXXTNGH

SEQ ID NO: 19617 - protein, 126 aa, Triticum aestivum
  unsure (1)..(126): unsure at all Xaa locations
XKQIGNMYTAAVWAGLASLVSEVDSETLQNKRVLFYSYGSGLAASMISFRINSSTEKIKNTLNLRERLAARTHSKPEDFSEAMKMRELTHNARDFSPKGSLEHIASGVYYIEKIDDKWRRFYKRKD

SEQ ID NO: 19618 - protein, 465 aa, Zea mays
MDRKDVGILAMDIYFPPSCVQQEALEAHDGASKGKYTIGLGQDCMAFCSEVEDVISMSLTVVNSLLKKYKIDPKLIGRLEVGSETVIDKSKSIKTWLMQIFEESGNSDIEGVDSSNACYGGTAALLNCVNWVESNSWDGRYGLVVCTDSAVYAEGPARPTGGAAAIAMLIGPNAPISFESKYRASHMAHVYDFYKPDLASEYPVVDGKLSQTCYLMALDSCYRQFCNKYEKIAGKQFSICDAEYFVFHSPYNKLVQKSFARLYYNDFLRNCSSVDDDAKEKLQSFSNLTGEESYQSRDLEKASQQVAKHLHDIKVQPSTLLPKQIGNMYTASLYAALASVLYNKHDSLNGQRIVMFSYGSGLTSTMFSLRLNNGQHPFSLSNIASVLDVTEKLQSRHETLPEKFVETLKLMEHRYGAKDFETSRDTSLLQPGTFYLTKVDSMYRRFYSQKLCGKTKCCNGLANGH

SEQ ID NO: 19619 - protein, 470 aa, Zea mays
MDRKDVGILAMDIYFPPSCVQQEALEAHDGASKGKYTIGLGQDCMAFCSEVEDVISMSLTVVNSLLKKYKIDPKLIGRLEVGSETVIDKSKSIKTWLMQIFEESDNTDIEGVDSSNACYGGTAALLNCVNWVESNSWDGRYGLVVCTDSAVYAEGPARPTGGAAAIAMLIGPNAPISFESKYRASHMAHVYDFYKPDLASEYPVVDGKLSQTCYLMALDSCYRQFCNKYEKIAGKQFSISDAEYFVFHSPYNKLVQKSFARLYYNDFMRNCSYVDDDAKEKLQSFSNLTGEESYQSRDLEKASQQVAKHLYGIKVQPTTLLPKQIGNMYTASLYAALASVLYNKHDSLNGQRIVMFSYGSGLTSTMFSLRLNNGQHPFSLSNIGSVLGVTEKLQSRHETLPEKFVETLKLMEHRYGAKDFETSSDTSLLQPGTFYLTKVDSMYRRFYSQKPAEEIGGGKTKCCNGFANGH

SEQ ID NO: 19620 - protein, 466 aa, Zea mays
  unsure (1)..(466): unsure at all Xaa locations
MASEAKDVGILAMDIYFPPNCVLQEELETHDGVSKGKYTIGLGQESMAFCTEVEDVISMSLTVVKSLLKNYNIDPKCIGRLEVGSETVIDKSKSIKTWLMQIFEESGNTDIEGVDSSNACYGGTAALFNCVNWVESKSWDGRYGLVVCTDSAVYAEGPARPTGGAAAIAMLIGPNAPICFESKYRGSHMAHVYDFYKPDLASEYPVVDGKLSQTCYLMALDSCYNLFCKKYEKHEGKQFSISDADYVVFHSPYNKLVQKSFARLYYNDFLRNCSTVDGESREKLAPYAGLSSEESYQSRDLEKASQQFAKNLYESKVQPTTLIPKQVGNMYTASLYAALASVVHSRHETLAGQRIVMFSYGSGLTSTMFSFMINEGHHPFSLLNIANILDISKKLKARHVVPPEXKFVEALKLMEHRYGARDFVTSQDTSLLSAGTYYLTHVDSKYRRFYDVKGXTGVATAMSNGH

SEQ ID NO: 19621 - protein, 443 aa, Zea mays
  unsure (1)..(443): unsure at all Xaa locations
MDRKDVGILAMDIYFPPSCVQQEALEAHDGASKGKYTIGLGQDCMAFCSEVEDVISMSLTVVNSLLKKYKIDPKLIGRLEVGSETVIDKSKSIKTWLMQIFEESGNSDIEGVDSSNACYGGTAALLNCVNWVESNSWDGRYGLVVCPDSAVYAEGPARPTGGAAAIAMLIGPNAPISFESKYRASHMAHVYDFYQPDLASEYPVGDGXLSQTCYLMALDSCYRQFCNKYEKIAGKQFSICDAEYFVFHSPYNKLVQKSFARLYYNDFLRNCSSVDDDAKEKLQSFSNLTGEESYQSRDLEKASQQVAKHLHDIKVQPSTLLPKQXXNGQRIVMFSYGSGLTSTMFSLRLNNGQHPFSLSNIASVLDVTEKLQSRHETLPEKFVETLKLMEHRYGAKDFETSRDTSLLQPGTFYLTKVDSMYRRFYSQKLCGKTKCCNGLANGH

SEQ ID NO: 19622 - protein, 274 aa, Zea mays
  unsure (1)..(274): unsure at all Xaa locations
MASEAKDVGILAMDIYFPPSCVLQEELETHDGVSKGKYTIGLGQENMAFCTEVEDVISMSLTVVKSLLKNYNIDPKCIGRLEVGSETVIDKSKSIKTWLMQIFEESGNTDIEGVDSSNACYGGTAALFNCVNWVESNSWDGRYGLVVCTDSAVYAEGPARPTGGAAAIAMLIGPNAPISFESKYRGSHMAHVYDFYKPDLASEYPVVDGKLSQTCYLMALDSCYNVFCKKYEKHEGKQFSIFDADYVVFHSPYNKLVQKSFARLYYNDFLRNCX

SEQ ID NO: 19623 - protein, 236 aa, Zea mays
  unsure (1)..(236): unsure at all Xaa locations
MASEAKDVGILAMDIYFPPNCVLQEELETHDGVSKGKYTIGLGQESMAFCTEVEDVISMSLTVVKSLLKNYNIDPKCIGRLEVGSETVIDKSKSIKTWLMQIFEESGNTDIEGVDSSNACYGGTAALFNCVNWVESKSWDGRYGLVVCTDSAVYAEGPARPTGGAAAIAMLIGPNAPICFESKYRGSHMAHVYDFYKPDLASEYPXVVDGKLSQTCYLMALDSCYNVFCXKYEKHX

SEQ ID NO: 19624 - protein, 236 aa, Zea mays
  unsure (1)..(236): unsure at all Xaa locations
XYSRPAGGSFTILASLCATNNKLFGFTCQNXQLAQLKDFPPISSSTVDEESREKLAPYAGLSSEESYQSRDLEKASQQVAKNLYESKVQPTTLIPKQVGNMYTASLYAALASVIHNRHETLAGQRIVMFSYGSGLTSTMFSFKINEGHHPFSLLNIANIMDVSKKLKARHVVPPKKFIEVLKLMEHRYGAKDFVTSQDTSLLSVGTYYLTHVDSKYRRFYDVKGDGVTTTAMSNGH

SEQ ID NO: 19625 - protein, 160 aa, Zea mays
  unsure (1)..(160): unsure at all Xaa locations
MAAEAKDVGILAMDIYFPPNCVLQEELETHDGVSKGKYTIGLGQESMAFCTEVEDVISMSLTAVKSLLKNYNIDPKCIGRLEVGSETAIDKSKSIKTWLMQIFEESGNTDIEGVDSSNACYGGTAALXNCGNWAESKSWDGRYGLVXCTDSAVYAEGPAX

SEQ ID NO: 19626 - protein, 237 aa, Zea mays
  unsure (1)..(237): unsure at all Xaa locations
XQVCLSFTPTLASLLAMHQTINYLIXXFSKLTTGSTKRFPVRXSSSTVDGESREKLAPYAGLSSEESYQSRDLEKASQQVAKNLYESKVQPTTLIPKQVGNMYTASLYAALASVVHSRHETLAGQRIVMFSYGSGLTSTMFSFMINEGHHPFSLLNIANILDISKKLKARHVVPPEKFVEALKLMEHRYGARDFVTSQDTSLLSAGTYYLTHVDSKYRRFYDVKGDGVATAXXSNGH

SEQ ID NO: 19627 - protein, 169 aa, Zea mays
  unsure (1)..(169): unsure at all Xaa locations
XFPPISSSTVDEEAREKLAPYAGLSSEESYQSRDLEKASQQFSKNLYESKVQPTTLIPKQVGNMYTASLYAALASIXXEGHHPFSLLNIANIMDVSKKLKARHVVPPKKFIEVLKLMEHRYGAKDFVTSQDTSLLSVGTYYLTHVDSKYRRFYDVKGDGVTTTAMSNGH

SEQ ID NO: 19628 - protein, 157 aa, Zea mays
  unsure (1)..(157): unsure at all Xaa locations
XFPSVSSSTVDGESREKLAPYAGLSSEESYQSRDLEKASQQVAKNLYESKVQPTTLIPKQVGNMYTASLYAALASVVHSXXHPFSLLNIANILDISKKLKARHVVPPEKFVEALKLMEHRYGARDFVTSQDTSLLSAGTYYLTHVDSKYRRFYDVKX

SEQ ID NO: 19629 - protein, 154 aa, Zea mays
  unsure (1)..(154): unsure at all Xaa locations
XEIVIDKSKSIKTWVMHISEERGNSHIERVDSSNACYGGTAPLLNCVNXVERNSWDGRYGLADSTDRAFNAECAAGTAGGADDIEFLKTPNAPIYFESKYRAYHMAHVYDLYKPDLDREYAVVDGKLTHTCYLMGLDSCYRQFCNXHXKIAGKX

SEQ ID NO: 19630 - protein, 154 aa, Zea mays
  unsure (1)..(154): unsure at all Xaa locations
MPGSLPLNAEACWPKDVGIVALEIYFPSQYVDQAELEKYDGVDAGKYTIGLGQARMGFCTDREDINSLCLTVVQKLMERHSLSYDCIGRLEVGTETIIDKSKSVKSNLMQLFEESGNTDIEGIDTTNACYGGTAAVFNAXNWVESSSWDGRYAL

SEQ ID NO: 19631 - protein, 138 aa, Zea mays
  unsure (1)..(138): unsure at all Xaa locations
XTNACYGGTAAVFNAVNWIEWSSWDGRYALVVAGDIAVYATGNARPTGGVGAVAMLIGPNAPLIFERGLRGTHMQHAYDFYKPDMLSEYPIVDGKLSIQCYLSALDRCYSVYRKKIRARWQKEGNDRDXTLNGFGFMI

SEQ ID NO: 19632 - protein, 450 aa, Phycomyces blakesleeanus
MSRYDHYPENVGILALEMYFPSRCVEQTAMEVYDGVSTGKYTIGLGQDKMAFIDDREDIQSICLTAVHNLMEKYNIAYTDIGRLEVGTETIIDKSKSVKTTLMTLFAEHGNYEIEGIDTTNACYGGFSAFSNAVNWIESSSWDGRYAIVIAGDLALYASGAARPTSGAGVVAMLVGKDAPIVLGRGLRYTYMDHAYDFYKPDMHSEYPIVDGKFSNVCYIRAFDACYNNYMKRLSKTIKKDVTSMEDVDYVVCHSPYAKLVTKSFARSAYNDFMADKKNPKYAALAPFEELAYEASLENRDLEKATATLTKAGYAQKVGPAAYAPKQIGNMYAGAVWAGLASLVSEVEVDTLKDKRVLLYSYGSGLAASMVSFRVVGSTADIKAKLNLRQRLDARTHSKPEAFAEAMQIRENTHNACNYNPIGSLEHIAPGAYYVDKIDDKWRRFYKRKD

SEQ ID NO: 19633 - protein, 447 aa, Schizosaccharomyces pombe
MSFDRKDIGIKGLVLYTPNQYVEQAALEAHDGVSTGKYTIGLGLTKMAFVDDREDIYSFGLTALSQLIKRYQIDISKIGRLEVGTETIIDKSKSVKSVLMQLFGDNHNVEGIDCVNACYGGVNALFNTIDWIESSAWDGRDGIVVAGDIALYAKGNARPTGGAGCVALLVGPNAPIVFEPGLRGTYMQHAYDFYKPDLTSEYPYVDGHFSLECYVKALDGAYANYNVRDVAKNGKSQGLGLDRFDYCIFHAPTCKQVQKAYARLLYTDSAAEPSNPELEGVRELLSTLDAKKSLTDKALEKGLMAITKERFNKRVSPSVYAPTNCGNMYTASIFSCLTALLSRVPADELKGKRVGAYSYGSGLAASFFSFVVKGDVSEIAKKTNLVNDLDNRHCLTPTQYEEAIELRHQAHLKKNFTPKGSIERLRSGTYYLTGIDDMFRRSYSVKP

SEQ ID NO: 19634 - protein, 491 aa, Saccharomyces cerevisiae; identical to SEQ ID NO: 615

SEQ ID NO: 19635 - protein, 454 aa, Neurospora crassa
MATRPQNIGIKAIEIYFPSQYVEQSELEKFDGVSTGKYTIGLGQTKMAFCDDREDIYSLALTAVSRLLKNYEIDTNTIGRLEVGTETLLDKSKSVKSVLMQLFGENTNIEGVDTINACYGGTNAFFNSVNWIESSAWDGRDAIVVAGDIALYAKGNARPTGGAGCVAMLVGPNAPIAVEPGLRGSYMAHAYDFYKPDLTSEYPYVDGHYSVNCYTEALDGAYRAYNQREKLLTNGVNGHSEDSTKTPLDRFDYLAFHAPTCKLVQKSYARLLYHDYLANPESPVFADVPPEVRDMDYKKSLTDKVVEKTFMTLTKKRFQERVNPAIQVPTLCGNMYCGSVWGGLASIIGHVDSAQLEGKRIGLFSYGSGLAASFCSFRVTGSTEKLAKTLNLPARLAARRAVPPESYDAMCDLRKQAHLQKNYTPKGEVSTLEPGTYYLENVDDMFKRTYSIKA

SEQ ID NO: 19636 - protein, 382 aa, Encephalitozoon cuniculi
MPAKNMFGIIGVEYQLPSLYISQEEVANNIDFEVDKIKIGLGLEQMGVPSRREDAISLALNAVSRLMKRYNVDPMAIGRLEVGTESNPDGSKSIKSYLTDLFPGNTSICGCDNVHACYSGTNALLSAIAWMESSFWDGRLAIVVASDVAMYKDKSCQPTGGAGAVAILLGPNCIYRVVPSSVIHYFTNQFDFMKPRELHPFPVVKGKESIENYRTAFEICYGRFREKMAEESSFDYIVLHSPYTRLPEKICIANHIDRKKLLRSLEASRRNGNAYSASLYLSLISLLECHDGEVGEKILMFSYGSGASSSMFCLERISKGCMVTGFRERLLERKEISYQEFTKILEEPVPQDNYEAQERIYSPGYYLKRISSFARYYEYLTE

SEQ ID NO: 19637 - protein, 462 aa, Caenorhabditis elegans
MSLGQLSYTPVTDVGIGAIELYFPQNFVDQNDLEKFNNVSSGKYTIGLGQQQMGFCSDNEDIVSISLTVTRKLIETYKISTDSIGCLVVGTETMIDKSKSVKTALMDLFPGNSDIEGVDIKNACFGGAQALLHAIDWVTVNHPLDKKNAIVVVADIAIYEEGPARCTGGAGAIAFLICPDASIPIDRQFSACHMKNTWDFFKPITPIPSEYPVVDGSLSLSSYLEAVRMTYTYFISKVNRHTTGIDGLNSFDGVFLHSPFTKMVQKGLAVMNYTDSQLRHKQLNGNGVDHKLDENDRAGLAKMIELSAQVWKEKTDPYLVFNRRIGNMYTPSLFAQLLAYLAADDCVTGEKSILFFAYGSGLASAIFPGRVRQTSNLDKIRQVAIRAIKRLDDRIQFTPEEFTETLQKREVFLRSKEIPKSPSETSLFPNTYFLDNMDKLYRRSYTLHEEPNGVQNGNGIHH

SEQ ID NO: 19638 - protein, 458 aa, Caenorhabditis elegans
QLSYTPVTDVGIGAIELYFPQNFVDQNDLEKFNNVSSGKYTIGLGQQQMGFCSDNEDIVSISLTVTRKLIETYKISTDSIGCLVVGTETMIDKSKSVKTALMDLFPGNSDIEGVDIKNACFGGAQALLHAIDWVTVNHPLDKKNAIVVVADIAIYEEGPARCTGGAGAIAFLICPDASIPIDRQFSACHMKNTWDFFKPITPIPSEYPVVDGSLSLSSYLEAVRMTYTYFISKVNRHTTGIDGLNSFDGVFLHSPFTKMVQKGLAVMNYTDSQLRHKQLNGNGVDHKLDENDRAGLAKMIELSAQVWKEKTDPYLVFNRRIGNMYTPSLFAQLLAYLAADDCVTGEKSILFFAYGSGLASAIFPGRVRQTSNLDKIRQVAIRAIKRLDDRIQFTPEEFTETLQKREVFLRSKEIPKSPSETSLFPNTYFLDNMDKLYRRSYTLHEEPNGVQNGNGIHH

SEQ ID NO: 19639 - protein, 408 aa, Nostoc punctiforme
MQRVGIEKINLYAGRFCADALELANLQGKDLDYVSKQVKVKTRSVIPAYEDTVTLSVNAAKRLLSPEDARDIELLIVATESAVDFGKPVSTWVHRYCNLPPHCRSFELKHACYGLTAAVKTAAMWLQGGLTPGKKALVIGCDYSRPHLDDRDNFIGGGAAIAMLISTDPKVFEIDLHPAGFWTNEISDTFRPTARVEIGDNQTSLYSYLDALEASYTHYEKLVGGVDYDKDFQKHIYHTPFPGMPLQAHRTLLSLLEVNDSKIYEENYQKKVQEGIYFAQQVGSTYGSSTFLCLLSLLHYAQDLHAGDRISIFAYGSGCQGEFYRGTVSPGAIEYIRSLDIDRHLQERLPLSLMEYELLEYAREKYIDAPDYQPKRDSFQNAYDKLYAGQELLVLKQVKNYYRQYEWS

SEQ ID NO: 19640 - protein, 445 aa, Halobacterium sp. NRC-1
MTSVGIDAIEIHTGKLKLDLAETFAPEMGDDPEKYTKGLGLHASSFPDAYEDIVTMGANAAHRLLERKGLEPADVGRIDVATESAFDNSKPVSTYIAGCLEQVYDGDFHHANKGERKFACIAGTQSLDDAVNWILAGRNRGRGALVIATDTALYARDSSGEATQGAGAVAMWITEDPDIVELSTEQGYGSADETDFLKPNQQFPSVDGKRSMQVYLARMRESLQDFERATGASHPDDYAFIPFHTPFPGMVRKAAVLGYRHMIRGTDIEEELAADIGRQPRRERFDSDDAFEDAISEYVDGLTDTDAYREWYDAAIQPTLSISSQVGNWYTGSVHLARFSALKHAAENGIDLAGKRLLVASYGSGAQAEIHSETVQDGFTEAVAASTIDEQIEQRYDISFAEYEQVHDRHNHEKSVELEPFTQPDAEFVFDGWGPMNERKYTYVE

SEQ ID NO: 19641 - protein, 416 aa, Streptomyces atroolivaceus
MTATGAEQAYGIEALNVWCGLARLTAADLFAGRGLDPERLDNLMMSERSIGLPIEDPVTNAVNAARPLIEALSPEERARIELVVTSTESGVDYSKSLTSYVHKYLGLNRHCRLIEVKQACFGATAAVQTAVGYLASGISPGAKALVIATDVAVVDEKAEYSEPAAGHGAAAMLLSDRPRVLAMDLGAFGNYSYETLDSARPSPRFDIADVDRSLFAYLDCLKNAYADYAARVTDVDFTRDFDHLVMHTPFAGLVKAGHRKMMREQGVTGPRIDEDFARRVAPSLIYPGSVGNLCSGSVYLALASLLDSGVVTAPSRVGLFSYGSGCSSEFFSGIVDEQSAATVAEQGIGKRLEARARITFDEYLAVLEHNLECLVPVENRTVDPAEWEPLLDRVGDRPEILTFTGVKDYHRQYAWR

SEQ ID NO: 19642 - protein, 453 aa, Blattella germanica
MWPSDVGIVALELIFPSQYVDQVDLEVYDNVSAGKYTVGLGQARMGFCTDREDINSLCLTVVSRLMERWSIPYSQIGRLEVGTETLLDKSKSVKTVLMQLFKDNTDIEGVDTVNACYGGTSALFNAISWVESSSWDGRYALVVAGDIAVYAKGSARPTGGAGAVAMLVGANAPLVFDRGVRSSHMQHAYDFYKPDLSSLYPTVDGKLSIQCYLSALDHCYQLYCSKIQKQLGEKFDIERLDAVLFHAPYCKLVQKSLARLVLNDFVRASEEERTTKYSSLEALKGVKLEDTYFDREVEKAVMTYSKNMFEEKTKPSLLLANQVGNMYTPSLYGGLVSLLVSKSAQELAGKRVALFSYGSGLASSMFSLRISSDASAKSSLQRLVSNLSHIKPQLDLRHKVSPEEFAQTMETREHNHHKAPYTPEGSIDVLFPGTWYLESVDSLYRRSYKQVPG

SEQ ID NO: 19643 - protein, 455 aa, Blattella germanica
MAHWPEDVGIIGIEMIFPSLYVDQAELETYDEVSPGKYTMGLGQDKMGVCTDREDINSLCLTAVDKLMERNNIDYNDIGWLEVGTETILDKVKSVKTVLMQLFEESGNTDVEGIDTINACYRGTAALFNALIWIESSSWDGRYAIVVAADIAIYAKECSPTGGAGALLMLIGANAPIVIDRGVRASHMKHAYDFYKPDLMSEYPVVDGKLSVQCYLSALDHCYPRFCSKTEKYLKRCGKENTKIDLDYFDAFVFHSPYCKLVQKSVARLVLNDFIQYPEKYQDLQQLRNLKFEDTYFDRDIEKIFMDKSKQLFEKKTKPSLMLANQVGNMYTTSLYGGLVSLLISEDIGELAGKCICMFSYGSGFAASMFSLHISTDSSPGSTLSRLVTNLTHIKPQVQQRVKLSPGEFENIMEIREQNHHKAPYTPVASPNTLFPGTWYLESIDSMHRRKYKRV

SEQ ID NO: 19644 - protein, 465 aa, Drosophila melanogaster
MASHWPENVGIRAIEILFPSQYVDQTELETFDGASAGKYTIGLGQAKMGFCSDREDVNSLCLTVVSRLLERQHVKHSEIGRLEVGTETIVDKSKSVKSVLMQLFAESGNTDIEGIDTTNACYGGTAALFNAVNWVESSSWDGRLALAVCADIAVYAKGAARPTGGAGAVAMLVGPNAPLILDRGLRATHMEHAYDFYKPDLSSEYPTVDGKLSIQCYLSALDTCYRLYRKKFDQQQKDTSKQPASLSTFDAILFHTPFCKLVQKSVGRLSFNDFLLSSEEERTKQFPDLERFNTATLESTYFDRDVEKAFMTQSANIFASKTKKSLLLANQVGNMYTPSVYSGLVSLLISGPAQELVGKRIGLFSYGSGLAASMYSISVTQDAAAFEKFVSQLDYVQPLLNSREKVAPEQFSALMEVREKNNHAAPYTPTGSISALFPGTYYLKDVDALHRRTYERTPTISNGVH

SEQ ID NO: 19645 - protein, 457 aa, Dendroctonus jeffreyi
MSAWPEDVGIIALEIYFPAQYVDQTELEQYDGVSAGKYTVGLGQKKMGFCNDREDINSLCLTVVDNLLTRYQVKPQEIGRLEVGTETIIDKSKSVKTVLMQLFEPHGVTDIEGIDTTNACYGGLPPSSTPSIAVESSSWNGRYALVVAADIAVYAKGPARPTGGTGAVAMLVGPNAPLVVDRRLKSSFFKHAYDFYKPDLTSEYPVVDGKLSIQCYLEALDKCYQVYCQKTEKLLQKPVSIESFDGILFHTPYCKLVQKSVGRLALNDFVREGKPELHPDLEKFANIQLKDSYFDRDVEKAFLSASNAAFLQRTLPSLLIAANIGNMYTSSLYGGLVSYIVSRSLENLVDNRVAMFSYGSGLASSFYSITIKNNAALQTLKNNLSYVEPLLAKRSKIAPEKFEATLELRQQSAHKVPYEPVGDISHFFPGTFVLTKIDEQHRRVYDRISKTITNGHS

SEQ ID NO: 19646 - protein, 508 aa, Danio rerio
MWPKDVGIIAMEVYVPSQYVDQAELEEYDGVGAGKYTVGLGQARMGFCSDREDINSLCLTVVQRLMERNGLSYESVGRLEVGTETIIDKSKSTKTVLMQLFEESGNTDVEGVDTTNACYGGTAALFNAVNWVESSSWDGRYALVVAGDIAVYATGSARPTGGAGAVAMLVGPNAPLAFERGLRGTHMQHAYDFYKPDMVSEYPVVDGKLSIQCYLSALDQCYSVYKNKIHARWQREGTEGRCSLEDFGFMVFHSPYCKLVQKSLARLMLNDFLCHPSPNMESGPFSGLEAFRDVKIEDTYFDRDVEKAFMKASSELFDDKTKASLLISNQNGNMYTPSVYGCLASVLAQHTPQQLAGQRIGVFSYGSGFAATLYSIKVTQDATPGSALDKLVSSLCDLPARLDSRQKVSPGVFAETMKLREETHHLANYIPQGSVDELFPGTWYLTRVDEKHRRQYARRSMNDDRPLEAGLVSSSMAAEHIPSPLKKMPRIPTTTAGPEVVVMSNGDH

SEQ ID NO: 19647 - protein, 520 aa, Xenopus laevis
MPGSLPPNGESSWPKDVGIVALEIYFPSQYVDQEELEKFDGVSAGKYTIGLGQCKMGFCSDREDINSLCLTVVQRLMERNNLSYDCIGRLEVGTETIIDKSKSVKTVLMQLFEESGNTDVEGIDTTNACYGGTAALFNAVNWVESSSWDGRYALVVAGDIAVYATGSARPTGGAGAVAMLVGPNATLVCERGLRGTHMQHAYDFYKPDMESEYPVVDGKLSIQCYLSALDRCYSTYRKKIHAQWQKEGTDKPFTLNDFGFMTFHSPYCKLVQKSLARLLVNDFISDSNPNTESGVYVGLDSFRDLKLEETYFDRDVEKAFLKASTEIFNEKTKASLLVSKENGNMYTPSVYGCLASVLAQYSPQQLAGQRIGVFSYGSGFAATLYSLRVSQDAMPGSSLDKLTSSLSDLKARLDSRKNVSPSIFADNMKLREDTHHLANYIPQGSVDDLFPGTWYLVRVDEKHRRFYARSSLMSDGPLDAAPESVLASTANEHFPSPAKKVPRIPPAAEAEPISVTNGEH

SEQ ID NO: 19648 - protein, 522 aa, Gallus gallus
MPGSLPVNTESCWPKDVGIVALEIYFPSQYVDQTELEKYDGVDAGKYTIGLGQSKMGFCSDREDINSLCLTVVQKLMERNSLSYDCIGRLEVGTETIIDKSKSVKTVLMQLFEESGNTDVEGIDTTNACYGGTAALFNAINWIESSSWDGRYALVVAGDIAVYATGNARPTGGAGAVAMLVGSNAPLIFERGLRGTHMQHAYDFYKPDMVSEYPVVDGKLSIQCYLSALDRCYSVYRNKIHAQWQKEGTDRGFTLNDFGFMIFHSPYCKLVQKSVARLLINDFLSDQNAETANGVFSGLEAFRDVKLEDTYFDRDVEKAFMKASAELFNQKTKASLLVSNQNGNMYTPSVYGCLASLLAQYSPEHLAGQRISEFSYGSGFAATLYSIRVTQDATPGSALDKITASLSDLKARLDSRKCIAPDVFAENMKIRQETHHLANYIPQCSVEDLFEGTWYLVRVDEKHRRTYARRPVMGDGPLEAGVEVVHPGIVHEHIPSPAKKVPRIPATTESEGVTVAISNGVH

SEQ ID NO: 19649 - protein, 522 aa, Gallus gallus
MPGSLPVNTESCWPKDVGIVALEIYFPSQYVDQTELEKYDGVDAGKYTIGLGQSKMGFCSDREDINSLCLTVVQKLMERNSLSYDCIGRLEVGTETIIDKSKSVKTVLMQLFEESGNTDVEGIDTTNACYGGTAALFNAINWIESSSWDGRYALVVAGDIAVYATGNARPTGGAGAVAMLVGSNAPLIFERGLRGTHMQHAYDFYKPDMVSEYPVVDGKLSIQCYLSALDRCYSVYRNKIHAQWQKEGTDRGFTLNDFGFMIFHSPYCKLVQKSVARLLLNDFLSDQNAETANGVFSGLEAFRDVKLEDTYFDRDVEKAFMKASAELFNQKTKASLLVSNQNGNMYTPSVYGCLASLLAQYSPEHLAGQRISEFSYGSGFAATLYSIRVTQDATPGSALDKITASLSDLKARLDSRKCIAPDVFAENMKIRQETHHLANYIPQCSVEDLFEGTWYLVRVDEKHRRTYARRPVMGDGPLEAGVEVVHPGIVHEHIPSPAKKVPRIPATTESEGVTVAISNGVH

SEQ ID NO: 19650 - protein, 389 aa, Streptomyces sp. CL190
MSISIGIHDLSFATTEFVLPHTALAEYNGTEIGKYHVGIGQQSMSVPAADEDIVTMAATAARPIIERNGKSRIRTVVFATESSIDQAKAGGVYVHSLLGLESACRVVELKQACYGATAALQFAIGLVRRDPAQQVLVIASDVSKYELDSPGEATQGAAAVAMLVGADPALLRIEEPSGLFTADVMDFWRPNYLTTALVDGQESINAYLQAVEGAWKDYAEQDGRSLEEFAAFVYHQPFTKMAYKAHRHLLNFNGYDTDKDAIEGALGQTTAYNNVIGNSYTASVYLGLAALLDQADDLTGRSIGFLSYGSGSVAEFFSGTVVAGYRERLRTEANQEAIARRKSVDYATYRELHEYTLPSDGGDHATPVQTTGPFRLAGINDHKRIYEAR

SEQ ID NO: 19651 - protein, 520 aa, Homo sapiens
MPGSLPLNAEACWPKDVGIVALEIYFPSQYVDQAELEKYDGVDAGKYTIGLGQAKMGFCTDREDINSLCMTVVQNLMERNNLSYDCIGRLEVGTETIIDKSKSVKTNLMQLFEESGNTDIEGIDTTNACYGGTAAVFNAVNWIESSSWDGRYALVVAGDIAVYATGNARPTGGVGAVALLIGPNAPLIFERGLRGTHMQHAYDFYKPDMLSEYPIVDGKLSIQCYLSALDRCYSVYCKKIHAQWQKEGNDKDFTLNDFGFMIFHSPYCKLVQKSLARMLLNDFLNDQNRDKNSIYSGLEAFGDVKLEDTYFDRDVEKAFMKASSELFSQKTKASLLVSNQNGNMYTSSVYGSLASVLAQYSPQQLAGKRIGVFSYGSGLAATLYSLKVTQDATPGSALDKITASLCDLKSRLDSRTGVAPDVFAENMKLREDTHHLVNYIPQGSIDSLFEGTWYLVRVDEKHRRTYARRPTPNDDTLDEGVGLVHSNIATEHIPSPAKKVPRLPATAAEPEAAVISNGEH

SEQ ID NO: 19652 - protein, 508 aa, Homo sapiens
MQRLLTPVKRILQLTRAVQETSLTPARLLPVAHQRFSTASAVPLAKTDTWPKDVGILALEVYFPAQYVDQTDLEKYNNVEAGKYTVGLGQTRMGFCSVQEDINSLCLTVVQRLMERIQLPWDSVGRLEVGTETIIDKSKAVKTVLMELFQDSGNTDIEGIDTTNACYGGTASLFNAANWMESSSWDGRYAMVVCGDIAVYPSGNARPTGGAGAVAMLIGPKAPLALERGLRGTHMENVYDFYKPNLASEYPIVDGKLSIQCYLRALDRCYTSYRKKIQNQWKQAGSDRPFTLDDLQYMIFHTPFCKMVQKSLARLMFNDFLSASSDTQTSLYKGLEAFGGLKLEDTYTNKDLDKALLKASQDMFDKKTKASLYLSTHNGNMYTSSLYGCLASLLSHHSAQELAGSRIGAFSYGSGLAASFFSFRVSQDAAPGSPLDKLVSSTSDLPKRLASRKCVSPEEFTEIMNQREQFYHKVNFSPPGDTNSLFPGTWYLERVDEQHRRKYARRPV

SEQ ID NO: 19653 - protein, 520 aa, Homo sapiens
MPGSLPLNAEACWPKDVGIVALEIYFPSQYVDQAELEKYDGVDAGKYTIGLGQAKMGFCTDREDINSLCMTVVQNLMERNNLSYDCIGRLEVGTETIIDKSKSVKTNLMQLFEESGNTDIEGIDTTNACYGGTAAVFNAVNWIESSSWDGRYALVVAGDIAVYATGNARPTGGVGAVALLIGPNAPLIFERGLRGTHMQHAYDFYKPDMLSEYPIVDGKLSIQCYLSALDRCYSVYCKKIHAQWQKEANDNDFTLNDFGFMIFHSPYCKLVQKSLARMLLNDFLNDQNRDKNSIYSGLKAFGDVKLEDTYFDRDVEKAFMKASSELFSQKTKASLLVSNQNGNMYTSSVYGSLASVLAQYSPQHLAGKRIGVFSYGSGLAATLYSLKVTQDATPGSALDKITASLCDLKSRLDSRTGVAQDVFAENMKLREDTHHLVNYIPQGSIDSLFEGTWYLVRVDEKHRRTYARRPTPNDDTLDEGVGLVHSNIATEHIPSPAKKVPRLPATAAEPEAAVISNGVW

SEQ ID NO: 19654 - protein, 509 aa, Homo sapiens
MPGSLPLNAEACWPKDVGIVALEIYFPSQYVDQAELEKYDGVDAGKYTIGLGQAKMGFCTDREDINSLCMTVVQNLMERNNLSYDCIGRLEVGTETIIDKSKSVKTNLMQLFEESGNTDIEGIDTTNAVNWIESSSWDGRYALVVAGDIAVYATGNARPTGGVGAVALLIGPNAPLIFERGLRGTHMQHAYDFYKPDMLSEYPIVDGKLSIQCYLSALDRCYSVYCKKIHAQWQKEGNDKDFTLNDFGFMIFHSPYCKLVQKSLARMLLNDFLNDQNRDKNSIYSGLEAFGDVKLEDTYFDRDVEKAFMKASSELFSQKTKASLLVSNQNGNMYTSSVYGSLASVLAQYSPQQLAGKRIGVFSYGSGLAATLYSLKVTQDATPGSALDKITASLCDLKSRLDSRTGVAPDVFAENMKLREDTHHLVNYIPQGSIDSLFEGTWYLVRVDEKHRRTYARRPTPNDDTLDEGVGLVHSNIATEHIPSPAKKVPRLPATAAEPEAAVISNGEH

SEQ ID NO: 19655 - protein, 363 aa, Homo sapiens
MELFQDSGNTDIEGIDTTNACYGGTASLFNAANWMESSSWDGRYAMVVCGDIAVYPSGNARPTGGAGAVAMLIGPKAPLALERGLRGTHMENVYDFYKPNLASEYPIVDGKLSIQCYLRALDRCYTSYRKKIQNQWKQAGSDRPFTLDDLQYMIFHTPFCKMVQKSLARLMFNDFLSASSDTQTSLYKGLEAFGGLKLEDTYTNKDLDKALLKASQDMFDKKTKASLYLSTHNGNMYTSSLYGCLASLLSHHSAQELAGSRIGAFSYGSGLAASFFSFRVSQDAAPGSPLDKLVSSTSDLPKRLASRKCVSPEEFTEIMNQREQFYHKVNFSPPGDTNSLFPGTWYLERVDEQHRRKYARRPV

SEQ ID NO: 19656 - protein, 477 aa, Homo sapiens
MLGASSNWSWDNAAIQVKCRTRNKRMAGEPEKGDPMGSPEKGDPEKGDPREDWAHGLGLQGVQLSGAGRAAEVATEPPDPVPAPNRTRSQENLMERKNLSYDCTGRLEVGTETIKDKSKSVKTNLMQLFEESGDIDIEGTDTTHACYGAPAAVFSAVNWIESSSWDGQFALEFVGDIAVYPTGKVRLTGRVRAVALLIEPNATLIFERGLRGTHMQRAYGFYEPDMLSECPIVDGKPSTQCCFSALDHCYSVDCKTIRAQWQKDGNDKDFTLNNFGFLILHSPYCKLKTKASLLYPVKMEIRTHRQYMVPRNCPSAVLTSAMIREETGVFSYGSGSAATLYSLKVPPDATPWSAVDKITASLWDLKSRCSSRTCVVPDVFVENMKLREDTHHLVNSVPRGPRDSLFEETWYLAMVGEKHRRSYTPCPSPNNDTWDEGVRLVHSNTVTDHIPSPAKTVPRLPATAAETGAAVISNGEH

SEQ ID NO: 19657 - protein, 508 aa, Sus scrofa
MQRLLTPVRQVLRVKRAMQEASFMPPLLPPAAHQRFSTVPAVPVAKADTWPKDVGILALEVYFPAQYVDQTDLEKFDNVEAGRYTVGLGQTHMGFCSVQEDINSLCLTVVQRLMERTQLPWDSVGWLEVGTETIIDKSKSVKTVLMELFQDSGNTDIEGIDTTNACYGGTASLFNAANWVESSAWDGRYAVVVCGDIAVYPRGNSRPTGGAGAVAMLVGPEAPLALERGLRGTHMENAYDFYKPNATSEYPLVDGKLSIQCYLRALDRCYTLYRQKIEKQWKQAGIERHFTLDDLQFMIFHTPFCKLVQKSLARLMFSDFLLADSDTQSSLYKGLEAFRGQKLEDTYANKDIEKAFQKASLDLFNKKTKPSLYLSLHNGNMYTSSLYGCLASLLSQCSAQDLAGSRIGAFSYGSGLAASFYSLRVSQDASPGSPLEKLVSSVSDLPERLASRKRVSPEEFTEIMNQREQYYHKVNFTPPGDPNSLFPGTWYLERVDELYRRKYARHLV

SEQ ID NO: 19658 - protein, 391 aa, Streptococcus pyogenes M1 GAS
MTIGIDKIGFATSQYVLKLEDLALARQVDPAKFSQGLLIESFSVAPITEDIITLAASAADQILTDEDRAKIDMVILATESSTDQSKASAIYVHHLVGIQPFARSFEVKQACYSATAALDYAKLHVASKPDSRVLVIASDIARYGVGSPGESTQGSGSIALLVTANPRILALNEDNVAQTRDIMDFWRPNYSFTPYVDGIYSTKQYLNCLETTWQAYQKRENLQLSDLAAVCFHIPFPKLALKGLNNIMDNTVPPEHREKLIEAFQASISYSKQIGNIYTGSLYLGLLSLLENSKVLQSGDKIGFFSYGSGAVSEFYSGQLVAGYDKMLMTNRQALLDQRTRLSVSKYEDLFYEQVQLDDNGNANFDIYLTGKFALTAIKEHRRIYHTNDKN

SEQ ID NO: 19659 - protein, 345 aa, Bacillus subtilis subsp. subtilis str. 168
MLITCSESGIDFGKSLSTYIHEYLGLNRNCRLFEVKQACYSGTAGFQMAVNFILSQTSPGAKALVIASDISRFLIAEGGDALSEDWSYAEPSAGAGAVAVLVGENPEVFQIDPGANGYYGYEVMDTCRPIPDSEAGDSDLSLMSYLDCCEQTFLEYQKRVPGANYQDTFQYLAYHTPFGGMVKGAHRTMMRKVAKVKTSGIETDFLTRVKPGLNYCQRVGNIMGAALFLALASTIDQGRFDTPKRIGCFSYGSGCCSEFYSGITTPQGQERQRTFGIEKHLDRRYQLSMEEYELLFKGSGMVRFGTRNVKLDFEMIPGIMQSTQEKPRLFLEEISEFHRKYRWIS

SEQ ID NO: 19660 - protein, 421 aa, Pseudomonas fluorescens
MTRQVGIEAMNVFGGAASLDVTMLARHRKLDSQRFGNLLMHEKSVALHSEDPVTFAVNAAKPLIDALSPQERDQIELLITCTESGIDFGKSVSTYVHDYLGLKKNCRVFELKQACYSGTAGFHSAVQFVLSQTSPNAKALVVAVDLCRFLMIGEGGAAAQDWAFSEPSGGAGAVAMLISDKPHVFSLDIGASGYYSFEVMDTCRPEPDSEAGDADLSLMSYLDCCEQTFNEYRLRVDDVDYARTFDYLAFHTPFGGMVKGAHRLMMRKFAPADPPAIEADFAQRVAPGLAYCQRVGNIMGATMFLSLAGIISTARFDEPRRIGCFSYGSGCCSEFFSGTVTPQSRDHLSAQAIAQQLDSRYSLSLAEYESILLGNDAVRFGTRDHTVACPVTDSVIAAGGLSGKLLLSAINGYHREYSFQP

SEQ ID NO: 19661 - protein, 374 aa, Myxococcus xanthus
MMQERGVALPFEDPVTNAVNAARPILDAMSPEARERIELLVTSSESGVDFSKSISSYAHEHLGLSRHCRFLEVKQACYAATGALQLALGYIASGVSPGAKALVIATDVTLVDESGLYSEPAMGTGGVAVLLGDEPRVMKMDLGAFGNYSYDVFDTARPSPEIDIGDVDRSLFTYLDCLKHSFAAYGRRVDGVDFVSTFDYLAMHTPFAGLVKAGHRKMMRELTPCDVDEIEADFGRRVKPSLQYPSLVGNLCSGSVYLSLCSIIDTIKPERSARVGMFSYGSGCSSEFFSGVIGPESVSALAGLDIGGHLRGRRQLTFDQYVELLKENLRCLVPTKNRDVDVERYLPLVTRTASRPRMLALRRVVDYHRQYEWV

SEQ ID NO: 19662 - protein, 483 aa, Glycine max
  unsure (1)..(483): unsure at all Xaa locations
MASSRPANVGILAMDIYFPPTCVTQDALEGHDGVSKGKYTIGLGQDCMAFCSEVEDVISMSLTVVTSLLEKFNVDPKQIGHLAVGSETVIDKSKSIKTFLMQVFEASGNTDIEGVDSTNACYGGTAALFNCVNWVESSSWDGRYGLVVCTDTAVYAEGPARPTGGAAAIAMLVGPDAPIAFESKLRGSHMSHAYDFYKPNLASEYPIVDGKLSQTCYLMALDSCYRLYCEKFEKLEGRPFSMSDSDYFVFHSPYNKLVQKSFGRLYFNDFLRNASFVDEVARETLAPYASLSGDESYQSRDLEKANQQAAKHLYDAKVQPSTLIPKQVGNMYTASLYAAFASLLHNKNSSLVGKRVVMFSYGSGLTATMFSFQLQEGQHPFNLSNIVTVMNVSDKLKQRVEIPPEKFVETLKIMEHRYGGKDFVTSKDCSYLTPGTFYLTNVDSMYRRFYAKKDXVIGXLMIADIFKYGVKMYFLMVHLYLIP

SEQ ID NO: 19663 - protein, 474 aa, Glycine max
  unsure (1)..(474): unsure at all Xaa locations
MAKNVGILAIDIYFPPACVQQEALETHDGASKGKYTIGLGQDCMSFCTEVEDVISMSLTVVTSLLEKYEIDPKLVGRLEVGSETVIDKSKSIKTFLMQIFEKYGNTDIEGVDSTNACYGGTAALFNCVNWVESNSWDGRYGLVVCTDSAVYAEGPARPTGGAAAIAMLIGPDAPISFESKLRGSHMSHVYDFYKPNLASEYPVVDGKLSQTCYLMAVDSCYKNFCHKYEKFEGKQFSLSDAEYFVFHSPYNKLVQKSFARLVFNDFLMNSSSVDEVAKEKLGPFATLSGDESYQSRDLEKASQQVAKXPLYDQKVQPTTLIPKQVGNMYTASLYAAFASLIHNKNSTLAGKRVILFSYGSGLTAXTMFSLQLRDSQHPFSLSNIARVMDVDGKLKSRHEFPPEEFVENLKLMEHRYGGKEFVTSKDTSLLSPGTFYLTEVDSMYRRFYSKKTKESTAENGVIANGVANGIANGH

SEQ ID NO: 19664 - protein, 460 aa, Glycine max
MAKNVGILAIDIYFPPTCIQQELLEAHDGASKGKYTIGLGQDCMAFCTEVEDVISMSLTVVSSLLEKYAIDPKQIGRLEVGSETVIDKSKSIKTFIMQIFEKYGNTDIEGVDSTNACYGGTAALFNCVNWVESSSWDGRYGLVVCTDSAVYAEGPARPTGGAAAVAMLIGPDAPISFESKLRGSHMAHAYDFYKPNLASEYPVVDGKLSQTCYLMALDSCYNHLSHKYEKQEGKQFSISDAEYFVFHSPYNKLVQKSFARLVFNDFLKNASFVDEAAKEKLEPFATLSGDESYQSRDLEKASQQVAKPQYDAKVQPTTLIPKQVGNMYTASLYAAFISLIHNKHSTLDGKRVILFSYGSGLTSTMFSLLLREGQHPFSLSNIDKMMDVAGKLKSRHEFPPEKFVETMKLMEHRYGGKEFVTSKDTSLLSPGTFYLTEVDSMYRRFYAKKTSENGLVTNGH

SEQ ID NO: 19665 - protein, 474 aa, Glycine max
  unsure (1)..(474): unsure at all Xaa locations
MEKNVGILAIDIYFPPACVQQEALETHDGASKGKYTIGLGQDCMSFCTEVEDVISMSLTVVTSLLEKYGIDPKQIGRLEVGSETVIDKSKSIKTFLMQIFEKYGNTDIEGVDSTNACYGGTAALFNCVNWVESNSWDGRYGLVVCTDSAVYAEGPARPTGGAAAIAMLIGPDAPISFESKLRGSHMSHVYDFYKPNLASEYPVVDGXKLSQTCYLMAXVDSCYKNFCHKFEKFEGKQFSLFDAEYFVFHSPYNKLVQKSFARLFFNDFLMNSSSXADEVAKEKLGPFATLSGDESYQSRDLEKASQLLAKPLYDQKVQPTTLIPKQVGNMYTASLYAAFASLIHNKHSTLAGKRVILFSYGSGLTATMFSLQLRDSQHPFSLSNMARVMNVDGKLKSRHEFPPEEFVENLKLMEHRYGAKEFVTSKDSSLLSPGTFYLTEVDSMYRRFYSKKTKESSLTHAENGVIANGVANGH

SEQ ID NO: 19666 - protein, 211 aa, Glycine max
  unsure (1)..(211): unsure at all Xaa locations
MEKNVGILAIDIYFPPACVQQEALETHDGASKGKYTIGLGQDCMSFCTEVEDVISMSLTVVTSLLEKYGIDPKQIGRLEVGSETVIDKSKSIKTFLMQIFEKYGNTDIEGVDSTNACYGGTAALFNCVNWVESNSWDGRYGLVVCTDSAVYAEGPARPTGGAAAIAMLIGPDAPISFESKLRGSHMSHVYDFYKPNLASEYPVVDGKLSQX

SEQ ID NO: 19667 - protein, 125 aa, Glycine max
MSTRPENIGIKAIEIYFPNQCVEQSELEKFDGVSTGKYTIGLAQTKMALCDDREDIYSLALTVTHSLLEKYSIDPNSIGRIEVGTETILDKSKSVKSVLMQLFPENKSIEGGDNVNACYCGTNAL

SEQ ID NO: 19668 - protein, 202 aa, Glycine max
  unsure (1)..(202): unsure at all Xaa locations
CPGNVAILAIAIYLHTTCTTXHAXKGHDGVSKGKXTIGLGQDRMDFXSEDEDVISMNLTVVTSLLEKCNVDPKQRGHLWTGSETGIDKSILFKTLLKQVFDASGNTDIEGEDSTNASYGGTDALFNCETWLESNSWHGRYGLGACTNTGAYTERPAGPTGXCGGIAMLARPDAAIGNESILMSSHMLQAYEFYKPNLAIEYX

SEQ ID NO: 19669 - protein, 171 aa, Glycine max
  unsure (1)..(171): unsure at all Xaa locations
XVLTLRIKLSISVAFEYNIXXLLVXNTQKYGNTNIEGVDSTNACYGGTAALFNCVNWVESSSWDGRYXLLVCTDSAVYAEGPARHTGGAAAVAMLIGPNAPIAFESKLRGSXMAHAYDFYKPNLASEYPVVDGKLSQTCYLMALDSCYNHLSHKYDIQEGMQFSISDAEYX

SEQ ID NO: 19670 - protein, 70 aa, Glycine max
  unsure (1)..(70): unsure at all Xaa locations
XFRLEGTAALFNCVNWVESNSWDGRYGLVVCTDSAVYAEGPARPTGGAAAIAMLIGPDAPISFESKLRGX

SEQ ID NO: 19671 - protein, 112 aa, Glycine max
  unsure (1)..(112): unsure at all Xaa locations
HSIKHTMLNNVGILAIDVYFPAGCGQQEALDTHDGTIQGNYSIGLGQHCMXTFCTELKDVISMSLTVVTYVLEKNGIDPKQIGRLEDVSETVIDKSKSIKTFYIIRRSASGM

SEQ ID NO: 19672 - protein, 78 aa, Glycine max
  unsure (1)..(78): unsure at all Xaa locations
MMTSRLTCTNSQVYAKGPARPTGGAAAVAMLIGPDAPISFESKLRGSHMAHAYXXXKPNLASEYPIRCSASLHFLARM

SEQ ID NO: 19673 - protein, 141 aa, Glycine max
LYAAFASFIHNKNSTLAGKRVILFSYGSGLTATMFSLQFRDSQHPFSLSNIAKVMDVDGKLKSRHEFPPEEFVENLKLMEHRYGGKEFVTSKDTSLLSPGTFYLTEVDSMYRRFYSKKTKESTAENGVIANGVANGIANGH

SEQ ID NO: 19674 - protein, 464 aa, Hevea brasiliensis
MAKNVGILAVDIYFPPTFVQQEALEAHDGASKGKYTIGLGQDCMAFCTEVEDVISMSLTAVTSLLDKYNIDPKQIGRLEVGSETVIDKSKSIKTFLMQIFEKFGNTDIEGVDSTNACYGGTAALFNCVNWVESSSWDGRYGLVVCTDSAVYAEGPARPTGGAAAIAILVGPDAPIAFESKFRGSHMSHAYDFYKPNLASEYPVVDGKLSQTCYLMALDSCYKHFCAKYEKFEGKQFSISDAEYFVFHSPYNKLVQKSFARLVFNDFVRNARSIDETAKEKLAPFSNLSGDESYQNRDLEKVSQQVAKPLYDAKVKPTTLIPKQVGNMYTASLYAAFASLLHSKHTELAGKRVTLFSYGSGLTATMFSLRLHEGQHPFSLSNIASVMNVAGKLKARHELPPEKFVNIMKLMEHRYGAKDFVRSKDCSLLASGTYYLTEVDSLYRRFYAQKAVGNTVENGLLANGH

SEQ ID NO: 19675 - protein, 464 aa, Hevea brasiliensis
MAKNVGILAVDIYFPPTFVQQEALEAHDGASKGKYTIGLGQDCMAFCTEVEDVISMSLTAVTSLLDKYNIDPKQIGRLEVGSETVIDKSKSIKTFLMQIFEKFGNTDIEGVDSTNACYGGTAALFNCVNWVESSSWDGRYGLVVCTDSAVYAEGPARPTGGAAAIAILVGPDAPIAFESKFRGSHMSHAYDFYKPNLASEYPVVDGKLSQTCYLMALDSCYKHFCAKYEKFEGKQFSISDAEYFVFHSPYNKLVQKSFARLVFNDFVRNASSIDETAKEKLAPFSNLSGDESYQNRDLEKVSQQVAKPLYDAKVKPTTLIPKQVGNMYTASLYAAFASLLHSKHTELAGKRVTLFSYGSGLTATMFSLRLHEGQHPFSLSNIASVMNVAGKLKARHELPPEKFVDIMKLMEHRYGAKDFVTSKDCSLLASGTYYLTEVDSLYRRFYAQKAVGNTVENGLLANGH

SEQ ID NO: 19676 - protein, 146 aa, Zea mays
  unsure (1)..(146): unsure at all Xaa locations
VSPDLXTYLSIESFYHRSXKLIITCVFPYSGQRIVMFSYGSGLTSTMFSLRLNNGQHPFSLSNIASVLDVTEKLQSRHETLPEKFVETLKLMEHRYGAKDFETSRDTSLLQPGTFYLTKVDSMYRRFYSQKLCGKTKCCNGLANGH

SEQ ID NO: 19677 - protein, 150 aa, Zea mays
  unsure (1)..(150): unsure at all Xaa locations
VSPDLXTIYLWSLLPSFLKADNYLCVSLQNGQRIVMFSYGSGLTSTMFSLRLNNGQHPFSLSNIGSVLGVTEKPQSRHETLPEKFVETLKLMEHRYGAKDFETSSDTSLLQPGTFYLTKVDSMYRRFYSQKPAEETGENQVLQRLXANGH

SEQ ID NO: 19678 - protein, 126 aa, Homo sapiens
FSTASAVPLAKTDTWPKDVGILALEVYFPAQYVDQTDLEKYNNVEAGKYTVGLGQTRMGFCSVQEDINSLCLTVVQRLMERIQLPWDSVGRLEVGTETIIDKSKAVKTVLMELFQDSGNTDIEGID

SEQ ID NO: 19679 - protein, 487 aa, Streptomyces coelicolor A3(2)
MSQRVLTTESGAPVADNQNSASAGIGGPLLIQDQHLIEKLARFNRERIPERVVHARGSGAYGHFEVTDDVSGFTHADFLNTVGKRTEVFLRFSTVADSLGGADAVRDPRGFALKFYTEEGNYDLVGNNTPVFFIKDPIKFPDFIHSQKRDPFTGRQEPDNVFDFWAHSPEATHQITWLMGDRGIPASYRHMDGFGSHTYQWTNARGESFFVKYHFKTDQGIRCLTADEAAKLAGEDPTSHQTDLVQAIERGVYPSWTLHVQLMPVAEAANYRFNPFDVTKVWPHADYPLKRVGRLVLDRNPDNVFAEVEQAAFSPNNFVPGIGPSPDKMLQGRLFAYADAHRYRLGVNHTQLAVNAPKAVPGGAANYGRDGLMAANPQGRYAKNYEPNSYDGPAETGTPLAAPLAVSGHTGTHEAPLHTKDDHFVQAGALYRLMSEDEKQRLVANLAGGLSQVSRNDVVEKNLAHFHAADPEYGKRVEEAVRALRED

SEQ ID NO: 19680 - protein, 487 aa, Streptomyces coelicolor A3(2)
MPENNQKPLTTVAGAPVPDNQNSLTSGPRGPMLLQDVWFLEKLAHFDREVIPERRMHAKGSGAFGTFTVTHDITRYTSAKIFSEIGKKTPLFTRFSTVAGERGAADAERDIRGFAVKFYTDEGNWDLVGNNTPVFFFRDPLKFPDLNHAVKRDPRTNLRNAENNWDFWTNLPEALHQVTIVMSDRGIPASYRHMHGFGSHTYSLINAEGERFWVKFHHRTQQGIKNLTDAEAEALVGKDRESHQRDLFDAIEDGDFPKWKLFIQVMPEADAENYRFHPFDLTKVWSKKDYPLIEVGEWELNRNPDNYFADVEQAAFSPANVVPGISFSPDRMLQGRLFSYGDAQRYRLGVNHHQIPVNAPKNPVNSYHRDGAMRVDGNQGATPGVEPNSYGRWQEQPAYRDPAQAVGAVADRFNYREDDDNYFEQPGNLFRQMSPEQQQVLFENTARAIDGASAQTIERHIGNCTQADPAYGAGVRKAIEALAAGNL

SEQ ID NO: 19681 - protein, 506 aa, Streptomyces coelicolor A3(2)
MTDTPPATTTDSGAPAESDEHSLTAGPAGPVLLQDAYLIEQMAQFNRERIPERQPHAKGSGAFGHFEVTHDVSAYTKAAVFQPGTRTDLVARFSTVAGERGSPDTWRDPRGFAVKFYTSQGNYDMVGNNTPVFFVKDPMKFQHFIRSQKRRADSNLRDHDMQWDFWTLSPESAHQVTWLMGDRGIPRTWRHMNGYTSHTYMWINASGERFWVKYHFKTDQGIEYFTQHEADQMAAADTDYHMRDLFEHIRDGDFPSWTLHVQVMPYEEAAGYRFNPFDLTKVWPHGDYPLIPVGRMTLERNPTDNHAEIEQAAFQPNNLVPGIGPSPDRMLLARLFSYADAHRYRIGANYQQLPVNAPVVDVRTYSKDGAMAYRKTTDPVYAPNSKGGPAADTEHFGTPPSWETDGSITRTAYVSHAEDDDWGQPGTLVREVMDDAARDRLVDNVVDHLLNEVTEPVLQRAFAYWSNIDRTIGDRIAKGVRAKAGEKDFKAAEQRNPARQAMQDKA

SEQ ID NO: 19682 - protein, 527 aa, Mus musculus
MSDSRDPASDQMKQWKEQRASQRPDVLTTGGGNPIGDKLNIMTAGSRGPLLVQDVVFTDEMAHFDRERIPERVVHAKGAGAFGYFEVTHDITRYSKAKVFEHIGKRTPIAVRFSTVTGESGSADTVRDPRGFAVKFYTEDGNWDLVGNNTPIFFIRDAILFPSFIHSQKRNPQTHLKDHDMVWDFWSLRPESLHQVSFLFSDRGIPDGHRHMNGYGSHTFKLVNADGEAVYCKFHYKTDQGIKNLPVGEAGRLAQEDPDYGLRDLFNAIANGNYPSWTFYIQVMTFKEAETFPFNPFDLTKVWPHKDYPLIPVGKLVLNKNPVNYFAEVEQMAFDPSNMPPGIEPSPDKMLQGRLFAYPDTHRHRLGPNYLQIPVNCPYRARVANYQRDGPMCMHDNQGGAPNYYPNSFSAPEQQRSALEHSVQCAVDVKRFNSANEDNVTQVRTFYTKVLNEEERKRLCENIAGHLKDAQLFIQKKAVKNFTDVHPDYGARIQALLDKYNAEKPKNAIHTYTQAGSHMAAKGKANL

SEQ ID NO: 19683 - protein, 527 aa, Mus musculus
MSDSRDPASDQMKQWKEQRASQRPDVLTTGGGNPIGDKLNIMTAGSRGPLLVQDVVFTDEMAHFDRERIPERVVHAKGAGAFGYFEVTHDITRYSKAKVFEHIGKRTPIAVRFSTVAGESGSADTVRDPRGFAVKFYTEDGNWDLVGNNTPIFFIRDAILFPSFIHSQKRNPQTHLKDPDMVWDFWSLRPESLHQVSFLFSDRGIPDGHRHMNGYGSHTFKLVNADGEAVYCKFHYKTDQGIKNLPVGEAGRLAQEDPDYGLRDLFNAIANGNYPSWTFYIQVMTFKEAETFPFNPFDLTKVWPHKDYPLIPVGKLVLNKNPVNYFAEVEQMAFDPSNMPPGIEPSPDKMLQGRLFAYPDTHRHRLGPNYLQIPVNCPYRARVANYQRDGPMCMHDNQGGAPNYYPNSFSAPEQQRSALEHSVQCAVDVKRFNSANEDSVTQVRTFYTKVLNEEERKRLCENIAGHLKDAQLFIQKKAVKNFTDVHPDYGARIQALLDKYNAEKPKNAIHTYTQAGSHMAAKGKANL

SEQ ID NO: 19684 - protein, 527 aa, Mus musculus
MSDSRDPASDQMKQWKEQRASQRPDVLTTGGGNPIGDKLNIMTAGSRGPLLVQDVVFTDEMAHFDRERIPERVVHAKGAGAFGYFEVTHDITRYSKAKVFEHIGKRTPIAVRFSTVAGESGSADTVRDPRGFAVKFYTEDGNWDLVGNNTPIFFIRDAILFPSFIHSQKRNPQTHLKDPDMVWDFWSLRPESLHQVSFLFSDRGIPDGHRHMNGYGSHTFKLVNADGEAVYCKFHYKTDQGIKNLPVGEAGRLAQEDPDYGLRDLFNAIANGNYPSWTFYIQVMTFKEAETFPFNPFDLTKVWPHKDYPLIPVGKLVLNKNPVNYFAEVEQMAFDPSNMPPGIEPSPDKMLQGRLFAYPDTHRHRLGPNYLQIPVNCPYRARVANYQRDGPMCMHDNQGGAPNYYPNSFSAPEQQRSALEHSVQCAVDVKRFNSANEDNVTQVRTFYTKVLNEEERKRLCENIAGHLKDAQLFIQKKAVKNFTDVHPDYGARIQALLDKYNAEKPKNAIHTYTQAGSHMAAKGKANL

SEQ ID NO: 19685 - protein, 527 aa, Mus musculus
MSDSRDPASDQMKQWKEQRASQRPDVLTTGGGNPIGDKLNIMTAGSRGPLLVQDVVFTDEMAHFDRERIPERVVHAKGAGAFGYFEVTHDITRYSKGKVFEHIGKRTPIAVRFSTVAGESGSADTVRDPRGFAVKFYTEDGNWDLVGNNTPIFFIRDAILFPSFIHSQKRNPQTHLKDPDMVWDFWSLRPESLHQVSFLFSDRGIPDGHRHMNGYGSHTFKLVNADGEAVYCKFHYKTDQGIKNLPVGEAGRLAQEDPDYGLRDLFNAIANGNYPSWTFYIQVMTFKEAETFPFNPFDLTKVWPHKDYPLIPVGKVVLNKNPVNYFAEVEQMAFDPSNMPPGIEPSPDKKLQGRLFAYPDTHRHRLGPNYLQIPVNCPYRARVANYQRDGPMCMHDNQGGAPNYYPNSFSAPEQQRSALEHSVQCAVDVKRFNSANEDNVTQVRTFYTKVLNEEERKRLCENIAGHLKDAQLFIQKKAVKNFTDVHPDYGARIQALLDKYNAEKPKNAIHTYTQAGSHMAAKGKANL

SEQ ID NO: 19686 - protein, 527 aa, Rattus norvegicus
MADSRDPASDQMKQWKEQRAPQKPDVLTTGGGNPIGDKLNIMTAGPRGPLLVQDVVFTDEMAHFDRERIPERVVHAKGAGAFGYFEVTHDITRYSKAKVFEHIGKRTPIAVRFSTVAGESGSADTVRDPRGFAVKFYTEDGNWDLVGNNTPIFFIRDAMLFPSFIHSQKRNPQTHLKDPDMVWDFWSLCPESLHQVTFLFSDRGIPDGHRHMNGYGSHTFKLVNANGEAVYCKFHYKTDQGIKNLPVEEAGRLAQEDPDYGLRDLFNAIASGNYPSWTFYIQVMTFKEAETFPFNPFDLTKVWPHKDYPLIPVGKLVLNRNPANYFAEVEQMAFDPSNMPPGIEPSPDKMLQGRLFAYPDTHRHRLGPNYLQIPVNCPYRARVANYQRDGPMCMHDNQGGAPNYYPNSFSAPEQQGSALEHHSQCSADVKRFNSANEDNVTQVRTFYTKVLNEEERKRLCENIANHLKDAQLFIQRKAVKNFTDVHPDYGARVQALLDQYNSQKPKNAIHTYVQAGSHIAAKGKANL

SEQ ID NO: 19687 - protein, 527 aa, Cavia porcellus
MADSRDPASDQMKHWKEERAAQKPDVLTTAGGNPVGDKLNIMTVGPRGPLLVQDVVFTDEMAHFDRERIPERVVHAKGAGAFAYFEVTHDITKYCKAKVFEHIGKKTPIAVRFSTVAGESGSADTVRDPRGFAVKFYTEEGIWDLVGNNTPIFFIRDALLFPSFIHSQKRNPQTHLKDPDMMWDFWSLRPESLHQVSFLFSDRGIPDGHRHMNGYGSHTFKLVNGSGEAVYCKFHYKTDQGIKNLSVEDAARLSQEDPDYGLRDLFNAIATGNYPSWTLYIQVMTFQQAQSFPFNPFDLTKIWPHKDYPLIPVGKLVLNRNPVNYFAEVEQIAFDPSNMPPGIEPSPDKMLQGRLFAYPDTHRHRLGPNYLQIPVNCPYRTRVANYQRDGPMCVTDNQGGAPNYYPNSFSAPVEQRQALEHTSRCSGDVGRYNSTDDDNVTQVRAFYTQVLNEEQRRRLCENIAGHLKDAQLFIQKKAVKNFMDVHPDYGNRIQTLLDKYNVEKPKNAIHTFVQDGSHLSAKEKANL

SEQ ID NO: 19688 - protein, 137 aa, Cavia porcellus
MADSRDPADQMKHWKEERAAQKPDVLTTAGGNPVGDKLNIMTVGPRGPLLVQDVVFTDEMAHFDRERIPERVVHAKGAGAFGYFEVTHDITKYCKAKVFEHIGKKTPIAVRFSTVAGESGSADTVRDPRGFAVKFYT

SEQ ID NO: 19689 - protein, 121 aa, Cavia porcellus
DQMKHWKEERAAQKPDVLTTAGGNPVGDKLNIMTVGPRGPLLVQDVVFTDEMAHFDRERIPERVVHAKGAGAFGYFEVTHDITKYCKAKVFEHIGKKTPIAVRFSTVAGESGSADTVRDPR

SEQ ID NO: 19690 - protein, 488 aa, Rhodobacter sphaeroides
MTRMTTTAGAPIADNQNTLTAGPRGPVLLEDYQLIEKLAHQNRERIPERVVHAKGWGAFGTFTVTNDITRYSCAKVFSEVGKQTDLAVRFSTVAGELGAADHERDVRGFSVKMYTEEGNWDLAGNNTPVFFVRDPMKFPDFIHTQKRHPRTNLRSATAMWDFWSLSPESLHQVTILMSDRGLPVDPMHMNGYGSHTYSLWNAQGERFWVKFHWKTLQGHAHYTNAEAAEIVGRTREGYQEALFGAIEEGRFPKWRLMVQVMPEAEAETTPYNPFDLTKVWPHSDYPLIEVGVMELNRNADNYFAQIEQLAFSPSNKVPGIGYSPDKMLQARVFSYADAHRYRLGTHYEALPVNAPRCPVHHYHKDGQMNFFGHRTGAVDAYYEPNSVPGAAVEDPAVAEPPLRISGDAARYNHREGNDDYSQPRALHDKVMTDEQRARLYANIAEAMAGIPEEIANRAIAQFDRVSPAYGEGIRAARARLAGALQAAE

SEQ ID NO: 19691 - protein, 485 aa, Porphyromonas gulae
MEKNKLTTAAGAPVADNQNVATAGKRGPMLLQDVWFLEKLAHFDREVIPERRMHAKGSGAFGTFTVTHDITKYTKAAIFSEIGKQTELFVRFSTVAGERGAADAERDIRGFAIKFYTEEGNWDLVGNNTPVFFLRDPLKFPDLNHVVKRDPRTNMRSPQNNWDFWTLLPEALHQVTITMSDRGIPASYRHMHGYGSHAFSFINAEGVRHWVKFHLHTQQGIKNLTDAEAEALIGKDRESHQRDLFESIERGDYPRWTLKVQIMTEEEAKALPYNPFDLTKVWSQKDFPLIEVGVMELNRNPENYFADVEQSAFNPANVVPGISFSPDRMLQGRLFSYGDTQRYRLGVNHHQIPVNRSRCPFLNMYHRDGAMRVDGNFGSRLGYEPNSYGHWQDQNEYKEPPLELDGAAYQWDFREDDSDYYSQPRKLFHIMSPDQQQVLFDNTARAMGDIPKEIKLRHIANCYKADPDYGKGVAKALGLDVNEAL

SEQ ID NO: 19692 - protein, 398 aa, Hordeum vulgare subsp. vulgare
VQTPVIVRFSTVVHERGSPETLRDPRGFAVKFYTREGNFDLVGNNMPVFFIRDGMKFPDMVHAFKPSPKTNMQENWRVVDFFSHHPESLHMFTFLFDDVGIPLNYRHMDGFGVNTYTLISRDGKAHLVKFHWKPTCGVKCLLDDEAVTVGGTCHTHATKDLTDSIAAGNYPEWKLFIQTIDADHEDRFDFDPLDVTKTWPEDIIPLQPVGRMVLNKNIDNFFAENEQLAFCPAVTVPGIHYSDDKLLQTRIFSYADTQRHRLGPNYLMLPVNAPKCAHHNNHHDGLMNFIHRDEEVNYFPSRFDPTRHAEKYPMPPRVLSGCREKCIIDKENNFKQAGERYRSFDPARQDRFLQRWVDALTDARVTHEIQSIWVSYWSQCDASLGQKLASRLKIKPNM

SEQ ID NO: 19693 - protein, 339 aa, Synechococcus sp. PCC 7942
MIRIRNRWFRWLAIALASLVASIGIATVGFAATGVTPDQVLSAIEGTFGVNVGQRRNHIKGTCAVGNFVATTEAKTYSRSPLFSGQSIPVVARFSLAGGNPKAPDTAKNPRGLGLQFQLPNNRFLNMALLNTPVFGVASPEGFYENILAIRPDPTTGKPDPEKVKAFREKYPENKAQAAFLASNNPPTSYANTSYFGLHAFKFINQTNQTRLVRWQFVPQDGEKRLTDAELQAAPANFLEQKLIERTQDSPVKWDFWITLGQPGDAEDNPTIAWPSDRQQVKVGTLTLTAASPQPGAACEGINYDPLVLSDGIEPTNDPVLQFRSGVYALSYSKRTRGL

SEQ ID NO: 19694 - protein, 365 aa, Synechococcus sp. PCC 7942
MTVVIYYMTVLCKAFDCFNSSAVENTMIRIRNRWFRWLAIALASLVASIGIATVGFAATGVTPDQVLSAIEGTFGVNVGQRRNHIKGTCAVGNFVATTEAKTYSRSPLFSGQSIPVVARFSLAGGNPKAPDTAKNPRGLGLQFQLPNNRFLNMALLNTPVFGVASPEGFYENILAIRPDPTTGKPDPEKVKAFREKYPENKAQAAFLASNNPPTSYANTSYFGLHAFKFINQTNQTRLVRWQFVPQDGEKRLTDAELQAAPANFLEQKLIERTQDSPVKWDFWITLGQPGDAEDNPTIAWPSDRQQVKVGTLTLTAASPQPGAACEGINYDPLVLSDGIEPTNDPVLQFRSGVYALSYSKRTRGL

SEQ ID NO: 19695 - protein, 483 aa, Ralstonia metallidurans
MTMNKLTTAFGAPVVDNQNVQTAGPRGPALLQDVWFLEKLAHFDREVIPERRMHAKGAGAYGTFTVTHDITKYTRANLFSQVGKKTDLFLRFSSVAGERGAADAERDIRGFAIKFYTEEGNWDLVGNNTPVFFLRDPLKFPDLNHAVKRDPRTGMRSAESNWDFWTGLPEALHQVTIVMSDRGIPRTWRHMHGFGSHTYSFINANMERFWVKFHFVTQQGIQNLTDEEAAEITGQDREYHQRDLFESIERGDFPRWKLCVQIMPEAEASKVPYHPFDLTKIWPKKDYPLIEVGVLELNRNPDNFFAEVEQASFAPSTIVPGVGFSPDKMLQGRLFSYGDAARYRVGVNHHQIPVNSPKAAKYVNSYHRDGTMRVDGNRGAAIGYEPNTKGEWAEQPDFREPPLTLEGTADHWNHREDGDYFSQVGALFRLMSPTQQQALFDNTARSIKGVSKHIQQTHIKHCTAADPAYGAGVAAAIEMIEAK

SEQ ID NO: 19696 - protein, 504 aa, Neisseria meningitidis MC58
MTTSKCPVTHLTMNNGAPVADNQNSLTAGPRGPLLAQDLWLNEKLADFVREVIPERRMHAKGSGAFGTFTVTHDITKYTRAKIFSEVGKKTEMFARFTTVAGERGAADAERDIRGFALKFYTEEGNWDVVGNNTPVFFLRDPRKFPDLNKAVKRDPRTNMRSATNNWDFWTLLPEALHQVTIVMSDRGIPAGYRHMHGFGSHTYSFWNEAGERFWVKFHFRTQQGIKNLTNEEAAKIIADDRESHQRDLYEAIERGEFPKWTMYIQVMPEADAEKVPYHPFDLTKVWPKKDYPLIEVGEFELNRNPENFFADVEQSAFAPSNLVPGVGASPDKMLQARLFNYADAQRYRLGVNFRQIPVNRPRCPVHSNQRDGQGRADGNYGSLPHYEPNSFGQWQQQPDFAEPPLKINGDAAHWDYRQDDDDYFSQPRALFNLMNDAQKQALFGNTAAAMGDAPDFIKYRHIRNCYRCDPAYGEGVAKALGLTVEDAQAARATDPALGQAGLL

SEQ ID NO: 19697 - protein, 492 aa, Suaeda maritima subsp. salsa
MDPYKFRPSSANNSPYFTANSGAPVWNNNNSLTVGHRGPILLEDYHLVEKLANFDRERIPERVVHARGASAKGFFEVTHDVSHLTCADFLRSPGVQTPVIVRFSTVIHERGSPETIRDPRGFAVKFYTREGNFDLVGNNFPVFFIRDGMKFPDMVHSLKPNPKSHIQENWRIMDFFSHHPESLHMFTFLFDDIGIPANYRHMEGSGVNTYTLINKAGKTYYVKFHWKPTCGVKSLLEDEAIKVGGANHSHATQDLYDSIASGNYPEWKLFIQTIDPADEDKFDFDPLDVTKTWPEDILPLQPVGRLVLNKNIDNFFAENEQLAFCPSIVVPGVHYSDDKLLQTRIFSYSDTQRHRLGPNYLQLPVNAPKCSHHNNHYDGFMNFMHRDEEVDYFPSRYDPVRHAERYPIPSNVLNGCREKQCIPKENNFKQPGERYRSMDPARQERFICRVVDALSDPRVTHEIRSIWISYWSQADKSLGMKVASRLNVRPTM

SEQ ID NO: 19698 - protein, 503 aa, Micrococcus luteus
MEHQKTTPHATGSTRQNGAPAVSDRQSLTVGSEGPIVLHDTHLLETHQHFNRMNIPERRPHAKGSGAFGEFEVTEDVSKYTKALVFQPGTKTETLLRFSTVAGELGSPDTWRDVRGFALRFYTEEGNYDLVGNNTPIFFLRDPMKFTHFIRSQKRLPDSGLRDATMQWDFWTNNPESAHQVTYLMGPRGLPRTWREMNGYGSHTYLWVNAQGEKHWVKYHFISQQGVHNLSNDEATKIAGENADFHRQDLFESIAKGDHPKWDLYIQAIPYEEGKTYRFNPFDLTKTISQKDYPRIKVGTLTLNRNPENHFAQIESAAFSPSNTVPGIGLSPDRMLLGRAFAYHDAQLYRVGAHVNQLPVNRPKNAVHNYAFEGQMWYDHTGDRSTYVPNSNGDSWSDETGPVDDGWEADGTLTREAQALRADDDDFGQAGTLVREVFSDQERDDFVETVAGALKGVRQDVQARAFEYWKNVDATIGQRIEDEVKRHEGDGIPGVEAGGEARM

SEQ ID NO: 19699 - protein, 503 aa, Micrococcus luteus
MEHQKTTPHATGSTRQNGAPAVSDRQSLTVGSEGPIVLHDTHLLETHQHFNRMNIPERRPHAKGSGAFGEFEVTEDVSKYTKALVFQPGTKTETLLRFSTVAGELGSPDTWRDVRGFALRFYTEEGNYDLVGNNTPIFFLRDPMKFTHFIRSQKRLPDSGLRDATMQWDFWTNNPESAHQVTYLMGPRGLPRTWREMNGYGSHTYLWVNAQGEKHWVKYHFISQQGVHNLSNDEATKIAGENADFHRQDLFESIAKGDHPKWDLYIQAIPYEEGKTYRFNPFDLTKTISQKDYPRIKVGTLTLNRNPENHFAQIESAAFSPSNTVPGIGLSPDRMLLGRAFAYHDAQLYRVGAHVNQLPVNRPKNAVHNYAFEGQMWYDHTGDRSTYVPNSNGDSWSDETGPVDDGWEADGTLTREAQALRADDDDFGQAGTLVREVFSDQERDDFVETVAGALKGVRQDVQARAFEYWKNVDATIGQRIEDEVKRHEGDGIPGVEAGGEARI

SEQ ID NO: 19700 - protein, 498 aa, Micrococcus luteus
TTPHATGSTRQNGAPAVSDRQSLTVGSEGPIVLHDTHLLETHQHFNRMNIPERRPHAKGSGAFGEFEVTEDVSKYTKALVFQPGTKTETLLRFSTVAGELGSPDTWRDVRGFALRFYTEEGNYDLVGNNTPIFFLRDPMKFTHFIRSQKRLPDSGLRDATMQWDFWTNNPESAHQVTYLMGPRGLPRTWREMNGYGSHTYLWVNAQGEKHWVKYHFISQQGVHNLSNDEATKIAGENADFHRQDLFESIAKGDHPKWDLYIQAIPYEEGKTYRFNPFDLTKTISQKDYPRIKVGTLTLNRNPKNHFAQIESAAFSPSNTVPGIGLSPDRMLLGRAFAYHDAQLYRVGAHVNQLPVNRPKNAVHNYAFEGQMWYDHTGDRSTYVPNSNGDSWSDETGPVDDGWEADGTLTREAQALRADDDDFGQAGTLVREVFSDQERDDFVETVAGALKGVRQDVQARAFEYWKNVDATIGQRIEDEVKRHEGDGIPGVEAGGEARI

SEQ ID NO: 19701 - protein, 497 aa, Micrococcus luteus
VPHATGSTRENGAPAVSDRESLTVGSEGPIVLHDVHLLETHQHFDRMNIPERRPHAKGSGAFGVFEVTEDVSSYTKALVFEPGVETEVLLRFSTVAGENGSPDTWRDTRGFALRFYTSEGNYDLVGNNTPIFFLRDPMKFTHFIRSQKRLPNSGLRDATMEWDFWTNNPESAHQVTYLMGPRGLPRTWREMDGYGSHTYLWVNAEGAKHWVKYHFISQEGVHNLSNDEATQIAGENADFHRQDLFEVIAKGVFPKWNLYIQAIPYSQGKTYRFNPFDLTKTISQANYPRIKVGVNTLNRNPKNFFAEIESAAFSPSNTVPGIGLSPDRMLLGRAFAYHDAQLYRVGAHVNQLPVNSPDDATHNYAFEGEMWEDHTGNRSTYVPNSDGNSWSNEVGPTNNGWEAVGVLTREAEALRANDNNFGEAGTLTREVFSNEERNNFVQTVAGALKGVRSNVEAEAFVYWKLVNATNGERIQNTVKRKSGNGIPGVEAGGEARM

SEQ ID NO: 19702 - protein, 503 aa, Micrococcus luteus
  unsure (1)..(503): unsure at all Xaa locations
MEHQKTTPHATGSTRQNGAPAVSDRQSLTVGSEGPIVLHDTHLLETHQHFNRXNIPERRPHAKGSGAFGEFEVTEDVSKYTKALVFQPGTKTETLLRFSTVAGELGSPDTWRDVRGFALRFYTEEGNYDLVGNNTPIFFLRDPXKFTHFIRSQKRLPDSGLRDATXQWDFWTNNPESAHQVTYLXGPRGLPRTWREMNGYGSHTYLWVNAQGEKHWVKYHFISQQGVHNLSNDEATKIAGENADFHRQDLFESIAKGDHPKWDLYIQAIPYEEGKTYRFNPFDLTKTISQKDYPRIKVGTLTLNRNPENHFAQIESAAFSPSNTVPGIGLSPDRMLLGRAFAYHDAQLYRVGAHVNQLPVNRPKNAVHNYAFEGQXWYDHTGDRSTYVPNSNGDSWSDETGPVDDGWEADGTLTREAQALRADDDDFGQAGTLVREVFSDQERDDFVETVAGALKGVRQDVQARAFEYWKNVDATIGQRIEDEVKRHEGDGIPGVEAGGEARI

SEQ ID NO: 19703 - protein, 505 aa, Staphylococcus aureus
MSQQDKKLTGVFGHPVSDRENSMTAGPRGPLLMQDIYFLEQMSQFDREVIPERRMHAKGSGAFGTFTVTKDITKYTNAKIFSEIGKQTEMFARFSTVAGERGAADAERDIRGFALKFYTEEGNWDLVGNNTPVFFFRDPKLFVSLNRAVKRDPRTNMRDAQNNWDFWTGLPEALHQVTILMSDRGIPKDLRHMHGFGSHTYSMYNDSGERVWVKFHFRTQQGIENLTDEEAAEIIATDRDSSQRDLFEAIEKGDYPKWTMYIQVMTEEQAKNHKDNPFDLTKVWYHDEYPLIEVGEFELNRNPDNYFTDVEQAAFAPTNIIPGLDFSPDKMLQGRLFSYGDAQRYRLGVNHWQIPVNQPKGVGIENICPFSRDGQMRVVDNNQGGGTHHYPNNHGKFDSQPEYKKPPFPTDGYGYEYNQRQDDDNYFEQPGKLFRLQSEDAKERIFTNTANAMEGVTDDVKRRHIRHCYKADPEYGKGVAKALGIDINSIDLETENDETYENFEK

SEQ ID NO: 19704 - protein, 455 aa, Staphylococcus aureus
MSQQDKKLTGVFGHPVSDRENSMTAGPRGPLLMQDIYFLEQMSQFDREVIPERRMHAKGSGAFGTFTVTKDITKYTNAKIFSEIGKQTEMFARFSTVAGERGAADAESDIRGFALKFYTEEGNWDLVGNNTPVFFFRDPKLFVSLNRAVKRDPRTNMRDAQNNWDFWTGLPEALHQVTILMSDRGIPKDLRHMHGFGSHTYSMYNDSGERVWVKLHFRTQQGIENLTDEEAAEIIATGRDSSQRDLFEAIEKGDYPKWTMYIQVMTEEQAKNHKDNPFDLTKVWYHDEYPLIEVGEFELNRNPDNYFMDVEQVAFASTNIIPGLDFSPDKMLQGRLFSYGDAQRYRLGVNHWQIPVNQPKGVGIENICPFSRDGQMRVVDNNQGGGTHYYPNNHGKFDSQPEYKKPPFPTDGYGYEYNQRQDDDNYFEQPGKLFRLQSEGAKERILQIQQMQWKA

SEQ ID NO: 19705 - protein, 493 aa, Staphylococcus xylosus
MKRKLTGLFGAPVSDRENSMTAGPRGPLLMQDIYFLEQMAHFDREVIPERRMHAKGSGAFGTFTVTNDITKYTCASIFAEVGKQTEMFARFSTVAGERGAGDAERDIRGFALKFYTDEGNWDLVGNNTPVFFFRDPKLFPSLNHVVKRNPKTNMKDPQANWDFWTLLPEALHQITILMTDRGIPKGFRNMHGFGSHTYSMYNDKGERFWVKFHHRTQQGIENYSAEEAEQVMAKDRDSSQRDLFNNIEQGNFPKWKMYIQVMTEEQARNHKDNPFDLTKVWYKDEYPLIEVGEFELNRNPENYFQDVEQAAFAPTNIVPGLDFSPDKMLQGRLFSYGDTQRYRLGVNHWQIPVNQPKGVGMENICPFSRDGHMRILDNNQGASTHYYPNSNGAFEDQPQYKKPALDIQGQAYEYDFREDDDNYFEQPGKLFRLLSSEEQQILFNNTANEMSPVTDALKHRHIRHCYKADPAYGQGVAEAMGIDINEVDLDVAD

SEQ ID NO: 19706 - protein, 505 aa, Staphylococcus warneri
MSKQDGKLTGLFGAPVSDRENSMTAGPRGPLLMQDIYFLEQMSHFDREVIPERRMHAKGSGAFGTFTVTNDITQYTSAKMFSEVGKQTEMFARFSTVSGERGAADAERDIRGFALKFYTEDGNWDLVGNNTPVFFFRDPKLFVSLNRAVKRDPRTNMRSAQNNWDFWTGLPEALHQVTILMSDRGIPKDLRHMHGFGSHTYSMYNDKGERVWVKYHFRTQQGIENLTDEEAANVIATDRDSSQRDLFNAIENGDYPKWKMYIQVMTEEQARNHKDNPFDLTKVWYHGDYPLIEVGEFELNRNPNNYFQDVEQAAFAPTNIVPGLDYSPDKMLQGRLFPYGDAQRYRLGVNHWQIPVNQPKGVGIENLCPFSRDGQMRILDDNQGGGPHYYPNNQGVYDSQPEFKKPPFPADGDGYEYNQRQDDDNYFEQPGKLFRLQSDEAKERIFTNTANAMDGVTEDVKRRHIRHCYKADPDYGKGVAKALGIDINSIDLEGEQDETYENFKN

SEQ ID NO: 19707 - protein, 536 aa, Deinococcus radiodurans
MSDENNKGVGTAVQGVGGPRDGRTAPGEQGTTLTTRQGHPVHDNQNSRTVGSRGPMTLENYQFIEKLSHFDRERIPERVVHARGVGAHGVFRATGKVGDEPVSKYTRAKLFQEDGKETPVFVRFSTVGHGTHSPETLRDPRGFAVKFYTEDGNWDLVGNNLKIFFIRDALKFPDLIHSQKPSPTTNIQSQERIFDFFAGSPEATHMITLLYSPWGIPASYRFMQGSGVNTYKWVNDQGEGVLVKYHWEPVQGVRNLTQMQADEVQATNFNHATQDLHDAIERGDFPQWDLFVQIMEDGEHPELDFDPLDDTKIWPREQFPWRHVGQMTLNRNPENVFAETEQAAFGTGVLVDGLDFSDDKMLQGRTFSYSDTQRYRVGPNYLQLPINAPKKHVATNQRDGQMAYRVDTFEGQDQRVNYEPSLLSGPKEAPRRAPEHTPRVEGNLVRAAIERPNPFGQAGMQYRNFADWERDELVSNLSGALAGVDKRIQDKMLEYFTAADADYGQRVREGIQAKEAEMKGQKQEAPVYGTEASSLY

SEQ ID NO: 19708 - protein, 536 aa, Deinococcus radiodurans
MSDENNKGVGTAVQGVGGPRDGRTAPGEQGTTLTTRQGHPVHDNQNSRTVGSRGPMTLENYQFIEKLSHFDRERIPERVVHARGVGAHGVFRATGKVGDEPVSKYTRAKLFQEDGKETPVFVRFSTVGHGTHSPETLRDPRGFAVKFYTEDANWDFVVNNLKIFFIRDALKFPDLIHSQKPSPTTNIQSQERIFDFFAGSPEATHMITLLYSPWGIPASYRFMQGSGVNTYKWVNDQGEGVLVKYHWEPVQGVRNLTQMQADEVQATNFNHATQDLRDAIERGDFPQWDLFVKIMEDGEHPELDFDPLDDTKIWPREQFPWRHVGQMTLNRNPENVFAETEQAAFGTGVLVDGLDFSDDKMLQGRTFSYSDTQRYRVGPNYLQLPINAPKKHVATNQRDGQMAYRVDTFEGQDQRVNYEPSLLSGPKEAPRRAPEHTPRVEGNLVRAAIERPNPFGQAGMQYRNFADWERDELVSNLSGALAGVDKRIQDKMLEYFTAADADYGQRVREGIQAKEAEMKGQKQEAPVYGTEASSLY

SEQ ID NO: 19709 - protein, 528 aa, Melopsittacus undulatus
MADNRDDASDQLKQWRSQRGSQKPDVLTTGAGNPVGDKLNILTVGPRGPLLVQDVVFTDEMAHFDRERIPERVVHAKGAGAFGYFEVTHDITQYCKAKVFEHIGKRTPIAIRFSTVAGESGSADTVRDPRGFAMKFYTEEGNWDLVGNNTPIFFIRDAMLFPSFIHSQKRNPQTHLKDPDMVWDFWSLRPEFLHQVSFLFSDRGIPDGYRHMNGYGSHTFKLVNASGRAVYCKFHAKTDQGIKNLPVEEAGRLASTDPDYGIRDLYNAIAKGDYPSWSFFIQVMTFEEAEKFPFNPFDLTKIWPHGDYPLIPVGKLVLNRNPVNYFAEVEQMAFDPSNMPPGIEPSPDKMLQGRLFSYPDTHRHRLGPNYLQIPVNCPFRTRVANYQRDGPMCVSDNQGGAPNYYPNSFTGPEDQPVWKESRMSISGDVQRFNSANEDNVTQVRDFYTKVLKEDERQRLCKNIADHLKDAQLFIQKRAVKNFTDVHPDYGARIQALLDKYNADSGKKDVIRTYTQSTSRMSAKERSNL

SEQ ID NO: 19710 - protein, 182 aa, Cichorium intybus
  unsure (1)..(182): unsure at all Xaa locations
MDPYKQRPSSAYNSPFWTTNAGLPVYNNTASLTVGNRGPILLEDYHLIEKLANFTRERIPERIVHARGASAKGFFEVTHDITHLTCADFLRAPGVQTPTIVRFSTVIHERGSPETIRDPRGFATKFYTREGNFDIVGNNFPVFFTRDAMAFPDVIHAFKPNPKSHIQEXWRILDFLSHHPES

SEQ ID NO: 19711 - protein, 508 aa, Burkholderia fungorum
MSLWHQCTAPLPHSVSIKAIQESRMSEHKLTNAAGAPVADNQNSMTAGARGPVVLQDVWLLEKLAHFDREVIPERRVHAKGSGAFGTLKVTHDISRYTKAKVFAQAGKETPLFMRFSTVAGERGAADAERDVRGFSIKFYTEEGNWDVVGNNTPVFFIRDPLKFPDFIHTQKRDPYTNMRSNVAAWDFWSRHPESLHQVTILMSDRGIPQNFRQMHGFGSHTYSFINANNERFWVKFHFKSMQGVENFTDAEAAQVVAQDRESAQRDLLTNIDQGNFPKWRFAIQVMPEAEAATYRFNPFDITKVWSQKDYPLIDVGTIELNRNAANYFADVEQAAFTPANVVPGIGFSPDRLLQGRLFSYGDTQRYRLGVNHHQIPVNASRVASPHSFHRDGAMRTDGNLGGNVNYEPNRFGDFAQDANASEPPLAAGAVDRYDHRLDDDYYTQPGMLFALFDAAQRERLFGNIARHINGVPQEIVARQIEHFRRADPAYAEGVIAAIARLAEGETK

SEQ ID NO: 19712 - protein, 483 aa, Bacillus subtilis
MSSNKLTTSWGAPVGDNQNSMTAGSRGPTLIQDVHLLEKLAHFNRERVPERVVHAKGAGAHGYFEVTNDVTKYTKAAFLSEVGKRTPLFIRFSTVAGELGSADTVRDPRGFAVKFYTEEGNYDIVGNNTPVFFIRDAIKFPDFIHTQKRDPKTHLKNPTAVWDFWSLSPESLHQVTILMSDRGIPATLRHMHGFGSHTFKWTNAEGEGVWIKYHFKTEQGVKNLDVNTAAKIAGENPDYHTEDLFNAIENGDYPAWKLYVQIMPLEDAKTYRFDPFDVTKVWSQKDYPLIEVGRMVLDRNPENYFAEVEQATFSPGTLVPGIDVSPDKMLQGRLFAYHDAHRYRVGANHQALPINRARNKVNNYQRDGQMRFDDNGGGSVYYEPNSFGGPKESPEDKQAAYPVQGIADSVSYDHNDHYTQAGDLYRLMSEDERTRLVENIVNAMKPVEKEEIKLRQIEHFYKADPEYGKRVAEGLGLPIKKDS

SEQ ID NO: 19713 - protein, 483 aa, Bacillus subtilis
MSSNKLTTSWGAPVGDNQNSMTAGSRGPTLIQDVHLLEKLAHFNRERVPERVVHAKGAGAHGYFEVTNDVTKYTKAAFLSEVGKRTPLFIRFSTVAGELGSADTVRDPRGFAVKFYTEEGNYDIVGNNTPVFFIRDAIKFPDFIHTQKRDPKTHLKNPTAVWDFWSLSPESLHQVTILMSDRGIPATLRHMHGFGSHTFKWTNAEPEGVWIKYHFKTEQGVKNLDVNTAAKIAGENPDYHTEDLFNAIENGDYPAWKLYVQIMPLEDANTYRFDPFDVTKVWSQKDYPLIEVGRMVLDRNPENYFAEVEQATFSPGTLVPGIDVSPDKMLQGRLFAYHDAHRYRVGANHQALPINRARNKVNNYQRDGQMRFDDNGGGSVYYEPNSFGGPKESPEDKQAAYPVQGIADSVSYDHYDHYTQAGDLYRLMSEDERTRLVENIVNAMKPVEKEEIKLRQIEHFYKADPEYGKRVAEGLGLPIKKDS

SEQ ID NO: 19714 - protein, 507 aa, Staphylococcus aureus subsp. aureus Mu50
MTMSQQDKKLTGVFGHPVSDRENSMTAGPRGPLLMQDIYFLEQMSQFDREVIPERRMHAKGSGAFGTFTVTKDITKYTNAKIFSEIGKQTEMFARFSTVAGERGAADAERDIRGFALKFYTEEGNWDLVGNNTPVFFFRDPKLFVSLNRAVKRDPRTNMRDAQNNWDFWTGLPEALHQVTILMSDRGIPKDLRHMHGFGSHTYSMYNDSGERVWVKFHFRTQQGIENLTDEEAAEIIATDRDSSQRDLFEAIEKGDYPKWTMYIQVMTEEQAKNHKDNPFDLTKVWYHDEYPLIEVGEFELNRNPDNYFMDVEQAAFAPTNIIPGLDFSPDKMLQGRLFSYGDAQRYRLGVNHWQIPVNQPKGVGIENICPFSRDGQMRVVDNNQGGGTHYYPNNHGKFDSQPEYKKPPFPTDGYGYEYNQRQDDDNYFEQPGKLFRLQSEDAKERIFTNTANAMEGVTDDVKRRHIRHCYKADPEYGKGVAKALGIDINSIDLETENDETYENFEK

SEQ ID NO: 19715 - protein, 478 aa, Lactobacillus sakei
MTNQLTTNEGQPWADNQHSQTAGQRGPVLIQDYQLLEKLAHFNRERIPERVVHAKGAGAKGYFKVTKDMSAYTKAAVFSGVGKKTPLITRFSQVAGEAGYPDTYRDVRGFAVKFYTEEGNYDIVGNNTPVFFVNDPLKFPDFIHSQKRDPRTHARSQDMQWDFWSLSPESVHQVTILMSDRGIPASYRMMHGFGSHTFKWVNAQGEQFWVKYHFKTNQGIHNLSNELADELAGKDTDYLQNDLFDAIETGDYPSWTVAVQLVPYEDGLNYPQDIFDVTKVISQKDYPLIEIGQMVLDENPTNNFEDIQELAFSPANLVPGIEASPDKLLQGRLFGYKDAERYRLGANYEQLPVNRPKVPVHNYERDGAMAQNQATGVNYEPNSQDGPTEVPAAKIHGDQLSGTTGNFSADPDYYSAAGKLYRLLSADEQTRLIENIRMNLGQVTKPEIQIREVKQFYQADPEYGRRVATSVKLRFSSV

SEQ ID NO: 19716 - protein, 479 aa, Pseudomonas putida KT2440
MSKILTTASGAPVADNQNSRSAGPRGPLLLDDFHLIEKLAHFNRENIPERRVHAKGSGAYGTFTVTHDITGYTSAKLFEEVGKQTETFLRFSTVGGERGSADTERDPRGFAVKFYTEEGNWDIVGNNTPVFFIRDPLKFPDFIHTQKRHPQSNLKNAQMMWDFWSHSPEALHQVTILFSDRGIPDGYRHMHGFGSHTYSLINAKGERTWVKWHFKTQQGIKNLTPADAARLAGTDPDYAQRDLFEAIERGDYPRWTVCIQVMSEAEAASRDENPFDVTKTWSQKDYPLIEVGVLELNRNPLNYFAEVEQAAFGPSNMVPGVGLSPDRMLQGRVFAYADAHRYRVGTNHQQLPVNAPRCPVNSYQRDGSMATGSYGSAPNYEPNSYSDAPKQSPRHAEPALAMNGSADRYDHREDTDYFSHAGALFRLMNDEQKALLISNIAGTMAGVSEDVIQRQLQYFFKADPAYGEGIAKALGINLA

SEQ ID NO: 19717 - protein, 126 aa, Beta vulgaris
KFYTREGNFDLVGNNFPVFFIRDGMKFPDMVHSLKPNPKSHIQENWRVMDFFSHHPESLHMFTFLFDDIGVPANYRHMEGSGVNTYTLINKAGKVHCVKFHWKPTCGVKSLLEDEAIKVGGANHSH

SEQ ID NO: 19718 - protein, 744 aa, Emericella nidulans
MATSITAGLQKAQQAVQDTATKNKKIVDISHDTVNVHTDQEQRTDFGVAITDPDHWLRVTNETHSGPSLLEDHIARERIHRFDHERIPERVVHARGTGAYGNFTLKESIEDLTYAGVLTDTSRNTPVFVRFSTVQGSRGSADTVRDVRGFAVKFYTDEGNWDIVGNNIPVFFIQDAIKFPDFVHAVKPEPHNEVPQAQTAHNNFWDFVYLHPEATHMFMWAMSDRAIPRSYRMMQGFGVNTFSLVNKEGKRHFVKFHWIPHLGVHSLVWDEALKLAGQDPDFHRKDLMEAIDNKAYPKWDFAIQAIPEEDQDKFEFDIFDATKVWPEEQVPLRVVGELELNRNIDEFFPETEQVAFCTSHIVPGIDFSDDPLLQGRNFSYQDTQISRLGVNWEEIPINRPVCPFLNHNRDGAKRHRITKGTVNYWPNRFEANPPASDKGFKSHPAPITGRKRRDLTPKFKEYHNQAQLFYNSLSEVEKVHVKKAFSFELDHCDDPIVYERLAGQRLAEIDLPLAQAVAEMVGAPIPTKALRDNHGKTSVRLSQFDFTPKAPGIISRRIAIIIGDGYDKIAFNGMKAAILAAASAPLRHWHQTSAIYAQGEDKNSSKGVIPDHMYDGMRSTMFDATFIPGGSHIETLQKNGQIRYWIAETFGHLKALGAMGEAAQLVKEVLGNVMGVQIAGADSAEPVEWYGVVTARGPESAESLSEGFKVLKDAGDFTSKFFYQISQHRNWQRELDGLASTVAF

SEQ ID NO: 19719 - protein, 167 aa, Listeria monocytogenes
ARGAGAHGKFVTKKSMKKYTMAKFLQEEGTETEVFARFSTVIHGQHSPETLRDPRGFSVKFYTEEGNYDFVGNNLPVFFIRDAIKFPDVIHSLKPDPRTNIQDGNRYWDFFSLTPEATTMITYLFSDEGTPASYREIRGSSVHAFKWINEAGKTVYVKLRWVPKAGI

SEQ ID NO: 19720 - protein, 167 aa, Listeria monocytogenes
ARGAGAHGKFVTKKSMKKYTMAKFLQEEGTETEVFARFSTVIHGQHSPETLRDPRGFSVKFYTEEGNYDFVGNNLPVFFIRDAIKFPDVIHSLKPDPRTNIQDGNRYWDFFSLTPEATTMIMYLFSDEGTPASYREVRGSSVHAFKWINEEGKTVYVKLRWVPKAGI

SEQ ID NO: 19721 - protein, 167 aa, Listeria monocytogenes
ARGAGAHGKFVTKKSMKKYTMAKFLQEEGTETEVFARFSTVIHGQHSPETLRDPRGFSVKFYTEEGNYDFVGNNLPVFFIRDAIKFPDVIHSLKPDPRTNIQDGNRYWDFFSLTPEATTMIMYLFSDEGTPASYREIRGSSVHAFKWINEEGKTVYVKLRWVPKAGI

SEQ ID NO: 19722 - protein, 167 aa, Listeria monocytogenes
ARGAGAHGKFVTKKSMKKYTIAKFLQEEGTETEVFARFSTVIHGQHSPETLRDPRGFSVKFYTEEGNYDFVGNNLPVFFIRDAIKFPDVIHSLKPDPRTNIQDGNRYWDFFSLTPEATTMIMYLFSDEGTPASYREIRGSSVHAFKWINEEGKTVYVKLRWIPKAGI

SEQ ID NO: 19723 - protein, 167 aa, Listeria monocytogenes
ARGAGAHGKFVTKKSMKKYTMAKFLQEEGTETEVFARFSTVIHGQHSPETLRDPRGFSVKFYTEEGNYDFVGNNLPVFFIRDAIKFPDVIHSLKPDPRTNIQDGNRYWDFFSLTPEATTMIMYLFSDEGTPASYREIRGSSVHAFKWINEEGKTVYVKLRWIPKAGI

SEQ ID NO: 19724 - protein, 112 aa, Listeria monocytogenes
MTDRKNLTTNQGVPVGDNQNSMTAGRKGPTLIEDYVLIEKLAHFDRERVPERVVHARGAGAHGKFVTKKSMKKYTMAKFLQEEGTETEVFARFSTVIHGQHSPETLRDPRGF

SEQ ID NO: 19725 - protein, 488 aa, Listeria seeligeri
MTDRRNLTTNQGVPIGDNQNSMTAGLKGPTLLEDYVLIEKLAHFDRERVPERVVHARGAGAHGKFVTKKSMKKYTKAQFLQEEGTETEVFARFSTVIHGQHSPETLRDPRGFSVKFYTEEGNYDFVGNNLPVFFIRDAIKFPDVIHSLKPDPRTNIQDGNRYWDFFSLTPEATTMITYLFSDEGTPASYREIRGSSVHAFKWINEEGKTVYVKLRWVPKAGIVNLSTDQAAQIQAKEFNHASRDLYEAIENGDYPEWDLYVQVLDPKDLDNYDFNPLDATKDWFEDVFPYEHVGTMTLNRNPDNIFAETESVGFNPGVLVPGMLPSEDRLLQGRLFSYSDTQRHRVGPNYLQLPINSPKTPVDNNQRDGQMPFKQQTSSINYEPNSYDTEPKENPAYIEPEQEIRGDISGRLVAEKPNNFGHAKEVWKRYSDAERAALVKNIVDDWEGVREDIKIRNLRNFYQVEPEFAERVAAGTGINLAEHVIDLK

SEQ ID NO: 19726 - protein, 488 aa, Listeria seeligeri
MTDRRNLTTNQGVPIGDNQNSMTAGLKGPTLLEDYVLIEKLAHFDRERVPERVVHARGAGAHGKFVTKKSMKKYTKAQFLQEEGTETEVFARFSTVIHGQHSPETLRDPRGFSVKFYTEEGNYDFVGNNLPVFFIRDAIKFPDVIHSLKPDPRTNIQDGNRYWDFFSLTPEATTMITYLFSDEGTPASYREIRGSSVHAFKWINEEGKTVYVKLRWVPKAGIVNLSTDQAAQIQAKEFNHASRDLYEAIENGDYPEWDLYVQVLDPKDLDNYDFNPLDATKDWFEDVFPYEHVGTMTLNRNPDNIFAETESVGFNPGVLVPGMLPSEDRVLQGRLFSYSDTQRHRVGPNYLQLPINSPKTPVDNNQRDGQMPFKQQTSSINYEPNSYDTEPKENPAYIEPEQEIRGDISGRLVAEKPNNFGHAKEVWKRYSDAERAALVKNIVDDWEGVREDIKIRNLRNFYQVEPEFAERVAAGTGINLAEHVIDLK

SEQ ID NO: 19727 - protein, 488 aa, Listeria innocua
MTERKNLTTNQGTPVGDNQNSMTAGLKGPTLLEDYVLIEKLAHFDRERVPERVVHARGAGAHGKFVTKKSMKKYTIANFLQEEGTETEVFARFSTVIHGQHSPETLRDPRGFSVKFYTEEGNYDFVGNNLPVFFIRDAIKFPDVIHSLKPDPRTNIQDGNRYWDFFSLSPEATTMIMYLFSDEGTPASYREIRGSSVHAFKWINEEGKTVYVKLRWVPKAGIVNLSTEQAAQIQAKEFNHASRDLYEAIENGDYPEWDLYVQVLDPKDLDSFDFNPLDATKDWFEDVFPYEHVGTMTLNRNPDNIFAETESVGFNPGVLVRGMLPSEDRLLQGRLFSYSDTQRHRVGPNYLQLPINSPKAPVANNQRDGYMPFKQQTSSINYEPNSYETEPKENPAFIEQEQEIRGDISGRLIAEKPNNFGHAKEVWDRYSDAERAALVKNIVDDWSGVRDDIKIRNLRNFYQIEPEFANRVADGTGINLEEHVADLK

SEQ ID NO: 19728 - protein, 509 aa, Halomonas sp. SK1
MSDDTKKCPVTHMTTDFGAPVVTNRDSLTAGPRGPLLAQDVWLNEKLAGFVREVIPERRMHAKGSGAFGTFTVTHDITKYTRAKIFSEVGKKTEMFARFTTVAGERGAADAERDIRGFALKFYTEEGNWDMVGNNTPVFFIRDPRQFPDLNKAVKRDPRTNLRTATNNWDYWTLLPEALHQVTVVMSDRGIPASYRHMHGYSSHTYSLWNQAGERFWVKMHFRTQQGIKNLTDAEAGELVAQDRESHQRDLYEAIERGEYPKWTMFIQVMPEADAEKYALHPFDLTKVWYKGDYPLIEVGEFELNKNSENFFADVEQVAFSPSNLVPGIGVSPDRMLQRRLFNYADAQRYRLGVNYHQIPVNQARCPVHSNHRDGQGRVDGNYGALPHYEPNSFGQWQGQPQFSEPPLKLTGNAAHWSYDKDDHNYFEQPGKLFRLMNDGQKEALFGNTGRAMGDAPEFIKFRHIRNCHAADPAYGAGVAKALGINLEKALASKKDDPMYGNPLVALPA

SEQ ID NO: 19729 - protein, 488 aa, Listeria monocytogenes EGD-e
MTDRKNLTTNQGVPVGDNQNSMTAGRKGPTLIEDYVLIEKLAHFDRERVPERVVHARGAGAHGKFVTKKSMKKYTMAKFLQEEGTETEVFARFSTVIHGQHSPETLRDPRGFSVKFYTEEGNYDFVGNNLPVFFIRDAIKFPDVIHSLKPDPRTNIQDGNRYWDFFSLTPEATTMIMYLFSDEGTPASYREVRGSSVHAFKWINEEGKTVYVKLRWVPKAGIVNLSTEQASQIQAKEFNHASRDLYEAIENGDYPEWDLYVQVLDPKDLDSFDFNPLDATKDWFEDVFPYEHVGTMTLDRNPDNIFAETESVGFNPGVLVRGMLPSEDRLLQGRLFSYSDTQRHRVGPNYLQLPINSPKAPVANNQRDGHMPFKQQTSSINYEPNSYDTEPKENPAFIEPEQEIRGDISGRLIAEKPNNFGHAKEVWDRYSNAERAALVKNIVDDWSQVREDIKIRNLRNFYQVDPEFASRVAAGTGINLEEHVTDLK

SEQ ID NO: 19730 - protein, 504 aa, Staphylococcus epidermidis ATCC 12228
MSKQDGKLTGLFGAPVSDRENSMTAGQRGPLLMQDVYYLEQISHFDREVIPERRMHAKGSGAFGTFTVTNDITQYTNAKIFSEVGKQTEMFARFSTVSGERGAADLERDIRGFALKFYTEDGNWDLVGNNTPVFFFRDPKLFISLNRAVKRDPRTNMRSAQNNWDFWTGLPEALHQVTILMSDRGMPKGFRNMHGFGSHTYSMYNDKGERVWVKYHFRTQQGIENYTDEEAAKIVGMDRDSSQRDLYNAIENGDYPKWKMYIQVMTEEQAKNHPDNPFDLTKVWYKKDYPLIEVGEFELNRNPENYFLDVEQAAFTPTNIVPGLDYSPDKMLQGRLFSYGDAQRYRLGVNHWQIPVNQPKGVGVENLCPFSRDGQMRFLDNNQGGGPHYYPNNQGIYESQPEHKKPPFPTDGDGYEYNYRQDDDNYFEQPGKLFRLQSEDAKERIFTNTANAMDGVSKDVKVRHIRHCYKADPEYGKGVAKALGIDINQIDLETNQDETYENFK

SEQ ID NO: 19731 - protein, 512 aa, Anopheles gambiae str. PEST
NGKQIPSAMSRNPAENQLNAYRDAQKDKVTATMSHGAPVGTKTASETAGPRGPVLLQDVHLIDELAHFDRERIPERVVHAKGAGAFGYFEVTHDITQYCAAKLFEKVGKKTPLAVRFSTVGGESGSADTVRDPRGFAVKFYTDDGVWDMVGNNTPIFFIRDPVLFPSFIHTQKRNPATHLKDPDMFWDFISLRPETTHQTMFLFSDRGTPDGYRFMNGYGSHTYKLVNADGKPVYCKFHFKTDQGIKNLDPARANELTATDPDYSIRDLYNAIAKKDFPSWTLKVQVMTFEQAEKVPYNPFDLTKVWPQNEFPLIPVGRMVLDRNPSNYFAEVEQAAFAPSHLVPGIEPSPDKMLQARLFAYADTHRHRVGANYLMLPVNCPYRVATRNFQRDGPMNCTDNQGGAPNYFPNSFSGPQTCPRAHKLQNTPLKLSGDVNRYETGDEDNFSQATVFYRRVLDDAGRQRLINNIVGHLKDASPFLQERAVKNFAMVDADFGRHLSEGLKLRRTANL

SEQ ID NO: 19732 - protein, 484 aa, Anopheles gambiae str. PEST
SLQDKVTATMSHGAPVGTKTASETAGPRGPVLLQDVHLIDELAHFDRERIPERVVHAKGAGAFGYFEVTHDITQYCAAKLFEKVGKKTPLAVRFSTVGGESGSADTVRDPRGFAVKFYTDDGVWDMVGNNTPIFFIRDPVLFPSFIHTQKRNPATHLKDPDMFWDFISLRPETTHQTMFLFSDRGTPDGYRFMNGYGSHTYKLVNADGKPVYCKFHFKTDQGIKNLDPARANELTATDPDYSIRDLYNAIAKKDFPSWTLKVQVMTFEQAEKVPYNPFDLTKVWPQNEFPLIPVGRMVLDRNPSNYFAEVEQAAFAPSHLVPGIEPSPDKMLQARLFAYADTHRHRVGANYLMLPVNCPYRVATRNFQRDGPMNCTDNQGGAPNYFPNSFSGPQTCPRAHKLQNTPLKLSGDVNRYETGDEDNFSQATVFYRRVLDDAGRQRLINNIVGHLKDASPFLQERAVKNFAMVDADFGRHLSEGLKLR

SEQ ID NO: 19733 - protein, 298 aa, Anopheles gambiae str. PEST
TPQQMVDALHQTFGKYPNARAVHAKGIITEGFFTPSPEAKKICKAVHFSIAKSPVTVRFSDFTGIPNISDTDAHSNPRGLAIKFHLPDGKTTDIVSHSYNGFPVATTDEFRELLTAISESGSDSIKPTPLDTFLETHPVAKIFLTNQKPASVSFANLSYYGVNAFKFINSKGFAVYIRYQFIPEEGEKFLSQEALSQLGPNYLNEEIKSHLSSENIKFRLYAQIAQPGDTINNPSIVWPENRKRILLGTITLTKVTANIPAEDKKLSFIPNAVTDGIETVDVMLEDRSKAYPISVKER

SEQ ID NO: 19734 - protein, 651 aa, Agrobacterium tumefaciens str. C58 (Cereon)
MVDDFHFREKIFHFDHERIPERVVHARGYGAHGYFETYDSLATHTKADLFQRAGERTPAFVRFSTVAGNKGSADLARDVRGFAVKLYTKEGNWDLVGNNIPVFFIQDAIKFPDLVHAAKQEPDRAFPQAQTAHDTFWDFISLTPESMNMVMWIMSDRTIPRSFRFMEGFGVHTFRFINAKEQSTFVKFHWKPKLGLQSVAWNEAVKINGADPDFHRRDLWTAIQSGNFPEWELQVQLFDQDFADSFDFDVLDPTKIIPEEILAPKPVGRLVLDRMPDNFFAETEQVAFMTQNVPPGIDFSNDPLLQGRNFSYLDTQLKRLGGPNFTHLPINAPKCPFAHFQQDGHMAMRNPTGRANYQPNSFGEGQRESPTRGFQHFAAEEQGVKARLRPESFADHYSQARQFYISQTPPEQRHIASALTFELSKVETVEIRERMVSHLLNIDETLATTVAQKLGLQTMPEPANTAIPTRQDLEPSPALSIVERGPKRFEGRKLGILITDGVDAKLLKGLTQAVTAEKAVFEFIAPKVGGVTASNGTLIEAHHMIDGGPSVLFDAVALLTSEAAIAELTEEATARDFVADAFQHCKFIGYDRSALPLLEIAGIADAMDEGVLPLPGEEGLAAFVAELGKLRVWAREPSLKLGKASVPVNKE

SEQ ID NO: 19735 - protein, 247 aa, Magnetospirillum magnetotacticum
MTMHLPMGHAWVIPASQNGSRLGPSARDRAGRTGNVRTPRREYRMTDNRPILTTRQGHPVRDNQSTRTVGERGPATLENYQFIEKITHFDRERIPERVVHARGAGAHGWFEAYGKIGDEPASKYTRARVLNETGVKTPMFVRFSTVAGAKESPETERDPRGFAVKFKTVEGNWDLVGNNLKVFFIRDAIKFPDMIHAFKPDPVTNRQEAWRFFDFVAQHPESIHMVTWLKSPWGIPANYREMEGYGR

SEQ ID NO: 19736 - protein, 196 aa, Magnetospirillum magnetotacticum
  unsure (1)..(196): unsure at all Xaa locations
MAPTFASHVEPASVHRAQPAGAGGCADGVTLHRSRETQAMADQSPRLTTAFGNPVSDNQNSLTAGPRGPVLMQDYHLIEKMAHFNRERIPERVVHAKGYGAYGTFRLTKSLGEYTRAKVLTEVGKEVPMVARFSTVGGESGSADTARDPRGFALKFYTEEGNWDLVGNNTPIFFVRDAIKFSDFIRTQKRDPRTXI

SEQ ID NO: 19737 - protein, 260 aa, Magnetospirillum magnetotacticum
MPKQGVRNLTSAQAAEIQAKDVGHATRDLYDNIQAGNFPEWEFAVQIMPDGPNDHLSFDPLDDTKRWPEDQFPLLKCGRMVLDRVPDNFFAEVEQSAFGTGVLVDGIDFSDDKMLQGRTLSYSDTQRYRVGANYLQLPINAPQPGVKVYSNQRDGQMTYGVDGTGPNKHINYEPSTLGQGLAEAPKKKEYHQPVSGNLGRYQTSRTEDDYAQAGHRYRTFEDWEREDLIANLVADMKQCPEPIQLRMVWHFWHADEDYGR

SEQ ID NO: 19738 - protein, 495 aa, Leptospira interrogans serovar lai str. 56601
MDLIYRSIYKRRKIMSRKTLTTAGGHPVSQNQHSLTAGPRGPVLIQDTHLIEKLAHFNRERIPERVVHAKGAGAYGTLTITQDLTKYSRASIFSKKGKQTSLFLRFSTVAGEKGSADTERDPRGFAVKFYTDEGIWDLVGNNTPVFFARDPLKFPDFIHSQKRDPVTGYKNPIRMWDYWAGSPEAFHQITILFGDRGIPDGYRFMNGYGSHTFGLWNSKGERFWTKFHFKSMQGIRNLSMEKASALAGTDPDYATRDLFEAIERKEFPKWKFCVQIMPEKEATKYKFNPFDLTKVWSHKDYPLIEVGVLELNSNPKNYFEEVEQAAFSPSNMPPGIGASPDKMLQGRLFAYPDAHRYRLGIQYQQLPVNRPKNSVNVYHRDGRTRFQCDGNYDNYEPNGFEGPVQDSSYAEPPLSISGDMDRYNSHIGNDDYSQAGDLYRLMSVEERERLTSAIASTMHNLPKPLLEANLKHFHLCDPEYGEQLAAKVGLALSRV

SEQ ID NO: 19739 - protein, 488 aa, Streptomyces coelicolor
MPENNQKPLTTVAGPPVPDNQNSLTSGPRRPMLLQDVWFLEKLAHFDREVIPERRMHAKGSGLFGTFTVTHDITRYTSAKIFSEIGKKTPLFTRFSTVAGERGAADAERDIRGFAVKFYTDEGNWDLVGNNTPVFFFRDPLKFPDLNHAVKRDPRTNLRNAENNWDFWTNLPEALHQVTIVMSDRGIPASYRHMHGFGSHTYSLINAEGERFWVKFHHRTQQGIKNLTDAEAEALVGKDRESHQRDLFDAIEDGDFPKWKLFIQVMPEADAENYRFHPFDLTKVWSKKDYPLIEVGEWELNRNPDNYFADVEQAAFSPANVVPGIEASPDRMLQGRLFSYGDAQRYRLGVNHHHQIPVNAPKNPVNSYHRDPAMRVDGNQGATPGIEPNSYGRWQEQPAYRDPAQAVGAVADRFNYREDDDNYFEQPGNLFRQMSPEQQQVLFENTARAIDGASAQTIERHIGNCTQADPAYGAGVRKAIEALAAGNL

SEQ ID NO: 19740 - protein, 507 aa, Xanthomonas campestris pv. campestris str. ATCC 33913
MRPGSLMVLALLAPTLIAPPVFAQSVLTRDNGAKVGDNQNSQTAGATGPTLLQDVQLIQKLQRFDRERIPERVVHARGTGVKGEFTATADLSNLTKAKVFSAGEKTPVFVRFSSVVHGNHSPETLRDPHGFATKFYTSEGNWDLVGNNFPTFFIRDAIKFPDMVHAFKPDPRTNLDDDSRRFDFFSHVPESTRTLTLLYSNEGTPAGYRFMDGNGVHAYKLVNAQGEVHYVKFHWKTLQGIKNLDPKQVAAVQAKDYSHLTNDLVGAIKKGDYPKWDLYVQVLKPDDLAKFDFDPLDATKIWPDVPEQKVGQMVLNKNVDNFFQETEQVAMAPANLVPGIEPSEDRLLQGRIFSYADTQLYRIGTNGLSLPVNRPRVAVNNGNQDGEANTGHTTSGVNYEPSRLEPRPQDTAARYSELPLSGTTQQAKITLEQNFKQAGELYRSYSKKDRADLVQSFGESLATTDTESKHLVLSFLYKADPEYGAGVTRVAKGDLARVKQLASTLQD

SEQ ID NO: 19741 - protein, 488 aa, Bacillus anthracis str. A2012
  unsure (1)..(488): unsure at all Xaa locations
MNPNNRLTTNQGAPVGDNQNSRTAGRRGPVLLEDYHLVEKLAHFDRERIPERVVHARGAGAHGVFVTKNSMKKYTKAAFLQNEGTETPVFVRFSTVIHGQGSPETARDPRGFAVKFYTEEGNYDIVGNHLPVFFIRDAIKFPDMVHSLXPAPDTNIQTPDRYWDFMTLSPESTHMMTWVFSDYGTPASYREMEXFGVHSFKWINAEGKIVYIKYHWKPQQGVRNLSAKEVQEVQGKDFNHATRDLFDAIEKGNYPKWDLHVQVMQLEETDSLDFDPLDPTKVWPEDRFPLMEVGTMTLNRNPKNFFAEVEQVAFSPSATVNGIEPSEDKLLQGRLFSYPDTQRYRLGANYLQIPVNCPYAAVHNQQRDGAMQINQNPSTINYEPSRHAENPVEDPAYRDSTMKVEGYVSREKIDKPNDFKQAGERYRSFSKEEQDNLIANLTSDLKDVNERTKLLAVCNFFRADQEYGMRLAQALNVDITQYVGNAPK

SEQ ID NO: 19742 - protein, 474 aa, Campylobacter jejuni subsp. jejuni NCTC 11168
MKKLTNDFGNIIADNQNSLSAGAKGPLLMQDYLLLEKLAHQNRERIPERTVHAKGSGAYGEIKITADLSAYTKAKIFQKGEVTPLFLRFSTVAGEAGAADAERDVRGFAIKFYTKEGNWDLVGNNTPTFFIRDAYKFPDFIHTQKRDPRTHLRSNNAAWDFWSLCPESLHQVTILMSDRGIPASYRHMHGFGSHTYSFINDKNERFWVKFHFKTQQGIKNLTNQEAAELIAKDRESHQRDLYNAIENKDFPKWKVQVQILAEKDIEKLGFNPFDLTKIWPHSFVPLMDIGEMILNKNPQNYFNEVEQAAFSPSNIVPGIGFSPDKMLQARIFSYPDAQRYRIGTNYHLLPVNRAKSEVNTYNVAGAMNFDSYKNDAAYYEPNSYDNSPKEDKSYLEPDLVLEGVAQRYAPLDNDFYTQPRALFNLMNDDQKTQLFHNIAASMEGVDEKIITRALKHFEKISPDYAKGIKKALEK

SEQ ID NO: 19743 - protein, 483 aa, Streptomyces violaceus
MTQGPLTTEAGAPVADNQNSETAGVGGPVLVQDQLLLEKLAHFNRERIPERVVHARGAGAYGTFTLTRDVSRWTRAAFLSEVGKRTETFLRFSTVAGSLGAADAVRDPRGWALKFYTEEGNYDLVGNNTPVFFIKDAIKFPDFIHTQKRDPYTGSQEADNVWDFWGLSPESTHQVTWLFGDRGIPASYRHMNGYGSHTYQWNNEAGEVFWVKYHFKTDQGIKNLTQDEANRLAGEDPDSHQRDLREAIERGDFPTWTVQVQIMPAADAAGYRFNPFDLTKVWPHEDYPPVEIGTLELNRNPENIFAEVEQSIFSPAHFVPGIGPSPDKMLQGRLFAYGDAHRYRVGINADHLPVNRPHATEARTHSRDGFLYDGRHKGAKNYEPNSFGGPVQTDRPLWQPTPVTGVTGDHAAPSHAEDDDFTQAGDLYRLMSEDEKGRLIDNLSGFIAKVSRDDIAERAIGNFRRADEDFGKRLEAAVQALRG

SEQ ID NO: 19744 - protein, 533 aa, Corynebacterium efficiens YS-314
MTENSAADQIIDRGMRPKVAGNTTRHNGAPVASENISVTAGPQGPNILNDIHLIEKLAHFNRENVPERIPHAKGHGAFGELHITEDVSQYTKADLFQPGKVTPMGVRFSTVAGEQGSPDTWRDVHGFALRFYTQEGNYDIVGNNTPTFFVRDGMKFPDFIHSQKRLNKNGLRDADMQWDFWTRAPESAHQVTYLMGDRGTPKTTRHMNGYGSHTFQWVNKDGEAFWVKYHFISRQGVENFTDAEAAEMAGINADYHREDLYNAIERGDYPIWDVKVQIMPFAEAENYRWNPFDLTKVWSKKDYPRIDVGYFILNRNPRNFFAQIEQIALDPGNIVPGVGLSPDRMLQARAFAYADQQRYRIGPNYRDLPINRPINEVNTYSREGHMQYVFDAEGEPSYSPNRYTKGAGYLDDGETSSSNHTSYGQASDIYVNPDPHGTDLVRAAYVKHQDDDDFMQAGILYREVYNDEEKARLADNISNAMQGISEETEPRVYEYWTNVDENLGARVKELYLQKKAAGAAEHTSSTGDDIDKK

SEQ ID NO: 19745 - protein, 710 aa, Corynebacterium efficiens YS-314
MSANPGIPSSGTPEVNEPTTPVPPLPRKPDQATAEPYSPTGCPMHISPDVNAQQGEYLTTAQGGRLRDTDHSLKAGERGPLLMQDHHFREKITHFDHERIPERVVHARGAAAHGVFKANGAASSICRAGVFAEGKETPVFTRFSTVLGNRGSADTVRDTRGFAVKFYTDEGTWDLVGNNIPVFFIQDGIKFPDVIHAAKPHPDRDIPQAQSAHDTFWDFVTLHTEATHHTIWNMSDRGIPRSYRMMEGFGVNTFRMINDKGETSLVKFHWKPKLGVHSQVWEEAQITGGVDPDFHRRDLADAIESGAFPEWDLGLQVFPDNKEQMFEGIDLLDPTKIVPEELAPVQIVGTMTLNKNVSNFHEETEQVAFHPGHLPPGIDVTADPLLQGRLFSYLDTQISRLGGPNFAQLPINRPHAPVNDMFREGMHQQGQHIGVAPYQPNSLDGGNPFPAEPSNGALIDVPVPVEGEITRSAPASFDDHYSQARLFYVSLSPIEQKHVADAYTFELGKCYEKAIKERAVHVLSNVDHDLASTVAKGLGVPAPEKKDLPEPTPSPALSQVGKTWPIDGRQIGILVTDDLPEDQVADVASLSKAIEDAGMVPLVTSTSGGTIGEPEEATGVAVSRTYVTVRSIEFDAAVVVETPEQPEVSILLSEMIRHGKAVALVGDATAQVPDRMGDAPGVVTVNAAADALDVLTPMLKGHRTWAANPA

SEQ ID NO: 19746 - protein, 505 aa, Staphylococcus aureus subsp. aureus MW2
MSQQDKKLTGVFGHPVSDRENSMTAGPRGPLLMQDIYFLEQMSQFDREVIPERRMHAKGSGAFGTFTVTKDITKYTNAKIFSEIGKQTEMFARFSTVAGERGAADAERDIRGFALKFYTEEGNWDLVGNNTPVFFFRDPKLFVSLNRAVKRDPRTNMRDAQNNWDFWTGLPEALHQVTILMSDRGIPKDLRHMHGFGSHTYSMYNDSGERVWVKFHFRTQQGIENLTDEEAAEIIATDRDSSQRDLFEAIEKGDYPKWTMYIQVMTEEQAKNHKDNPFDLTKVWYHDEYPLIEVGEFELNRNPDNYFMDVEQAAFAPTNIIPGLDFSPDKMLQGRLFSYGDAQRYRLGVNHWQIPVNQPKGVGIENICPFSRDGQMRVVDNNQGGGTHYYPNNHGKFDSQPEYKKPPFPTDGYGYEYNQRQDDDNYFEQPGKLFRLQSEDAKERIFTNTANAMEGVTDDVKRRHIRHCYKADPEYGKGVAKALGIDINSIDLETENDETYENFEK

SEQ ID NO: 19747 - protein, 516 aa, Corynebacterium glutamicum ATCC 13032
MSEKSAADQIVDRGMRPKLSGNTTRHNGAPVPSENISATAGPQGPNVLNDIHLIEKLAHFNRENVPERIPHAKGHGAFGELHITEDVSEYTKADLFQPGKVTPLAVRFSTVAGEQGSPDTWRDVHGFALRFYTEEGNYDIVGNNTPTFFLRDGMKFPDFIHSQKRLNKNGLRDADMQWDFWTRAPESAHQVTYLMGDRGTPKTSRHQDGFGSHTFQWINAEGKPVWVKYHFKTRQGWDCFTDAEAAKVAGENADYQREDLYNAIENGDFPIWDVKVQIMPFEDAENYRWNPFDLTKTWSQKDYPLIPVGYFILNRNPRNFFAQIEQLALDPGNIVPGVGLSPDRMLQARIFAYADQQRYRIGANYRDLPVNRPINEVNTYSREGSMQYIFDAEGEPSYSPNRYDKGAGYLDNGTDSSSNHTSYGQADDIYVNPDPHGTDLVRAAYVKHQDDDDFIQPGILYREVLDEGEKERLADNISNAMQGISEATEPRVYDYWNNVDENLGARVKELYLQKKA

SEQ ID NO: 19748 - protein, 502 aa, Corynebacterium glutamicum ATCC 13032
MRPKLSGNTTRHNGAPVPSENISATAGPQGPNVLNDIHLIEKLAHFNRENVPERIPHAKGHGAFGELHITEDVSEYTKADLFQPGKVTPLAVRFSTVAGEQGSPDTWRDVHGFALRFYTEEGNYDIVGNNTPTFFLRDGMKFPDFIHSQKRLNKNGLRDADMQWDFWTRAPESAHQVTYLMGDRGTPKTSRHQDGFGSHTFQWINAEGKPVWVKYHFKTRQGWDCFTDAEAAKVAGENADYQREDLYNAIENGDFPIWDVKVQIMPFEDAENYRWNPFDLTKTWSQKDYPLIPVGYFILNRNPRNFFAQIEQLALDPGNIVPGVGLSPDRMLQARIFAYADQQRYRIGANYRDLPVNRPINEVNTYSREGSMQYIFDAEGEPSYSPNRYDKGAGYLDNGTDSSSNHTSYGQADDIYVNPDPHGTDLVRAAYVKHQDDDDFIQPGILYREVLDEGEKERLADNISNAMQGISEATEPRVYDYWNNVDENLGARVKELYLQKKA

SEQ ID NO: 19749 - protein, 507 aa, Campylobacter jejuni
MKKLTNDFGNIIADNQNSLSAGTKGPLLMQDYLLLEKLAHQNRERIPERTVHAKGSGAYGEIKITADLSAYTKAKIFQKGEITPLFLRFSTVAGEAGAADAERDVRGFAIKFYTKEGNWDLVGNNTPTFFIRDAYKFPDFIHTQKRDPRTHLRSNNAAWDFWSLCPESLHQVTILMRDRGIPASYRHMHGFGSHTYSFINDKNERFWVKFHFKTQQGIKNLTNQEAAELIAKDRESHQRDLYNAIENKDFPKWKVQVQILAEKDIEKLGFNPFDLTKIWPHSLVPLMDIGEMILNKNPQNYFNEVEQAAFSPSNIVPGIGFSPDKMLQARIFSYPDAQRYRIGTNYHLLPVNRAKSEVNTYNVAGAMNFDSYKNDAAYYEPNSYDNSPKEDKSYLEPDLVLEGVAQRYAPLDNDFYTQPRALFNLMNDDQKTQLFHNIATSMEGVDEKIITRALEHFEKISPDYAKGIKKAFPIVSRIRAWRNHGHRCFLCEIVIRSQFHTTYEPEA

SEQ ID NO: 19750 - protein, 668 aa, Shigella flexneri 2a str. 301
MRIADDQNSLRAGNRGPTLLEDFILREKITHFDHERIPERIVHARGSAAHGYFQPYKSLSDITKADFLSDPNKITPVFVRFSTVQGGAGSADTVRDIRGFATKFYTEEGIFDLVGNNTPIFFIQDAHKFPDFVHAVKPEPHWAIPQGQSAHDTFWDYVSLQPETLHNVMWAMSDRGIPRSYRTMEGFGIHTFRLINAEGKATFVRFHWKPLAGKASLVWDEAQKLTGRDPDFHRRELWEAIEAGDFPEYELGFQLIPEEDEFKFDFDLLDPTKLIPEELVPVQRVGKMVLNRNPDNFFAENEQAAFHPGHIVPGLDFTNDPLLQGRLFSYTDTQISRLGGPNFHEIPINRPTCPYHNFQRDGMHRMGIDTNPANYEPNSINDNWPRETPPGPKRGGFESYQERVEGNKVRERSPSFGEYYSHPRLFWLSQTPFEQRHIVDGFSFELSKVVRPYIRERVVDQLAHIDLTLAQAVAKNLGIELTDDQLNITPPPDVNGLKKDPSLSLYAIPDGDVKGRVVAILLNDEVRSADLLAILKAMKAKGVHAKLLYSRMGEVTADDGTVLPIAATFAGAPSLTVDAVIVPCGNIADIADNGDANYYLMEAYKHLKPIALAGDARKFKATIKVADQGEEGIVEADSTDGSFMDELLTLMAEHRVWSRIPKIDKIPA

SEQ ID NO: 19751 - protein, 128 aa, Coccidioides posadasii
MGADDKANHSTYRYNEVPVYTTSQGCPVMDPESSQRIGENGPLLLQDFHLIDLLAHFDRERIPERVVHAKGAGAHGEFEVTDDISDITTIDMLKGVGKKTKLVTRFSTVGGEKGSADSARDPRGFAVK

SEQ ID NO: 19752 - protein, 555 aa, Thermobifida fusca
MLGRGGRLPPGKCRVGPAHWPSRLSSAEVSPTTRALSRHTGTSGPAPSRSLPAISTIKETDLTETNEALSTASNATGSTLDSGAPAASDRNSLSVGSNGPLLLHDVRLVETLAHFNRERVPERNPHAKGAGAFGVFETTEDVSQYTKAALFQKGARTEMLARFSTVAGEQGSPDTWRDVRGFALKFYTSEGNYDLVGNNTPIFFVRDPMKFPHFIRSQKRMPDTGLRDNNMQWDFWTLNPETAHQVTYLMGDRGLPRTWRHMNGYGSHTYMWINAKGEKFWVKYHFKTDQGIENMTNEEAERLAGVDADFHRRDLVEAIERGDYPSWTLYVQVMPYEDAKTYRFNPFDLTKVWPHSDYPLIKVGKMTLNRNPENFFAEIEQAAFAPSNLVPGIGVSPDKMLLGRVFAYADAHRARIGTNYFQLPVNKPRVKVNSYTFDGHMTYEHSGKAPVYAPNSYGRPWSDQTGPVEDSWEADGELVRSAYELHAEDDDFSQAGTLVREVFDDAQRDRLVETVADHLSKGVVEPVLSRAFQYWKNIDETIGERIEKRYHEIAR

SEQ ID NO: 19753 - protein, 480 aa, Microbulbifer degradans 2-40
MSKCPYQTTSAGSPVADNQNSQTAGPRGPVLMQDYQLLEKLAHQNRERIPERVVHAKGWGAFGTFTVTKDISKYTRAKIFDTVGKQTPLLTRFSTVAGELGAADAERDVRGFAVKFYTEEGNWDLVGNNTPVFFIRDPLKFPDFIHTQKRHPKTNLRSPTAMWDFWSQSPESLHQITILMSDRGLPTDVRHINGYGSHTFSFWNNDGERFWVKFHFKTQQGHRHWTNEEAEKVVGKTRESTQEDLFSAIENGNYPKWTVNVQIMPEADAEKTSYNPFDLTKVWPHSEYPLIEVGEMELNRNAENYFAEIEQAAFSPSNVVPGIGFSPDKVLQARIFSYADAHRYRIGTHYEALPVNAPKCPVHHYHKDGSMNFFGNKSGSTDAYYEPNSFGGAVQNPDVAEPPLKISGDADRYNHREGNDDFSQPAALFNLFDDGQKQRLFNNIAGAMQGVPQNIIDKQLALFDKVDPAYGAGIRAALKA

SEQ ID NO: 19754 - protein, 499 aa, Brucella suis 1330
MTDRPIMTTSAGAPIPDNQNSLTAGERGPILMQDYQLIEKLSHQNRERIPERAVHAKGWGAYGTLTITGDISRYTKAKVLQPGAQTPMLARFSTVAGELGAADAERDVRGFALKFYTQEGNWDLVGNNTPVFFVRDPLKFPDFIHTQKRHPRTHLRSATAMWDFWSLSPESLHQVTILMSDRGLPTDVRHINGYGSHTYSFWNDAGERYWVKFHFKTMQGHKHWTNAEAEQVIGRTRESTQEDLFSAIENGEFPKWKVQVQIMPELDADKTPYNPFDLTKVWPHADYPPIDIGVMELNRNPENYFTEVENAAFSPSNIVPGIGFSPDKMLQARIFSYADAHRHRLGTHYESIPVNQPKCLVHHYHRDGQMNVYGGIKTGNPDAYYEPNSFNGPVEQPSAKEPPLCISGNADRYNHRIGNDDYSQPRALFNLFDAAQKQRLFSNIAAAMKGVPGFIVERQLGHFKLIHPEYEAGVRKALKDAHGYDANTIALNEKITAAE

SEQ ID NO: 19755 - protein, 510 aa, Pseudomonas syringae pv. syringae B728a
MPLLNWSRHMVCLTAAGLITVPTVYAADTLTRDNGAVVGDNQNSQTAGAQGPVLLQDVQLLQKLQRFDRERIPERVVHARGTGVKGEFTASADISDLSKATVFKSGEKTPVFVRFSSVVHGNHSPETLRDPHGFATKFYTADGNWDLVGNNFPTFFIRDAIKFPDMVHAFKPDPRTNLDNDSRRFDFFSHVPEATRTLTLLYSNEGTPAGYRFMDGNGVHAYKLVNAKGEVHYVKFHWKSLQGLKNLDPKEVAQVQSKDYSHLTNDLVGAIKKGDFPKWDLYVQVLKPEELAKFDFDPLDATKIWPDVPEKKIGQMVLNKNVDNFFQETEQVAMAPANLVPGIEPSEDRLLQGRVFSYADTQMYRLGANGLSLPVNQPKVAVNNGNQDGALNTGHTTSGVNYEPSRLEPRPADDKARYSQLPLSGTTQQAKITREQNFKQAGDLYRSYSAKEKTDLVQSFGESLADTDTESKNIMLSYLYKADPDYGTRVAEVAKGDLSKVKSLAASLKD

SEQ ID NO: 19756 - protein, 481 aa, Pseudomonas syringae pv. syringae B728a
MSQKTLTTASGAPVADNQNSRSAGPRGPLLLDDFHLIEKLAHFNRENIPERRVHAKGSGAHGTFTVTRDISQYTSARLFDTVGKQTPIFLRFSTVGGERGSADTERDPRGFAIKFYTEEGNWDIVGNNTPVFFIRDPLKFPDFIHTQKRLPQTNLKSPQMMWDFWSHSPEALHQVTILFSDRGIPDGYRHMHGFGSHTYSLISAAGERHWVKWHYKTRQGIKNLTPAEAARIAGTDPDYAQRDLFTAIEKGDFPKWQVCIQLMTEAQAANHHENPFDVTKTWSQKEYPLIEVGELELNRNPLNYFAEVEQAAFGPSNMVPGVGLSPDRMLQGRVFAYADAHRYRVGTNHQQLPINAPKSPVHSYQRDGAMAFGTNGGATPNYEPNSYSDAPKENPRYAEPALSLNGAADRHDHRVDGDYYSQAGKLFNLMSADQQALLIGNIAGAMAGVSSDVVQRQLQHFYKADPAYGEGIARALDVKLG

SEQ ID NO: 19757 - protein, 522 aa, Pseudomonas fluorescens PfO-1
MRLKKTEEPEMNSTLGSGIIPRRTIGVLAASLLTLSVNAAPLTRDNGAAVGDNQNSQTAGANGPVLLQDVQLIQKLQRFDRERIPERVVHARGTGAHGTFTTTNDLSDLSKAKVFTAGQVTPVFVRFSAVVHGNHSPETLRDPRGFATKFYTADGNWDLVGNNFPTFFIRDAIKFPDMVHAFKPDPRTNLDDDSRRFDFFSHVPEATRTLTELYSNSGTPASYREMDGNSVHAYKLVNAKGDVHYVKFHWKSLQGIKNLDPKQVEKVQGRDYSHMTHDLVENIQKGNFPKWDLYIQVLNPQDLSKFEFDPLDATKIWPGVPERKVGQMVLNRNPANVFQETEQVAMAPSNVVPGIEPSEDRLLQGRIFAYADTQMYRLGANALQLPINAAKTAVNNGNQDGAMNAGASTSGVNYEPSRLQPREETAGARYSQTALQGSTQQAKIQREQNFKQAGDLYRSFSKKERQDLIESFGGSLASADDESKHIMLSFLYKADPEYGAGVTKVAKGDLSRVKALAAKLAD

SEQ ID NO: 19758 - protein, 513 aa, Pseudomonas aeruginosa PAO1
MNPSLNAFRPGRLLVAASLTASLLSLSVQAATLTRDNGAPVGDNQNSQTAGPNGSVLLQDVQLLQKLQRFDRERIPERVVHARGTGAHGEFVASADISDLSMAKVFRKGEKTPVFVRFSAVVHGNHSPETLRDPRGFATKFYTADGNWDLVGNNFPTFFIRDAIKFPDMVHAFKPDPRSNLDDDSRRFDFFSHVPEATRTLTLLYSNEGTPASYREMDGNSVHAYKLVNARGEVHYVKFHWKSLQGQKNLDPKQVAEVQGRDYSHMTNDLVSAIRKGDFPKWDLYIQVLKPEDLAKFDFDPLDATKIWPGIPERKIGQMVLNRNVDNFFQETEQVAMAPSNLVPGIEPSEDRLLQGRLFAYADTQMYRVGANGLGLPVNRPRSEVNTVNQDGALNAGHSTSGVNYQPSRLDPREEQASARYVRTPLSGTTQQAKIQREQNFKQTGELFRSYGKKDQADLIASLGGALAITDDESKYIMLSYFYKADSDYGTGLAKVAGADLQRVRQLAAKLQD

SEQ ID NO: 19759 - protein, 505 aa, Helicobacter pylori
MVNKDVKQTTAFGAPVWDDNNVITAGPRGPVLLQSTWFLEKLAAFDRERIPERVVHAKGSGAYGTFTVTKDITKYTKAKIFSKVGKKTECFFRFSTVAGERGSADAVRDPRGFAMKYYTEEGNWDLVGNNTPVFFIRDAIKFPDFIHTQKRDPQTNLPNHDMVWDFWSNVPESLYQVTWVMSDRGIPKSFRHMDGFGSHTFSLINAKGERFWVKFHFHTMQGVKHLTNEEAAEIRKHDPDSNQRDLFDAIARGDYPKWKLSIQVMPEEDAKKYRFHPFDVTKIWYTQDYPLMEVGIVELNKNPENYFAEVEQAAFTPANVVPGIGYSPDRMLQGRLFSYGDTHRYRLGVNYPQIPVNKPRCPFHSSSRDGYMQNGYYGSLQNYTPSSLPGYKEDKSARDPKFNLAHIEKEFEVWNWDYRADDSDYYTQPGDYYRSLPADEKERLHDTIGESLAHVTHKEIVDKQLEHFKKADPKYAEGVKKALEKHQKMMKDMHGKDMHHTKKKK

SEQ ID NO: 19760 - protein, 505 aa, Helicobacter pylori
MVNKDVKQTTAFGAPVWDDNNVITAGPRGPVLLQSTWFLEKLAAFDRERIPERVVHAKGSGAYGTFTVTKDITKYTKAKIFFKVGKKTECFFRFFTVAGERGSADAVRDPRGFAMKYYTEEGNWDLVGNNTPVFFIRDAIKFPDFIHTQKRDPQTNLPNHDMVWDFWSNVPESLYQVTWVMSDRGIPKSFRHMDGFGSHTFSLINAKGERFWVKFHFHTMQGVKHLTNEEAAEVRKYDPDSNQRDLFNAIARGDFPKWKLSIQVMPEEDAKKYRFHPFDVTKIWYLQDYPLMEVGIVELNKNPENYFAEVEQVAFTPANVVPGIGYSPDRMLQGRLFSYGDTHRYRLGVNYPQIPVNKPRCPFHSSSRDGYMQNGYYGSLQNYTPSSLPGYKEDKSARDPKFNLAHIEKEFEVWNWDYRADDSDYYTQPGDYYRSLPADEKERLHDTIGESLAHVTHKEIVDKQLEHFKKADPKYAEGVKKALEKHQKMMKDMHGKDMHHTKKKK

SEQ ID NO: 19761 - protein, 486 aa, Shewanella oneidensis MR-1
MSQQYLTSQSGSPIADDQNSLSAGERGPLLLQDWHLIEKLAHFNRERIPERVVHAKGTGVYGTFTLTKDLSDYTIADHFNGVGKQTETFVRFSTVGGEMGSADAERDPRGFGLRFYTARGNHDIVGNNTPTFFLRDGIKFPDFIHTQKRNPLTNLKDPQAMWDFWSLNPEAMHQVTILMSDRGIPANYRQMHGYGSHTFSFWNAKGERFWVKFHFKSQQGVVNLSNEQADKLKGIDPDSSQRDMVVAITDGNFPRWTVNVQIMPEADANTYHINPFDLTKVWPHGDYPLIEIGVLELNRLPQNYFAEVEQVALAPSNLVPGVGASPDKMLQARLFAYADAQRYRIGANYNQLPVNCPHAAKANHHQRAGAMAGTQCPYHGSQTGGDASANYGPNSTIGALVEPANFAEPPLRLDGETARYSRYNQDDYTQAGNLYRIFSEEEKARLVATISGSLRQASMDVQQRMLAHFQKADADYGQRIKMALGL

SEQ ID NO: 19762 - protein, 480 aa, Yersinia pestis CO92
MMSKKKGLTTAAGAPVVDNNNVITAGRRGPMLLQDVWFLEKLAHFDREVIPERRMHAKGSGAYGTFTVTHDITQYTRAKIFSEIGKKTDMFVRFSTVAGERGAADAERDIRGFAMKFYTEEGNWDLVGNDTPVFYLRDPLKFPDLNHVVKRDPRTNLRNPVYKWDFFSQLPEALHQLTIDFSDRGLPKSYRHMHGFGSHTFSLINANNERFWVKFHFRCQQGIENLMDDEAEKLIGSDRESSQRDLYEAIERGDFPRWKLQIQVMPEHEASQTPYNPFDLTKVWPHGDYPLIDVGYFELNRNPENYFAEVEQSSFNPANVVPGISFSPDRMLQGRLFSYGDAARYRLGVNHHQIPVNSAKCPFHNYHRDGAMRVDGNSGNGATYEPNSFGLFQEQPDFSEPPLTLEGAADHWNHREDTDYFSQPRALFNLLSEEEHQRMFTRIAGELSQVPEAIQRRQIALFTQVDPAYGAGVKKALGLN

SEQ ID NO: 19763 - protein, 497 aa, Vibrio vulnificus CMCP6
MGLASISVHAQTLTRDNGAPVGDNQNSITAGENGSVLLQDVHLIQKLQRFARERIPERVVHARGTGAHGEFVVSGDFSDLTLSSPFAQSGKVTPVFVRFSTVIHSKGSPETLRDPRGFATKFYTDQGNWDLVGNNLPVFFIRDSIKFPDMVHSLKPSPVTNLQDPNRFFDFFSSQPSATNMLTWVYTNLGTPASYRTMDGFGVHAYKWINRKGEVNYVKFHWKSQQGVKSLRPAEVTKVQGEDFNHLTNDLYTQINAGNFPKWDLYVKVLSPKALSKLDYNGLDATKVWLDVPEKKVGTMTLNRVPDNFFLETEQSAFAPSNIIPGIEPSEDRLLQGRLFAYADTQLYRLGANLFQLPVNSPKSPVANHNQDGPSNNSTGLGNVDSLDVNYEPSRLVNLTVDKQARAVETPLSGHVQQQAIRNPRDFFQAGVLYRSLSEQDKADLIHNLSGDLNKVNDAEVKAIMVSYFYRADKEYGTRLAKATDVNLKQVTKLASM

SEQ ID NO: 19764 - protein, 484 aa, Lactobacillus plantarum WCFS1
MTEKLTTETGQPWANNEHSQTAGARGPVLMQDYNLLEKLAHFDRERIPERVVHAKGAGAKGFFELENDMGEYTKADLFNGVGKKTPVILRFSQVAGEKGYPDTVRDVRGFALKFYTQQGNYDLVGNNTPVFFVNDPLKFPDFIHSQKRDPKTNRRTQNMQWDFWAHSPESLHQVTYLMGDRGLPASYRTMNGYGSHTFKWVNQNGEQFWVKYHFISDQGVKNMTAQAAEKAMSQDLDYLQDDLYDAIQEKNYPSWTMYVQILPYEEGLNYKWDIFDVTKVISHKDYPLIKVGKLTLNENPTNNFTDIEEAAMSPANFVPGIEPSPDKLLQGRLFSYKDAQRYRLGANFEDLPVNKPVVPVHNYERDGYMKINNQGAEVNYEPNALHGPEEVPDAAFSPDSVRGETRAQPYRYQVDYTTQAGDLYRLMSEPEQERLINTIKDALGQVTLPGVKELEIKQFYEADKNYGTRVANALGMNIADIISD

SEQ ID NO: 19765 - protein, 505 aa, Methanosarcina barkeri
MGEKNSSKVLTTGFGIPVGDDQNSLTAGNRGPVLMQDVHLLDKLSHFDHERIPERVVHAKGAGAGGYFEVTADVTKYTKAKFLSEIGKRTEVFVRFSTVGGEKGSADSARDPRGFAVKFYTEDGNYDLVGNNTPVFFIRDPLKFPDFIHTQKRNPATNCKDPDMFWDFLSLTPESIHQVTILFSDRGTPATYRNMNGYSSHTYKWYNEKGEYFWVQYHFKTDQGIKNLTLEEAEKIGGSDPDHATRDLYEAIKKGDYPSWTLEMQIMTPEQAEDYRFDIRDITKVWPHGDFPTMKIGKLVLNRNPTNYFAEVEQAAFSPANLVPGIGISPDKMLQGRVFSYHDTHIHRLGPNYNLIPVNAPKYSPENSYQRDGFMRVDANGGSGPNYWPNSFGGPSPDSVYLEPPFGVSGLAARTLYTHPNDDFVQAGNLYRDVMTDYDRENLVGNIVSHLSAAQKRIQLRQTALFFKADRDYGSRVAKGLELDIKEVERLANMTNEERARATER

SEQ ID NO: 19766 - protein, 532 aa, Oceanobacillus iheyensis HTE831
MAKKDESMNKSNLENDMSLTNRQGHPVTNNQNIRTVSNRGPATLENYDFIEKISHFDREKVPERIVHARGAGAHGYFETYGTVGNDPVSKYTRAKVFQDKGKQTPVFVRFSTVVHGNHSPETVRDPRGFAVKFYTEDGNWDLVGNNLKIFFIRDAMKFPDMIHAFRPDPVTNIQDSERFFDFCANSPESFHMVTFVYSPWGIPANYRMMQGSGVNTYKWVNKDGEAVLVKYHWEPKQGIKNLTTKEAEEIQATNFNHATQDLYDAIENGDYPEWELFVQIMSDDEHPELDFDPLDDTKLWPEDQFPWHPVGKMVLNKNPENYFTEVEQAAFGTGVLVDGLDFSDDKMLQGRTFSYSDTQRYRVGANYLQVPVNESKKRVATNHEGGQMRQKNDKAPSQNPHINYEPSVLGGLEENEQTGKEYTPHIEGNLVRESIDRNDNTKQAGHTFREFEEWEKAELISNLVGDLSVSDQRIQDKMIALAEEADDEYGRRLREGLEQAKKMGTPHNPLGAKDAEQAPKKAIDKGHDADPY

SEQ ID NO: 19767 - protein, 487 aa, Oceanobacillus iheyensis HTE831
MSNKRNTLTTASGAPVGDNQNSITAGHNGPTLLQDFHLLEKLAHFNRERIPERVVHAKGAGAHGYFEVTNDEISKYTKADFLSEKGKRTDMFIRFSTVAGEQGSADTVRDPRGFAVKFYTEEGNYDLVGNNTPIFFIRDAIKFPDFIHTQKRNPQTHLKDKDMVWDFWSLSPESLHQVTYLHSDRGLPATLRHMNGYGSHTFKWVNAEGEAFWVKYHFISEQGIKNLDPALADKIAGENPDYHTEDLFNAIEEGDHPAWKLYVQIMPYEDAKTYKWDPFDVTKIWSKKDYPRIEVGRMVLDRNPENYFAEVEQAAFSPGQFVPGIEASPDKMLQGRLFGYSDAHRYRLGANHHSIPVNRPKNEVNNYQRDGFMSVDGNGGNKPNYEPNSVNGPTEDSEAKINPFEIYGQADSVTYDSDDHYTQAGDLYRLMSADEKDRLVEAFVGHMTPVTKDEIKLRQIEHIYKADAEWGERVAQGLGLQVPESVK

SEQ ID NO: 19768 - protein, 510 aa, Pseudomonas syringae pv. tomato str. DC3000
MPLLNWSRHMVHLTAIGLISIPAAYAADTLTRDNGAAVGDNQNSQTAGAQGPVLLQDVQLLQKLQRFDRERIPERVVHARGTGVKGEFTASADISDLSKATVFKSGEKTPVFVRFSSVVHGNHSPETLRDPHGFATKFYTADGNWDLVGNNFPTFFIRDAIKFPDMVHAFKPDPRTNLDNDSRRFDFFSHVPEATRTLTLLYSNEGTPTGYRFMDGNGVHAYKLVNAKGEVHYVKFHWKTLQGIKNLDPKEVAQVQSKDYSHLTNDLVGAIKKGDFPKWDLYIQVLKPEDLAKFDFDPLDATKIWPDVPEKKIGQMVLNKNVDNFFQETEQVAMAPANLVPGIEPSEDRLLQGRVFSYADTQMYRLGANGLSLPVNQPKVAVNNGNQDGAMNSGKTTSGVNYEPSRLEPRPADEKARYSELPISGTTQQAKITREQNFKQAGDLYRSYNAKEQTDLVQSFGESLADTDTESKNIMLSFLYKADPTYGTRVTEAAKGDLAKVKSLAASLKD

SEQ ID NO: 19769 - protein, 513 aa, Vibrio parahaemolyticus RIMD 2210633
MVSTHWRATMQMSKSFLLITVGLASTSLQAQTLTRDNGAPVGDNQNSITAGENGSVLLQDVHLIQKLQRFARERIPERVVHARGTGAHGEFVASGDFSDLTVSAPFTEKGKVTPVFVRFSTVIHSKGSPETLRDPRGFATKFYTEQGNWDLVGNNLPVFFIRDSIKFPDMVHSLKPSPVTNVQDPNRFFDFFSHEPSATHMLTWVYSNLGTPASYRTMDGFGVHAYKWINQQGDVNYVKFQWKSQQGIKSLRPNKVTEMQGKDFNHLTNDLYAAIGRGNYPKWDLYVKVLSPEALSKLDYNGLDATKVWLNVPDRKVGTMTLNRLPENFFLETEQSAFAPSNLIPGIEPSEDRLLQGRLFAYADTQLYRLGANLFQLPVNRPLTSVNNHNQNGLSNNAQLSNGDVNYEPSRKLNLAEDNQFKAVETKLVGTVQQKAISKPRDFYQAGVLYRSMNEQDRSDLIANLAGDLNKVIDKDIKATMVSYFYRADKEYGSRLAEATDTNLSQVKNKAMM

SEQ ID NO: 19770 - protein, 479 aa, Vibrio parahaemolyticus RIMD 2210633
MTNKKLTTAAGCPVAHNQNVMTAGPRGPQLLQDVWFLEKLAHFDREVIPERRMHAKGSGAYGTFTVTHDITKYTRAKIFSEVGKKTELFARFTTVAGERGAADAERDIRGFALKFYTEEGNWDLVGNNTPVFFLRDPLKFPDLNHAVKRDPRTNMRSSTNNWDFWTSLPEAFHQVTIVMSDRGIPASYRHMHGFGSHTFSFINAENERYWVKFHFKTQQGIKNIGDEEAQLLAGKDRESHHRDLYESIERQDFPKWKMYVQIMPELEADEVNFNPFDLTRVWSQKDYPLIPVGEFELNRNPENFYAEVEQSAFNPAAIVPGIGFSPDKMLQGRLFAYGDAQRYRLGVNHHQIPVNAPRCPVHSYHRDGAMRVDGNFGSTLGYEPNYKQEWAEQPDYSEPPLRISGHADHYDHRVDEDYFSQAGDLFRLMNEEQRQALFDNTARAMDGVPDFIKERHVTHAYQADEAYGKGLELALGLAK

SEQ ID NO: 19771 - protein, 547 aa, Bacillus subtilis subsp. subtilis str. 168
MKDDHQNKQHQSNAQGSEEAFSHKTSGKNESEDTLTNRQGHPVTDNQNVRTVGNRGPTTLENYDFLEKISHFDRERIPERVVHARGAGAHGYFEAYGSFGDEPISTYTRAKLFQEKGKKTPAFVRFSTVNHGKHSPETLRDPRGFAVKLYTEDGNWDLVGNNLKIFFIRDPLKFPDLVHAFQPDPVTNIQDGERIFDFISQSPEATHMITFLFSPWGIPANYRQMQGSGVHAYKWVNEEGKAVLVKYHFEPKQGIRNLTQKEAEEIQGKNFNHATQDLYDAIENGDYPEWEVYAQIMSDDEHPELDFDPLDPTKLWYKDDFPWKPIGKLVLNKNPENYHAEVEQASFGTGVLVDGLDFSDDKLLQGRTFAYSDTQRYRVGANYLQLPINSPKKHVATNQEGGQMQYRVDRAEGQNPHVNYEPSIMGGLKEAKQDGKDHTPHVEGDVKREAIDRTNNFGQAGETYRRFTEFERNELITNLVNTLSTCRKEIQDQMIENFTKADPDYGKRVAEGLKKVSENNSNGPIGTTETEQAAKQAEQESHPSDPY

SEQ ID NO: 19772 - protein, 483 aa, Bacillus subtilis subsp. subtilis str. 168
MSSNKLTTSWGAPVGDNQNSMTAGSRGPTLIQDVHLLEKLAHFNRERVPERVVHAKGAGAHGYFEVTNDVTKYTKAAFLSEVGKRTPLFIRFSTVAGELGSADTVRDPRGFAVKFYTEEGNYDIVGNNTPVFFIRDAIKFPDFIHTQKRDPKTHLKNPTAVWDFWSLSPESLHQVTILMSDRGIPATLRHMHGFGSHTFKWTNAEGEGVWIKYHFKTEQGVKNLDVNTAAKIAGENPDYHTEDLFNAIENGDYPAWKLYVQIMPLEDANTYRFDPFDVTKVWSQKDYPLIEVGRMVLDRNPENYFAEVEQATFSPGTLVPGIDVSPDKMLQGRLFAYHDAHRYRVGANHQALPINRARNKVNNYQRDGQMRFGDNGGGSVYYEPNSFGGPKESPEDKQAAYPVQGIADSVSYDHYDHYTQAGDLYRLMSEDERTRLVENIVNAMKPVEKEEIKLRQIEHFYKADPEYGKRVAEGLGLPIKKDS

SEQ ID NO: 19773 - protein, 507 aa, Brucella melitensis 16M
MKLQEDYSMTDRPIMTTSAGAPIPDNQNSLTAGERGPILMQDYQLIEKLSHQNRERIPERAVHAKGWGAYGTLTITGDISRYTKAKVLQPGAQTPMLARFSTVAGELGAADAERDVRGFALKFYTQEGNWDLVGNNTPVFFVRDPLKFPDFIHTQKRHPRTHLRSATAMWDFWSLSPESLHQVTILMSDRGLPTDVRHINGYGSHTYSFWNDAGERYWVKFHFKTMQGHKHWTNAEAEQVIGRTRESTQEDLFSAIENGEFPKWKVQVQIMPELDADKTPYNPFDLTKVWPHADYPPIDIGVMELNRNPENYFTEVENAAFSPSNIVPGIGFSPDKMLQARIFSYADAHRHRLGTHYESIPVNQPKCPVHHYHRDGQMNVYGGIKTGNPDAYYEPNSFNGPVEQPSAKEPPLCISGNADRYNHRIGNDDYSQPRALFNLFDAAQKQRLFSNIAAAMKGVPGFIVERQLGHFKLIHPEYEAGVRKALKDAHGYDANTIALNEKITAAE

SEQ ID NO: 19774 - protein, 478 aa, Enterococcus faecalis V583
MKNQHLTTSQGSPVGDNQNSLTAGEFGPVLIQDVHLLEKLAHFNRERVPERVVHAKGAGAHGIFKVSQSMAQYTKADFLSEVGKETPLFARFSTVAGELGSSDTLRDPRGFALKFYTDEGNYDLVGNNTPIFFIRDAIKFPDFIHSQKRNPRTHLKSPEAVWDFWSHSPESLHQVTILMSDRGIPLSFRHMHGFGSHTFKWVNAAGEVFFVKYHFKTNQGIKNLESQLAEEIAGKNPDFHIEDLHNAIENQEFPSWTLSVQIIPYADALTMKETLFDVTKTVSQKEYPLIEVGTMTLNRNPENYFAEVEQVTFSPGNFVPGIEASPDKLLQGRLFAYGDAHRHRVGANSHQLPINQAKAPVNNYQKDGNMRFNNGNSEINYEPNSYTETPKEDPTAKISSFEVEGNVGNYSYNQDHFTQANALYNLLPSEEKENLINNIAASLGQVKNQEIIARQIDLFTRVNPEYGARVAQAIKQQA

SEQ ID NO: 19775 - protein, 488 aa, Bacteroides thetaiotaomicron VPI-5482
MEEKKLTAANGRPIADNQNSQTAGQRGPVMLQDPWLIEKLAHFDREVIPERRMHAKGSGAFGTFTVTHDITKYTRAAIFSEVGKQTECFVRFSTVAGERGAADAERDIRGFAMKFYTEEGNWDLVGNNTPVFFLRDPLKFPDLNHAIKRDPKTNMRSPNSNWDFWTLLPEALHQVTITMSPRGIPYSYRHMHGFGSHTYSFINADNQRIWVKFHLRTLQGIKNLTDQEAEAIIAKDRESHQRDLFESIEKGDYPKWLFQIQLMTEEEADHYRINPFDLTKVWPHKDFPLQDVGILELNRNPENYFAEVEQAAFNPINTVDGIGFSPDKMLQGRLFSYGDAQRYRLGVNSEQIPVNKPRCPFHAYHRDGAMRVDGNYGATKGYEPNSYGEWKDSPHMKEPPLKASGNGEIYNYNEREYDDDYYSQPGDLFRLMPADEQQLLFENTARAMGDSELFIKQRHTRNCYKADPAYGAGVAKALGIDLQEALKE

SEQ ID NO: 19776 - protein, 488 aa, Bacillus cereus ATCC 14579
MNPNNRLTTNQGAPVGDNQNSRTAGRRGPVLLEDYHLVEKLAHFDRERIPERVVHARGAGAHGVFVTKNSMKQYTKAAFLQNEGTETPVFVRFSTVIHGQGSPETARDPRGFAVKFYTEEGNYDIVGNHLPVFFIRDAIKFPDMVHSLKPAPDTNIQTPDRYWDFMTLSPESTHMMTWVFSDYGTPASYREMEGFGVHSFKWINEEGKIVYIKYHWKPQQGVRNLNAKEVQEVQGKDFNHATRDLFDAIEKGNHPKWDLHVQVMQLDEMDSLDFDPLDPTKVWPEDRFPLIEVGTMTLNRNPKNFFAEVEQVAFSPSATVNGIEPSEDKLLQGRLFSYPDTQRYRLGANYLQIPVNCPYAAVHNQQRDGAMQVNQNPSTINYEPSRHAENPVEDPAYRDSTMKVEGYVSREKIEKPNDFKQAGERYRSFSKEEQDNLIANLTNDLKDVNERTKLLAVCNFFRADQEYGMRLAQALNVDITQYVGNAPK

SEQ ID NO: 19777 - protein, 181 aa, Coxiella burnetii RSA 493
MTKKQKPSQNEDLNLTTAQGTPISDDQNSLKIGDRGPLLLEDFPFREKLFHFDHERIPERVVHARGFGVHGYFETDVSLSEITMAHLFQKKGEKTPVFVRFSTVVGSQGSPDLARDVRGFAVKFYTKEGNWDLVGNNIPVFFIQDPIKFPDLIHAAKAEPDRGFPQAQTANDNFWENFRYQ

SEQ ID NO: 19778 - protein, 485 aa, Streptomyces avermitilis MA-4680
MSKRVLTTESGAPVADNQNSATAGVGGPLLLQDQHLLEKLARFNRERIPERVVHARGSGAYGHFEVTDDVTGFTYADFLNTVGKRTEVFLRFSTVADSLGGADAVRDPRGFAVKFYTEEGNYDLVGNNTPVFFIKDPLKFPDFIHSQKRDPFTGKQEPDNVWDFWAHSPEATHQVTWLMGDRGIPASYRHMNGYGSHTYQWTNAEGEAFFVKYHFKTNQGIRSLSAEQAQEIAGTDPNSHQTDLLQAIERGVRPSWTLYVQIMPAAEAAEYRFNPFDLTKVWPHTDYPLQRVGRLVLDRNPDNVFAEVEQAAFSPNNFVPGIGPSPDKMLQGRLFAYADAHRYRLGVNHTQLAVNAPRATVVSNYGRDGLMASPAQGRAAKNYEPNSYDGPAETGRPLSAPLAVTGHTGTHEAPPHTKDDHFFQAGELYRLMSAEERSRLVANIAGGLSQVSRDDVIEKNLTHFHAADPEYGTRVEEAVRALRED

SEQ ID NO: 19779 - protein, 487 aa, Streptomyces avermitilis MA-4680
MTQAPQKAPYTTNNVGIPVESDEHSLTVGPDGPILLQDHYLIEKMAQFNRERVPERVVHAKGSGAYGFFEVTNDVSQFTKADLFQPGKRTEMLARFSTVAGEQGSPDTWRDPRGFALKFYTEHGNYDMVGNNTPVFFVRDTIKFQDFIRSQKRHPVTGLRSNDMQWDFWTLSPESAHQVTWLMGDRGIPKTYRHMNGYSSHTYMWINGAGERFWVKYHFKTDQGIDFLTQAEADELAGSDADKHRRDLFESIESGNAPTWTLKVQIMPFEDAADYRFNPFDLTKVWPHGDYPLIDVGRMVLNKNPEDYFIHIEQAAFEPSNLVPGIGPSPDKMLLGRLFSYPDTHRYRIGPNYAQLPPNRPHAPVNSYAKDGPMRYVPSNAARPYAPNSYGGPAADYGQFGDPASWETAGELVREATKPHREDDDWGQPGTMVRQVLDDAARDRLVSNVSGHLKADVSRPVLDRAVQYWRNIDKEIGDRIASNVNGG

SEQ ID NO: 19780 - protein, 483 aa, Streptomyces avermitilis MA-4680
MTQGPLTTEAGAPVADNQNSETAGVGGPVLVQDQLLLEKLAHFNRERIPERVVHARGAAAYGTFTLTRDVSQWTRAAFLSEVGKQTETFLRFSTVAGNLGSADAVRDPRGWALKFYTEEGNYDLVGNNTPVFFIKDAIKFPDFIHTQKRDPYTGSQEADNVWDFWGLSPESTHQVTWLFGDRGIPASYRHMNGYGSHTYQWNNEAGEVFWVKYHFKTDQGIKNLTTEEAVNVSGLDPDSHQRDLRESIERGDFPTWTVQVQIMPAAEAAGYRFNPFDLTKVWPHEDYPPIEIGKLELNRNPENIFAEVEQSIFSPAHFVPGIGPSPDKMLQGRLFAYGDAHRYRVGINADHLPVNRPHATEARTNSRDGFLYDGRHKGTKNYEPNSFGGPFQTDRPLWQPISVTGVTGDTEAPVHTEDNDFVQAGNLYRLMSEDEKTRLVDNLAGFISKVSRDDIAERAINNFRQADGDFGKRLEAAVQALRG

SEQ ID NO: 19781 - protein, 499 aa, Brucella melitensis biovar Abortus
MTDRPIMTTSAGAPIPDNQNSLTAGERGPILMQDYQLIEKLSHQNRERIPERAVHAKGWGAYGTLTITGDISRYTKAKVLQPGAQTPMLARFSTVAGELGAADAERDVRGFALKFYTQEGNWDLVGNNTPVFFVRDPLKFPDFIHTQKRHPRTHLRSATAMWDFWSLSPESLHQVTILMSDRGLPTDVRHINGYGSHTYSFWNDAGERYWVKFHFKTMQGHKHWTNAEAEQVIGRTRESTQEDLFSAIENGEFPKWKVQVQIMPELDADKTPYNPFDLTKVWPHADYPPIDIGVMELNRNPENYFTEVENAAFSPSNIVPGIGFSPDKMLQARIFSYADAHRHRLGTHYESIPVNQPKCPVHHYHRDGQMNVYGGIKTGNPDAYYEPNSFNGPVEQPSAKEPPLCISGNADRYNHRIGNDDYSQPRALFNLFDAAQKQRLFSNIAAAMKGVPGFIVERQLGHFKLIHPEYEAGVRKALKDAHGYDANTIALNEKITAAE

SEQ ID NO: 19782 - protein, 442 aa, Pseudomonas fluorescens
RERIHERVVHARGTGAHGTFTVTDNLSDLTKAKVFAAGETTPVFVRFSAVVHGNHSPETLRDPRGFATKFYTAEGNWDLVGNNFPTFFIRDAIKFPDMVHAFKPDPRTNLDDDSRRFDFFSHVPESTRTLTELYSDSGTPASYREMDGNGVHAYKLINAKGEVHYVKFHWKSLQGIKNLDPKQVTEVQGRDYSHMTNDLVAHINKGDFPKWDLYVQVLKPEDLAKFDFEPLDATKIWPDFTERKVGQMVLNRNLDNVFQETEQVPWPPANLVPGIEPSEIRLLQARLCSYAETQIYRLGAKRLQLRIQRPTVTVNNGNQDGAMNFGKDTTGVNYQPKSSDAREEPATARYSESALAGNTQQAKIQREQNFKQAGDLYRSYSKKERQDLIDNFGGSLATTDDESKHIILSFLYKADPEYGTGVAKVAKGDLARVKALAEKLTD

SEQ ID NO: 19783 - protein, 506 aa, Pseudomonas fluorescens
MSQDPKKCPVTHLTTEAGAPVVDNQNSMTAGARGPLLAQDLWLNEKLANFVREVIPERRMHAKGSGAFGTFTVTNDITQYTRAKIFSEVGKKTEMFARFSTVAGERGAADAERDIRGFALKFYTEEGNWDLVGNNTPVFFLRDARKFPDLNKAVKRDPFSNKRSATNNWDFWTLLPEAFDQVTIVMSDRGIPAGYRHIDGFGSHTFSFINTQNERFWVKFHMRTQQGIQNLTDAEAADLIAKDRESSQTDLFDAIERGEYPKWKMYVQIMPELEAETVPYHPFDLTKVWPKGDYPLIEVGEFELNRNPENYFQDVEQAAFAPSNLVPGISYSPDRMLQARLVNYADAARYRVGVNHSQVPVNAARCPVNSNRRDGQGRMDGNYGSLPHYEPNSFNQWQEQPQFKEPALKITGDADFWDFREDDNDYFSQPRALFNLMNDEQKQALFNNTAAAMGDALDFIKYRHIRNCYACDPAYGQGVAKALGMTVADAQAARETDPAKGLPSFL

SEQ ID NO: 19784 - protein, 507 aa, Xanthomonas campestris pv. phaseoli
MRPGHLMVLALLAPTLIAPPVFAQSVLTRDNGAKVGDNQNSQTAGATGPTLLQDVQLIQKLQRFDRERIPERVVHARGTGVKGEFTATADLSSLTKAKVFSAGEKTPVFVRFSSVVHGNHSPETLRDPHGFATKFYTSEGNWDLVGNNFPTFFIRDAIKFPDMVHAFKPDPRTNLDDDSRRFDFFSHVPEATRTLTLLYSNEGTPAGYRFMDGNGVHAYKLVNAQGEVHYVKFHWKTLQGIKNLDPKQVAAVQAKDYSHLTNDLVGAIKKGDYPKWDLYVQVLKPEDLAKFDFDPLDATKIWPDVPEQKVGQMVLNKNVDNFFQETEQVAMAPANLVPGIEPSEDRLLQGRIFSYADTQLYRIGANGLSLPVNRPRVAVNNGNQDGQGNIGQTTSGVNYEPSRLEPRPQDTAARYSELPLSGTTQQAKITREQNFKQAGELYRSYSKKDRADLVQSFGESLATTDTESKHLMLSFLYKADPEYGTGVTRVAKGDLARVKQLASSLQD

SEQ ID NO: 19785 - protein, 492 aa, Vitis vinifera
MDPYKYRPSSAYNSPYFTTNAGAPVYNNDSSLTVGSRGPVLLEDYHLVEKLANFQRERIPERVVHARGASAKGFFEVTHDVSDLTCADFLRAPGVQTPVIVRFSTVIHERGSPETIRDPRGFAVKFYTREGNFDMVGNNFPVFFIRDAMKFPDVIHAFKPNPKSHIQEYWRVVDFLSYHPESLSTFAFLFDDVGIPQDYRHMEGFGVHTFTLLNKAGKANYVKFHWKPTCGVKCLLEDEAIRVGGTNHSHATQDLYDSIKAGNYPEWKLFIQTMDPEHEDKFDFDPLDVTKTWPEDILPLQPVGRLVLNKNIDNFFAENEMLAFNPALVVPGIYYTNDKMLQGRIFAYSDTQRHRLGPNYLQLPVNAPKCAFHNNHHDGSMNFMHRDEEVDYFPSRFDPVRHAETFPIPSTICHGKREKVVIEKENNFKQPGERYRSFAPDRQERFINRWVETLSDPRVTYEIRSIWISYWSQADRSLGQKLASRLNVKPKY

SEQ ID NO: 19786 - protein, 509 aa, Ralstonia solanacearum
MSFPSRSLRVSLLALAALTAFHAGAVTLTRDNGAPVGDNQNSQTAGPNGPVLLQDVQLIQKLQRFDRERIPERVVHARGTGAHGVFVASKDISDLTRAKVFTPGEETPVFVRFSSVIHSGHSPETLRDPRGFATKFYTREGNWDLVGNNLPVFFIRDAMKFPDMVHSLKPSPDSNVQDPNRFFDFFSHQPESTHMLTRVYTDYGTPTSYREMDGNSVHAYKFVNAKGEVHYVKFHWKSLQGQKGLSAKEVEAIQGKDFNHMTRDLIANIDKGNYPKWDLYIQVLKPEQLAKFDFDPLDATKVWPDVPEVKVGTMTLNKNPENVFQETEQAALAPSNLVPGIEPSEDRLLQGRIFSYADTQLYRVGTNGLQLPVNRPRTSAANYNQDGDLNAGARKGSVNYQPSAHADLSDAATVKYSQLPVSGTTQQQRIARTQNFKQAGDYYRSLTAKEQANLVSNLAGDLGQVKDDGVKYTMLSYFQKADAGYGRALAQAVKADPARVESLAAKLQD

SEQ ID NO: 19787 - protein, 493 aa, Chlamydomonas reinhardtii
MDPAKIRPSSAYNTPYWTTNSGAPVWNNNNSMTVGTRGPILLEDYHLVEKLAQFDRERIPERVVHARGAAAKGFFEVTHDISALTAADFLRAPGVQTPVIVRFSTVVHERGSPETLRDPRGFAVKFYTREGNFDMVGNNMPVFFIRDGMKFPDMVHAFKPNPKSHIQEAWRIMDFLSHHPESCHMLTFLLDDAGIPLNYRHMPGFGVHTMKLINKAGRETYVKFHWVPKCGEKYLLDDEAVMVGGANHSHATKDLFDAIAAGDYPEWALMVQTMDPADEDKFDFDPLDVTKTWPESLFPMQPVGRMVLNRNVDNFFNENEQVAFCPAIIVPGIGYSDDKLLQTRIFSYADTQRHRLGPNYLLLPVNAPRAPHHNNHHEGFMNFMHRDEEINYFPSRFDPVRNAERVAAVSSAPLSGRREKMVIAKENNFMQAGAAGRAFDAARQERFVVRVADMLADPRCTQEIRRIWVGYWSQADPQLGARIAAKLQGRGCL

SEQ ID NO: 19788 - protein, 492 aa, Chlamydomonas reinhardtii
MDPAKIRPSSAYNTPYWTTNSGAPVWNNNNSMTVGTRGPILLEDYHLVEKLAQFDRERIPERVVHARGAAAKGFFEVTHDISALTAADFLPAPGVQTPVIVRFSTVVHERGSPETLRDPRGFAVKFYTREGNFDMVGNNMPVFFIRDGMKFPDMVHAFKPNPKSHIQEAWRIMDFLSHHPESCHMLTFLLDDAGIPLNYRHMPGFGVHTMKLINKAGRETYVKFHWVPKCGEKYLLDDEAVMVGRSNHSHATKDLFDAIAAGDYPEWALMVQTMDPADEDKFDFDPLDVTKTWPESLFPMQPVGRMVLNRNVDNFFNENEQVAFCPAIIVPGIGYSDDKLLQTRIFSYADTQRHRLVPNYLLLPVNAPRAPHHNNHHEGFMNFMHRDEEINYFPSRFDPVRNAEGWLPCRVPLSGRREKMVIAKENNFMQAGARWRAFDAARQERFVVRVADMLADPRCTQEIRRIWVGYWSQADPQLGAGIAAKLQGRGCL

SEQ ID NO: 19789 - protein, 484 aa, Pseudomonas syringae
TDTLTRDNGAVVGDNQNSQTAGAQGPVLLQDVQLLQKLQRFDRERIPERVVHARGTGVKGEFTASADISDLSKATVFKSGEKTPVFVRFSSVVHGNHSPETLRDPHGFATKFYTADGNWDLVGNNFPTFFIRDAIKFPDMVHAFKPDPRTNLDNDSRRFDFFSHVPEATRTLTLLYSNEGTPAGYRFMDGNGVHAYKLVNAKGEVHYVKFHWKSLQGIKNLDPKEVAQVQSKDYSHLTNDLVGAIKKGDFPKWDLYVQVLKPEELAKFDFDPLDATKIWPDVPEKKIGQMVLNKNVDNFFQETEQVAMAPANLVPGIEPSEDRLLQGRVFSYADTQMYRLGANGLSLPVNQPKVAVNNGNQDGALNTGHTTSGVNYEPSRLEPRPADDKARYSELPLSGTTQQAKITREQNFKQAGDLYRSYSAKEKTDLVQKFGESLADTLTESKNIMLSYLYKEDPNYGTRVAEVAKGDLSKVKSLAASLKD

SEQ ID NO: 19790 - protein, 510 aa, Pseudomonas syringae pv. syringae
MPLLNWSRHMVCLTAAGLITVPTVYATDTLTRDNGAVVGDNQNSQTAGAQGPVLLQDVQLLQKLQRFDRERIPERVVHARGTGVKGEFTASADISDLSKATVFKSGEKTPVFVRFSSVVHGNHSPETLRDPHGFATKFYTADGNWDLVGNNFPTFFIRDAIKFPDMVHAFKPDPRTNLDNDSRRFDFFSHVPEATRTLTLLYSNEGTPAGYRFMDGNGVHAYKLVNAKGEVHYVKFHWKSLQGIKNLDPKEVAQVQSKDYSHLTNDLVGAIKKGDFPKWDLYVQVLKPEELAKFDFDPLDATKIWPDVPEKKIGQMVLNKNVDNFFQETEQVAMAPANLVPGIEPSEDRLLQGRVFSYADTQMYRLGAIGLSLPVNQPKVAVNNGNQDGALNTGHTTSGVNYEPSRLEPRPADDKARYSELPLSGTTQQAKITREQNFKQAGDLFRSYSAKEKTDLVQRFGESLADTHTESKNIMLSVLYKEDRHYGTRVAEVAKGDLSKVKSLAASLKD

SEQ ID NO: 19791 - protein, 352 aa, Pseudomonas syringae pv. syringae
IKFPDMVRAFKPDPRTNLDNDSRRFDFFSRVPEATRTLTLLYSNEGTPAGYRFMDGNGVHAYKLVNAKGEVHYVKFHWKSLQGLKNLDPKEVAQVQSKDYSHLTNDLVGAIKKGDFPKWDLYVQVLKPEELAKFDFDPLDATKIWPDVPEKKIGQMVLNKNVDNFFQETEQVAMAPANLVPGIEPSETACCRPCVSYADTQMYRLGANGLSLPVNQPKVAVNNGNQDGALNTGHTTSGVNYEPSRLEPRPADDKARYSQLPLSGTTQQAKITREQNFKQAGDLYRSYSAKEKTDLVQSFGESLADTDTESKNIMLSYLYKADPDYGTRVAEVAKGDLSRFSSLAASLKELMI

SEQ ID NO: 19792 - protein, 296 aa, Pinus pinea
SAKGFFEVTHDISHLTCADFLRAAGVQTPLIVRFSTVIHERGSPETLRDPRGFAVKFYTREGNFDLVGNNFPVFFVRDGMKFPDMVHALKPNPKSHIQEDWRILDFFSHHPESLHMFTFLFDDLGIPLNYRHMDGSGVHTFTLVNKAGRQTYVKFHWRPTCGVKCLLDDEAVVVGGTNHSHATKDLYDSIAAGNYPEWKLFIQTMDPRDEDKYDFDPLDVTKTWPEDIFPLQPVGRMVLNKNIDNFFAENEQLAFCPALVVPGVYYTEDKLLQTRVFSFADTQRHRLGPNYLMLPA

SEQ ID NO: 19793 - protein, 718 aa, Blumeria graminis
MRLSLWNLLGLSGLVVASCPYMSGEDQEYHISHIQARGTDSEFLDQFKVEDSNSYLTTDAGGPIQDDASLKAGERGPTLLEDFIFRQKIQHFDHERVPERAVHARGAGAYGTFTSYADWTNITAASFLNSKGKETPVFVRFSTVAGSRGSADTVRDVHGFATRFYTDEGNFDIVGNNIPVFFIQDAILFPDLVHAVKPSPDSEIPQAATGHDSAWDFFSQQPSTLHTLFWAMSGHGIPRSYRHMDGFGVHTMRLVTDDGKSKLVKWHWKTKQGKASLVWEEAQILAGKNPDFHRQDLWDDINAGNGPEWELGVQIVDEEDVQAFGFDLLDPTKFLPEELVPVTILGKMKLTDNPTNYFAETEQVMFQPGHIVRGVDFSDDPLLQGRIYSYLDTQLNRNGGPNFEQLPVNRPRTKVHNNNRDGAGQMFIHTNKAPYSPNSLSGGNPKQANQTKGRGFFTAPSRKVVGSLHRGTASSFADVWSQPRMFYNSLIPSEQQFLVNAIRFEISQLKSDLIKKNTLMQLNRVSNDLATRVAAVIGYKPLDPSPEFYTNATTDYVTIFGKPLPSVVGFTVGILASTSSSTSISQAAQLATSFSSRGIRAVIVGESLLSGTDQTYSSADATAFDAVVVTMGAETLFGPVAKPNTLFPSGRPSQILHDAYRWGKPVGAVSKASVVLEPLPGTKNQGGVYRVESVNELATSIAKGLETFRFVDRFPLDS

SEQ ID NO: 19794 - protein, 195 aa, Morus alba
GFFEVTHDISNLTCADFLRAPGVQTPVIVRFSTVIHERGSPETLRDPRGFAVKFYTREGNFDLVGNNFPVFFIRDGIKFPDMVHALKPNPKSHIQEFWRILDFFSHHPESLHMFTFLFDDIGVPQDYRHMDGSGVNTYTLIDKAGKAHYVKFHWKPTCGVKSLLEDEAIRVGGANHSHATQDLYDSIAAGNYPEW

SEQ ID NO: 19795 - protein, 150 aa, Betula pendula
GVKCLLDDEAIRVGGANHSHATKDLYDSIGAGNYPEWKLYIQIIDPDHEDKFDFDPLDVTKIWPEDILPLQPVGRLVLNKNIDNFFAENEQLAFCPSIVVPGVYYSDDKLLQTRIFSYSDTQRHRLGPNYLQLPANAPKCAHHNNHHEGF

SEQ ID NO: 19796 - protein, 150 aa, Betula pendula
GVKCLLDDEAIRVGGANHGHATKDLYVSIGAGNYPEWKLYIQIIDPDHEDKFDFDPLDVTKIWPEDILPLQPVGRLVLNKNIDNFFAENEQLVFCPSIVVPGVYYSDDKLLQTRIFSYSDTQRHRLGPNYLQLPANAPKCAHHNNHHEGF

SEQ ID NO: 19797 - protein, 335 aa, Azotobacter vinelandii
MKTQNKDLPGWLLAAGLGLAAPFGMAVQDEVTPAQVVAALEDTFGVTPGERRNHIKGTCASGEFVGLPAVAAWSRSALFSGQPVPVVARFSLPGGNPKVPDTARSVRGMALEFRLPGGALQHMTMLDTPVFGAAQPKTFLDQILALKPDPATGKPDPAKLAAFRASHPDSRAQARFLAEHNPPPSFANSSYFGIHTFKFVDATGKATLVRWRFVPEDGEKSLSDEELETLPADFLEERLIQRTAQGPVRWDMLVSIGQPGDPENDPTVAWPENREQVKAGTLVLTAAMPQKGAACEKVNFDPLVMAEGIAPTDDPILRFRSPAYAVSFAKRQAGQ

SEQ ID NO: 19798 - protein, 492 aa, Mesembryanthemum crystallinum
MDPYKYRPSSAFNSPYFTTNSGAPVYNNNSSLTVGTRGPILLEDYHLVEKLANFDRERIPERVVHARGASAKGFFEVTHDVSHLTCADFLRAPGVQTPVIVRFSTVIHERGSPETIRDPRGFAVKFYTREGNFDMVGNNFPVFFIRDGMKFPDMVHALKPNPKSHIQENWRVLDFFSHHPESLHMFTFLFDDVGVPTDYRHMEGSGVNTYTLISKSGKVHYVKFHWKPTCGVKCLLEEEAVKIGGANHSHATQDLYDSIAAGNYPEWKLYIQTIDPADEDKFDFDPLDVTKTWPEDILPLQPVGRLVLNKNIDNFFAENEQLAFCPGIVVPGVYYSDDKLLQTRIFSYADTQRHRLGPNYLQLPVNAPKCAHHNNHYDGQMNFMHRDDEVDYFPSRYDPVRHAERYPIPPNVLNGNRDRQIIQKENNFKQPGERYRSWDPARQERFICRWVDALSDPRITHEIRNIWISYWSQADKSVGMKLASRLNVRPTM

SEQ ID NO: 19799 - protein, 493 aa, Mesembryanthemum crystallinum
MDPYKYRPSSSYNTSFMTTKTGQPVWNDDSSLTVGARGPILLEDYHLLEKIASWDRERIPERVVHARGASAKGFFEVTNDITHLTCADFLRAPGVQTPVIVRFSTVIHERGSPETMRDPRGFALKFYTREGNFDLVGNNFPVFFNRDAMKFPDVVRAFKPNPKSHIQEMWRILDFCSHLPESLHTFAWFFDDVGIPINYRHMEGFGVHTFTMLNRAGKETYVKFHWKPTCGVKSIVTEEEAIQVGGANHSHATQDLYDSIAAGNYPEWRLFIQTMDPADEDKFDFDPLDITKTWPEDILPLQPVGRLVLNKNIDNFFTENEMLAFNPASIVPGIHFSHDKMLQARTFAYADTQRHRLGVNFLLLPVNAPKCAHHNDHHDGFMNFMHRDEEVNYFPSRSNVCHHAERFPIPSHTLTGRRERRIIPKENNFKQPGDRYRSWDPARQERYLARWVKALSDPKVTPEIRGVWVSWLSQSDRSLGMKLANKLNVRPTM

SEQ ID NO: 19800 - protein, 492 aa, Gossypium hirsutum
MDPYKHRPSSAFNSPFWTTNSGAPVWNNNSSLTVGPRGQYLLEDYHLVEKLANFDRERIPERVVHARGASAKGFFEVTHDISHLTCADFLRAPGVQTPVIVRFSTVIHERGSPETLRDPRGFAVKFYTREGNFDLVGNNFPVFFIRDGMKFPDMVHALKPNPKSHIQENWRILDFFSHHPESLHMFTFLFDDLGVPQDYRHMEGSGVNTYTLINKAGKAHYVKFHWKPTCGVKCLLEDEAIKVGGANHSHATQDLYDSIAAGNYPEWKLFIQTIDPDHEDKFDFDPLDVTKTWPEDILPLQPVGRLVLNKNIDNFFAENEQLAFCPAIVVPGIYYSDDKLLQTRIFSYSDTQRHRLGPNYLQLPANAPKCAHHNNHHEGFMNFMHRDEEINYFPSRYDPVRHAEMFPIPPAVCTGRREKCIIEKENNFKQPGERYRSWAADRQERFICRWVDALSDPRVTHEIRSIWISYWSQADKSVGQKLASLLNVRPSI

SEQ ID NO: 19801 - protein, 492 aa, Gossypium hirsutum
MDPYKHRPSSAFNSPFWTTNSGAPVWNNNSSLTVGPRGQYLLEDYHLVEKLANFDRERIPERVVHARGASAKGFFDVTHDISHLTCADFLRAPGVQTPVIVRFSTVIHERGSPETLRDPRGFAVKFYTREGNFDLVGNNFPVFFIRDGMKFPDMVHALKPNPKSHIQENWRILDFFSHHPESLHMFTFLFDDLGVPQDYRHMEGSGVNTYTLINKAGKAHYVKFHWKPTCGVKCLLEDEAIKVGGANHSHATQDLYDSIAAGNYPEWKLFIQTIDPDHEDKFDFDPLDVTKTWPEDILPLQPVGRLVLNKNIDNFFAENEQLAFCPAIVVPGIYYSDDKLLQTRIFSYSDTQRHRLGQTYLQLPANAPKCAHHNNHHEGFMNFMHRDEEINYFPSRYDPVRHAEMFPIPPAVCTGRREKCIIEKENNFKQPGERYRSWAADRQERFICRWVDALSDPRVTHEIRSIWISYWSQADKSVGQKLASLLNVRPSI

SEQ ID NO: 19802 - protein, 492 aa, Gossypium hirsutum
MDPYKFRPSSSFDSPFWTTNSGAPVWNNNSSLTVGARGPILLEDYHLVEKLANFDRERIPERVVHARGASAKGFFEVTHDISQLTCADFLRAPGVQTPLIVRFSTVIHERGSPETLRDPRGFAVKFYTREGNFDLVGNNFPVFFIRDGMKFPDMVHALKPNPKSHIQENWRILDFFSHHPESLHMFTFLFDDIGVPQDYRHMDGSGVHTYTLINKAGKSHYVKFHWKPTCGVKSLLEDEAIRVGGANHSHATQDLYDSIAAGNYPEWKLFIQIMDPLHEDRFDFDPLDVTKTWPEDIFPLQPMGRMVLNKNIDNFFAENEQLAFCPSLIVPGIYYSDDKLLQTRIFSYSDTQRHRLGPNYLQLPANAPKCAHHNNHHEGFMNFMHRDEEVNYFPSRYDPVRHAEKHPIPSTVLSGKREKCIIGKENNFKQPGERYRSFSADRQERFINRWIDALSDPRVTHEIRSIWISYWSQADKSLGQKIASRLNVRPSI

SEQ ID NO: 19803 - protein, 101 aa, Cucumis sativus
HIQENWRILDFFSHHPESMNMFTFLFDDIGIPQDYRHMDGSGVNTYTLINKAGKAHYVKFHWRPTCGVKSLLEEDAIRVGGSNHSHATQDLYDSIAVETYP

SEQ ID NO: 19804 - protein, 83 aa, Cucumis sativus
ERVVHARGASAKGFLRVTHDITNLSCADFLRAPGVQTPVIVRFSTVIHERGSPETLRDPRGFAVKFYTREVRILVVYAFIGCT

SEQ ID NO: 19805 - protein, 190 aa, Prunus armeniaca
GFFEVTQDVPQLTCADFLRAPGVQTPVIVRFSTVIHERGSPETLRDPRGSAVKFYTREGNFDLVGNNFPVFFVRDAMKFPDAIRAFKPNPKSHIQETWRILDFFSHLPESLHTFAFFYDDLGIPQDYRHMEGSSVHAYTLVSKAGKVHYVKFHWKPTCGVKCLLEDEAIKVGGANHSHATKDLYDSIAAG

SEQ ID NO: 19806 - protein, 492 aa, Cucurbita pepo
MDPYRHRPSSAFNAPFWTTNSGAPVWNNNSSMTVGPRGPILLEDYHLVEKLANFDRERIPERVVHARGASAKGFFEVTHDITNLSCADFLRAPGVQTPVIVRFSTVIHERGSPETLRDPRGFAVKFYTREGNFDLVGNNFPVFFIRDGMKFTRHVHPLKPNPKSHIQENWRILDFFSHHPESLNMFSFLFDDIGIPQDYRHMDGSGVNTYTLINKAGKAHYVKFHWRPTCGVKSLLEEDAIRVGGSNHSHATQDLYDSIAAGNYPEWKLFIQTIDPDHEDKYDFDPLDVTKTWPEDILPLQPVGRMVLNKNIDNFFAENEQLAFCPAIIVPGVYYSDDKLLQTRIFSYADTQRHRLGPNYLQLPANAPKCAHHNNHHEGFMNFMHRDEEVNYFPSRFDPSRHAERYPHPPAVCSGKRERCIIEKENNFKEPGERYRSWTPDRQERFVRRWVDALSDTRVTHEIRSIWISYWSQADRSLGQKLASHLNVRPSI

SEQ ID NO: 19807 - protein, 492 aa, Cucurbita pepo
MDPYKYRPSSAYNTPFCTTNSGAPIWNNTAVMSVGERGPILLEDYQLIEKIATFTRERIPERVVHRRGASAKGFFEVTHDISNLTCADFLRAPGVQTPVIVRFSTVIHERGSPETLRDPRGFAVKFYTREGNFDLVGNNFPVFFVRDAMQFPDVIRAFKPNPKSHLQEPWRYLDFCSYHPESLLSFAWFYDDVGIPINYRHMEGFGVQAYSLINKSGKARLVKFHWKPTCGVKSMMEEEAIRIGGTNHSHATQDLYESIAAGNFPEWRLYIQTIDYEDQNKYDFEPLDTTITWPEDVVPLQPVGRLVLNKNIDNFFAENEMLAFSMSLVPGIHYSDDKMLQARSFAYADTQRHRLGPNYLQLPVNAPKCPHHNNHHEGFMNFMHRDEEVNYFPSRYDPCRHAEKFPMPPNVLTGKRERCVIPKENNNFKQAGDRYRSWAPDRQDRFVKRFVEALSDPRVTDEVRNIWISYWSQADRSLGQKIASRLNVRPNI

SEQ ID NO: 19808 - protein, 492 aa, Cucurbita pepo
MDPYKYRPSSAYNTPFCTTNSGAPIWNNTAVMSVGERGPILLEDYQLIEKIATFTRERIPERVVHARGASAKGFFEVTHDVSDLSCADFLRAPGVQTPVIVRFSTVIHERVSPETVRDPRGFAVKFYTREGNFDLVGNNFPVFFVRDAMQFPDVIRAFKPNPKSHLQESWRFLDFCSYHPESLLSFAWFYDDVGIPINYRHMEGFGVQAYSLINKAGKARLVKFHWKPTCGVKSMLEEEAIRVGGSNHSHATQDLYESIAAGNFPEWRLYIQTIDYEDQNNYDFEPLDTTIAWPEDVVPLRPVGRLVLNKNIDNFFAENEMLAFSMSLVPGIHYSDDKMLQARSFAYADTQRHRLGPNYLQLPVNAPKCPHHNNHHEGFMNFMHRDEEVNYFPSRYDACRHAEKYPMPPNVLSGKRERCVIPKENHNFKQAGDRYRSWAPDRQERFVNRFVEALSDSKVTHEVRNIWISYWTQADRSLGQKIASRMNARPNM

SEQ ID NO: 19809 - protein, 163 aa, Cucurbita pepo
HWKPTCGVKSMMEEEAIRIGGTNHSHATQDLYESIAAGNFPEWRLYIQTIDYEDQNKYDFEPLDTTITWPEDVVPLQPVGRLVLNKNIDNFFAENEMLAFSMSLVPGIHYSDDKMLQARSFAYADTQRHRLGPNYLQLPVNAPKCPHHNNHHEGFMNFMHRDE

SEQ ID NO: 19810 - protein, 492 aa, Arabidopsis thaliana
MDPYKYRPASSYNSPFFTTNSGAPVWNNNSSMTVGPRGPILLEDYHLVEKLANFDRERIPERVVHARGASAKGFFEVTHDISNLTCADFLRAPGVQTPVIVRFSTVIHERGSPETLRDPRGFAVKFYTREGNFDLVGNNFPVFFIRDGMKFPDMVHALKPNPKSHIQENWRILDFFSHHPESLNMFTFLFDDIGIPQDYRHMDGSGVNTYMLINKAGKAHYVKFHWKPTCGVKSLLEEDAIRVGGTNHSHATQDLYDSIAAGNYPEWKLFIQIIDPADEDKFDFDPLDVTKTWPEDILPLQPVGRMVLNKNIDNFFAENEQLAFCPAIIVPGIHYSDDKLLQTRVFSYADTQRHRLGPNYLQLPVNAPKCAHHNNHHEGFMNFMHRDEEVNYFPSRYDQVRHAEKYPTPPAVCSGKRERCIIEKENNFKEPGERYRTFTPERQERFIQRWIDALSDPRITHEIRSIWISYWSQADKSLGQKLASRLNVRPSI

SEQ ID NO: 19811 - protein, 492 aa, Arabidopsis thaliana
MDPYKYRPASSYNSPFFTTNSGAPVWNNNSSMTVGPRGPILLEDYHLVEKLANFDRERIPERVVHARGASAKGFFEVTHDISNLTCADFLRAPGVQTPVIVRFSTVIHERGSPETLRDPRGFAVKFYTREGNFDLVGNNFPVFFIRDGMKFPDMVHALKPNPKSHIQENWRILDFFSHHPESLNMFTFLFDDIGIPQDYRHMDGSGVNTYMLINKAGKAHYVKFHWKPTCGVKSLLEEDAILVGGTNHSHATQDLYDSIAAGNYPEWKLFIQIIDPADEDKFDFDPLDVTKTWPEDILPLQPVGRMVLNKNIDNFFAENEQLAFCPAIIVPGIHYSDDKLLQTRVFSYADTQRHRLGPNYLQLPVNAPKCAHHNNHHEGFMNFMHRDEEVNYFPSRYDQVRHAEKYPTPPAVCSGKRERCIIEKENNFKEPGERYRTFTPERQERFIQRWIDALSDPRITHEIRSIWISYWSQADKSLGQKLASRLNVRPSI

SEQ ID NO: 19812 - protein, 492 aa, Arabidopsis thaliana
MDPYKYRPASSYNSPFFTTNSGAPVWNNNSSMTVGPRGPILLEDYHLVEKLANFDRERIPERVVHARGASAKGFFEVTHDISNLTCADFLRAPGVQTPVIVRFSTVIHERGSPETLRDPRGFAVKFYTREGNFDLVGNNFPVFFIRDGMKFPDMVHALKPNPKSHIQENWRILDFFSHHPESLNMFTFLFDDIGIPQDYRHMDGSGVNTYMLINKAGKAHYVKFHWKPTCGVKSLLEEDAIRVGGTNHSHATQDLYDSIAAGNYPEWKLFIQIIDPADEDKFDFDPLDVTKTWPEDILPLQPVGRMVLNKNIDNFFAENEQLAFCPAIIVPGIHYSDDKLLQTRVFSYADTQRHRLGPNYLQLPVNAPKCAHHNNHHEGFMNFMHRDEEVNYFPSRYDQVRHAEKYPTPPAVCSGKRERCVIEKENNFKEPGERYRTFTPERQERFIQRWIDALSDPRITHEIRSIWISYWSQADKSLGQKLASRLNVRPSI

SEQ ID NO: 19813 - protein, 492 aa, Arabidopsis thaliana
MDPYKYRPASSYNSPFFTTNSGAPVWNNNSSMTVGPRGLILLEDYHLVEKLANFDRERIPERVVHARGASAKGFFEVTHDISNLTCADFLRAPGVQTPVIVRFSTVIHERGSPETLRDPRGFAVKFYTREGNFDLVGNNFPVFFIRDGMKFPDIVHALKPNPKSHIQENWRILDFFSHHPESLNMFTFLFDDIGIPQDYRHMDGSGVNTYMLINKAGKAHYVKFHWKPTCGVKSLLEEDAIRLGGTNHSHATQDLYDSIAAGNYPEWKLFIQIIDPADEDKFDFDPLDVTKTWPEDILPLQPVGRMVLNKNIDNFFAENEQLAFCPAIIVPGIHYSDDKLLQTRVFSYADTQRHRLGPNYLQLPVNAPKCAHHNNHHEGFMNFMHRDEEVNYFPSRYDQVRHAEKYPTPPAVCSGKRERCIIEKENNFKEPGERYRTFTPERQERFIQRWIDALSDPRITHEIRSIWISYWSQADKSLGQKLASRLNVRPSI

SEQ ID NO: 19814 - protein, 492 aa, Arabidopsis thaliana
MDPYKYRPASSYNSPFFTTNSGAPVWNNNSSMTVGPRGLILLEDYHLVEKLANFDRERIPERVVHARGASAKGFFEVTHDISNLTCADFLRAPGVQTPVIVRFSTVIHARGSPETLRDPRGFAVKFYTREGNFDLVGNNFPVFFIRDGMKFPDIVHALKPNPKSHIQENWRILDFFSHHPESLNMFTFLFDDIGIPQDYRHMDGSGVNTYMLINKAGKAHYVKFHWKPTCGVKSLLEEDAIRLGGTNHSHATQDLYDSIAAGNYPEWKLFIQIIDPADEDKFDFDPLDVTKTWPEDILPLQPVGRMVLNKNIDNFFAENEQLAFCPAIIVPGIHYSDDKLLQTRVFSYADTQRHRLGPNYLQLPVNAPKCAHHNNHHEGFMNFMHRDEEVNYFPSRYDQVRHAEKYPTPPAVCSGKRERCIIEKENNFKEPGERYRTFTPERQERFIQRWIDALSDPRITHEIRSIWISYWSQADKSLGQKLASRLNVRPSI

SEQ ID NO: 19815 - protein, 492 aa, Arabidopsis thaliana
MDPYRVRPSSAHDSPFFTTNSGAPVWNNNSSLTVGTRGPILLEDYHLLEKLANFDRERIPERVVHARGASAKGFFEVTHDITQLTSADFLRGPGVQTPVIVRFSTVIHERGSPETLRDPRGFAVKFYTREGNFDLVGNNFPVFFVRDGMKFPDMVHALKPNPKSHIQENWRILDFFSHHPESLHMFSFLFDDLGIPQDYRHMEGAGVNTYMLINKAGKAHYVKFHWKPTCGIKCLSDEEAIRVGGANHSHATKDLYDSIAAGNYPQWNLFVQVMDPAHEDKFDFDPLDVTKIWPEDILPLQPVGRLVLNKNIDNFFNENEQIAFCPALVVPGIHYSDDKLLQTRIFSYADSQRHRLGPNYLQLPVNAPKCAHHNNHHDGFMNFMHRDEEVNYFPSRLDPVRHAEKYPTTPIVCSGNREKCFIRKENNFKQPGERYRSWDSDRQERFVKRFVEALSEPRVTHEIRSIWISYWSQADKSLGQKLATRLNVRPNF

SEQ ID NO: 19816 - protein, 492 aa, Arabidopsis thaliana
MDPYRVRPSSAHDSPFFTTNSGAPVWNNNSSLTVGTRGPILLEDYHLLEKLANFDRERIPERVVHARGASAKGFFEVTHDITQLTSADFLRGPGVQTPVIVRFSTVIHERGSPETLRDPRGFAVKFYTREGNFDLVGNNFPVFFVRDGMKFPDMVHALKPNPKSHIQENWRILDFFSHHPESLHMFSFLFDDLGIPQDYRHMEGAGVNTYMLINKAGKAHYVKFHWKPTCGIKCLSDEEAIRVGGANHSHATKDLYDSIAAGNYPQWNLFVQVMDPAHEDKFDFDPLDVTKIWPEDILPLQPVGRLVLNKNIDNFFNENEQIAFCPALVVPGIHYSDDKLLQTRIFSYADSQRHRLGPNYLQLPVNAPKCAHHNNHHDGFMNFMHRDEEVNYFPSRLDPVRHAEKYPTTPIVCSGNREKCFIGKENNFKQPGERYRSWDSDRQERFVKRFVEALSEPRVTHEIRSIWISYWSQADKSLGQKLATRLNVRPNF

SEQ ID NO: 19817 - protein, 492 aa, Arabidopsis thaliana
MDPYRVRPSSAHDSPFFTTNSGAPVWNNNSSLTVGTRGPILLEDYHLLEKLANFDRERIPERVVHARGASAKGFFEVTHDITQLTSADFLRGPGVQTPVIVRLSTVIHERGSPETLRDPRGFAVKFYTREGNFDLVGNNFPVFFVRDGMKFPDMVHALKPNPKSHIQENWRILDFFSHHPESLHMFSFLFDDLGIPQDYRHMEGAGVNTYMLINKAGKAHYVKFHWKPTCGIKCLSDEEAIRVGGANHSHATKDLYDSIAAGNYPQWNLFVQVMDPAHEDKFDFDPLDVTKIWPEDILPLQPVGRLVLNKNIDNFFNENEQIAFCPALVVPFIHYSDDNVLQTRIFSYADSQRHRLGPNYLQLPVNAPKCAHHNNHHDGFMNFMHRDEEVNYFPSRLDPVRHAEKYPTTPIVCSGNREKCFIRKENNFKQPGERYRSWDSDRQERFVKRFVEALWEPRVTHEIRSIWISYWSQADKSLGQKLATRLNVRPNF

SEQ ID NO: 19818 - protein, 1013 aa, Arabidopsis thaliana
MKFIYNPTLRHVTVCVIKSKAFLANNGRKTTRVGMDHPDPIRKRYRPSSAYNAPFYTTNGGAPVSNNISSLTIGERGPVLLEDYHLIEKVANFTRERIPERVVHARGISAKGFFEVTHDISNLTCADFLRAPGVQTPVIVRFSTVVHERASPETMRDIRGFAVKFYTREGNFDLVGNNTPVFFIRDGIQFPDVVHALKPNPKTNIQEYWRILDYMSHLPESLLTWCWMFDDVGIPQDYRHMEGFGVHTYTLIAKSGKVLFVKFHWKPTCGIKNLTDEEAKVVGGANHSHATKDLHDAIASGNYPEWKLFIQTMDPADEDKFDFDPLDVTKIWPEDILPLQPVGRLVLNRTIDNFFNETEQLAFNPGLVVPGIYYSDDKLLQCRIFAYGDTQRHRLGPNYLQLPVNAPKCAHHNNHHEGFMNFMHRDEEINYYPSKFDPVRCAEKVPTPTNSYTGIRTKCVIKKENNFKQAGDRYRSWAPDRQDRFVKRWVEILSEPRLTHEIRGIWISYWSQADRSLGQKLASRLNVRPSSAHDSPFFTTNSGAPVWNNNSSLTVGTRGPILLEDYHLLEKLANFDRERIPERVVHARGASAKGFFEVTHDITQLTSADFLRGPGVQTPVIVRFSTVIHERGSPETLRDPRGFAVKFYTREGNFDLVGNNFPVFFVRDGMKFPDMVHALKPNPKSHIQENWRILDFFSHHPESLHMFSFLFDDLGIPQDYRHMEGAGVNTYMLINKAGKAHYVKFHWKPTCGIKCLSDEEAIRVGGANHSHATKDLYDSIAAGNYPQWNLFVQVMDPAHEDKFDFDPLDVTKIWPEDILPLQPVGRLVLNKNIDNFFNENEQIAFCPALVVPGIHYSDDKLLQTRIFSYADSQRHRLGPNYLQLPVNAPKCAHHNNHHDGFMNFMHRDEEVNYFPSRLDPVRHAEKYPTTPIVCSGNREKCFIGKENNFKQPGERYRSWDSDRQERFVKRFVEALSEPRVTHEIRSIWISYWSQADKSLGQKLATRLNVRPNF

SEQ ID NO: 19819 - protein, 492 aa, Arabidopsis thaliana
MDPYKYRPSSAYNAPFYTTNGGAPVSNNISSLTIGERGPVLLEDYHLIEKVANFTRERIPERVVHARGISAKGFFEVTHDISNLTCADFLRAPGVQTPVIVRFSTVVHERASPETMRDIRGFAVKFYTREGNFDLVGNNTPVFFIRDGIQFPDVVHALKPNPKTNIQEYWRILDYMSHLPESLLTWCWMFDDVGIPQDYRHMEGFGVHTYTLIAKSGKVLFVKFHWKPTCGIKNLTDEEAKVVGGANHSHATKDLHDAIASGNYPEWKLFIQTMDPADEDKFDFDPLDVTKIWPEDILPLQPVGRLVLNRTIDNFFNETEQLAFNPGLVVPGIYYSDDKLLQCRIFAYGDTQRHRLGPNYLQLPVNAPKCAHHNNHHEGFMNFMHRDEEINYYPSKFDPVRCAEKVPTPTNSYTGIRTKCVIKKENNFKQAGDRYRSWAPDRQDRFVKRWVEILSEPRLTHEIRGIWISYWSQADRSLGQKLASRLNVRPSI

SEQ ID NO: 19820 - protein, 492 aa, Arabidopsis thaliana
MDPYKYRPSSAYNAPFYTTNGGAPVSNNISSLTIGERGPVLLEDYHLIEKVANFTRERIPERVVHARGISAKGFFEVTHDISNLTCADFLRAPGVQTPVIVRFSTVVHERASPETMRDIRGFAVKFYTREGNFDLVGNNTPVFFIRDGIQFPDVVHALKPNPKTNIQEYWRILDYMSHLPESLLTWCWMFDDVGIPQDYRHMEGFGVHTYTLIAKSGKVLFVKFHWKPTCGIKNLTDEEAKVVGGANHSHATKDLHDAIVSGNYPEWKLFIQTMDPADEDKFDFDPLDVTKIWPEDILPLQPVGRLVLNRTIDNFFNETEQLAFNPGLVVPGIYYSDDKLLQCRIFAYGDTQRHRLGPNYLQLPVNAPKCAHHNNHHEGFMNFMHRDEEINYYPSKFDPVRCAEKVPTPTNSYTGIRTKCVIKKENNFKQAGDRYRSWAPDRQDRFVKRWVEILSEPRLTHEIRGIWISYWSQADRSLGQKLASRLNVRPSI

SEQ ID NO: 19821 - protein, 492 aa, Arabidopsis thaliana
MDPYKYRPSSAYNAPFYTTNGGAPVSNNISSLTIGERGPVLLEDYHLIEKVANFTRERIPERVVHARGISAKGFFEVTHDISNLTCADFLRAPGVQTPVIVRFSTVVHGRASPETMRDIRGFAVKFYTREGNFDLVGNNTPVFFIRDGIQFPDVVHALKPNRKTNIQEYWRILDYMSHLPESLLTWCWMFDDVGIPQDYRHMEGFGVHTYTLIAKSGKVLFVKFHWKPTCGIKNLTDEEAKVVGGANHSHATKDLHDAIASGNYPEWKLFIQTMDPADEDKFDFDPLDVTKIWPEDILPLQPVGRLVLNRTIDNFFNETEQLAFNPGLVVPGIYYSDDKLLQCRIFAYGDTQRHRLGPNYLQLPVNAPKCAHHNNHHEGFMNFMHRDEEINYYPSKFDPVRCAEKVPTPTNSYTGIRTKCVIKKENNFKQAGDRYRSWAPDRQDRFVKRWVEILSEPRLTHEIRGIWTSYWLKADRSLGQKLASRLNVRPSI

SEQ ID NO: 19822 - protein, 492 aa, Arabidopsis thaliana
MDPYKYRPSSAYNAPFYTTNGGAPVSNNISSLTIGERGPVLLEDYHLIEKVANFTRERIPERVVHARGISAKGFFEVTHDISNLTCADFLRAPGVQTPVIVRFSTVVHGRASPETMRDIRGFAVKFYTREGNFDLVGNNTPVFFIRDGIQFPDVVHALKPNRKTNIQEYWRILDYMSHLPESLLTWCWMFDDVGIPQDYRHMEGFGVHTYTLIAKSGKVLFVKFHWKPTCGIKNLTDEEAKVVGGANHSHATKDLHDAIASGNYPEWKLFIQTMDPADEDKFDFDPLDVTKIWPEDILPLQPVGRLVLNRTIDNFFNETEQLAFNPGLVVPGIYYSDDKLLQCRIFAYGDTQRHRLGPNYLQLPVNAPKCAHHNNHHEGFMNFMHRDEEINYYPSKFDPVRCAEKVPTPTNSYTGIRTKCVIKKENNFKQAGDRYRSWAPDRQDRFVKRWVEILSEARLTHEIRGIWTSYWLKADRSLGQKLASRLNVRPSM

SEQ ID NO: 19823 - protein, 115 aa, Arabidopsis thaliana
MDPYKYRPSSAYNAPFYTTNGGAPVSNNISSLTIGERGPVLLEDYHLIEKVANFTRERIPERVVHARGISAKGFFEVTHDISNLTCADFVRAPGVQTPVIVRFSTVVHERASPET

SEQ ID NO: 19824 - protein, 492 aa, Brassica juncea
MDPYKYRPASSYNSPFFTTNSGAPVWNNNSSMTVGPRGPILLEDYHLVEKLANFDRERIPERVVHARGASAKGFFEVTHDISNLTCADFLRAPGVQTPVIVRFSTVIHERGSPETLRDPRGFAVKFYTREGNFDLVGNNFPVFFIRDGMKFPDMVHALKPNPKSHIQENWRVLDFFSHHPESLNMFTFLFDDIGIPQDYRHMEGSGVNTYMLINKAGKAHYVKFHWKPTCGVKSLLEEDAIRVGGTNHSHATQDLYDSIAAGNYPEWKLFVQIIDPADEDKFDFDPLDVTKTWPEDILPLQPVGRMVLNKNIDNFFAENEQLAFCPAIIVPGIHYSDDKLLQTRVFSYADTQRHRLGPNYLQLPVNAPKCAHHNNHHEGFMNFMHRDEEVNYFPSRYDPVRHAEKYPTPPAVCSGKRERCIIEKENNFKEPGERYRSFTPERQERFIGRWIDALSDPRITHEIRSIWISYWSQADKSLGQKLASRLNVRPNI

SEQ ID NO: 19825 - protein, 492 aa, Brassica juncea
MDPYKYRPASSYNSPFFTTNSGAPVWNNNSSMTVGPRGPILLEDYHLVEKLANFDRERIPERVVHARGASAKGFFEVTHDISNLTCADFLRAPGVQTPVIVRFSTVIHERGSPETLRDPRGFAVKFYTREGNFDLVGNNFPVFFIRDGMKFPDMVHALKPNPKSHIQENWRVLDFFSHHPESLNMFTFLFDDIGIPQDYRHMEGSGVNTYMLINKSGKAHYVKFHWKPTCGVKSLLEEDAVRVGGTNHSHATQDLYDSIAAGNYPEWKLFIQVIDPADEDKFDFDPLDVTKTWPENLLPLQPVGRMVLNKNIDNFFAENEQLAFCPAIIVPGIHYSDDKLLQTRVFSYADTQRHRLGPNYLQLPVNAPKCAHHNNHHEGFMNFMHRDEEVNYFPSRYDPVRHAEKYPTPPAVCSGKRERCVIEKENNFKEPGERYRSFTPERQERFIRRWIEALSDPRITHEIRSIWISYWSQADKTLGQKLASRLNVRPSI

SEQ ID NO: 19826 - protein, 492 aa, Brassica juncea
MDPYKYRPASSYNSPFFTTNFGAPVWNNNSSMTVGPRGPILLEDYHLVEKLANFDRERIPERVVHARGASAKGFFEVTHDISNLTCADFLRAPGVQTPVIVRFSTVIHERGSPETLRDPRGFAVKFYTREGNFDLVGNNFPVFFIRDGMKFPDMVHALKPNPKSHIQENWRVLDFFSHHPESLNMFTFLFDDIGIPQDYRHMEGSGVNTYMLINKSGKAHYVKFHWKPTCGVKSLLEEDAIRVGGTNHSHATQDLYDSIAAGNYPEWKLFVQIIDPADEDRFDFDPLDVTKTWPEDILPLQPVGRMVLNKNIDNFFAENEQLAFCPAIIVPGIHYSDDKLLQTRVFSYADTQRHRLGPNYLQLPVNAPKCAHHNNHHEGFMNFMHRDEEVNYFPSRYDPVRHAEKYPTPPAICSGKRERCIIEKENNFKEPGERYRSFTPERQERFIGRWIDALSDPRITHEIRSIWISYWSQADKSLGQKLANRLNVRPSI

SEQ ID NO: 19827 - protein, 496 aa, Brassica juncea
MDPYKYRPASSYNSPFFTTNSGAPVWNNNSSMTVGPRGPILLEDYHLVEKLANFDRERIPERVVHARGASAKGFFEVTHDISNLTCADFLRAPGVQTPVIVRFSTVIHERGSPETLRDPRGFAVKFYTREGNFDLVGNNFPVFFIRDGMKFPDMVHALKPNPKSHIQENWRVLDFFSHHPESLNMFTFLFDDIGIPQDYRHMEGSGVNTYMLINKSGKAHYVKFHWKPTCGVKSLLEEDAVRVGGTNHSHATQDLYDSIAAGNYPEWKLFIQVIDPADEDKFDFDPLDVTKTWPENLLPLQPVGRMVLNKNIDNFFAENEQLAFCPAIIVPGIHYSDDKLLQTRVFSYADTQRHRLGPNYLQLPVNAPKCAHHNNHHEGFMNFMHRDEEVNYFPSRYDPVRHAEKYPTPPAVCSGKRERCVIEKENNFKEPGERYRSFTPESFDFRQERFIRRWIEALSDPRITHEIRSIWISYWSQADKTLGQKLASRLNVRPSI

SEQ ID NO: 19828 - protein, 492 aa, Brassica napus
MDPYKYRPSSAYNAPFYTTNGGAPVSNNISSLTIGERGPVLLEDYHLIEKVANFTRERIPERVVHARGISAKGFFEVTHDISNLTCADFLRAPGVQTPVIVRFSTVVHERASPETMRDIRGFAVKFYTREGNFDLVGNNTPVFFIRDGIQFPDVVHALKPNPKTNIQEYWRILDYMSHLPESLLTWCWMFDDVGIPQDYRHMEGFGVHTYTLVSKSGKVLFVKFHWKPTCGIKNLTDEEAKVVGGANHSHATKDLHDAIASGNYPEWKLFIQTMDPADEDKFDFDPLDVTKIWPEDILPLQPVGRLVLNRTIDNFFNETEQLAFNPGLVVPGIYYSDDKLLQCRIFAYGDTQRHRLGPNYLQLPVNAPKCAHHNNHHEGFMNFMHRDEEINYYPSKFDPVRCAEKVPIPNKSYTGIRTKCIIKKENNFKQPGDRYRSWAPDRQDRFVKRWVEILSEPRLTHEIRSIWISYWSQADRSLGQKLASRLNVRPSI

SEQ ID NO: 19829 - protein, 492 aa, Raphanus sativus
MDPYKYRPASSYNSPFFTTNSGAPVWNNNSSMTVGPRGPILLEDYHLVEKLANFDRERIPERVVHARGASAKGFFEVTHDISNLTCADFLRAPGVQTPVIVRFSTVIHERGSPETLRDPRGFAVKFYTREGNFDLVGNNFPVFFIRDGMKFPDMVHALKPNPKSHIQENWRVLDFFSHHPESLNMFTFLFDDIGIPQDYRHMEGSGVNTYMLINKSGKAHYVKFHWKPTCGVKSLLEEDAIRVGGTNHSHATQDLYDSIAAGNYPEWKLFVQIIDPADEDKFDFDPLDVTKTWPEDLLPLQPVGRMVLNKNIDNFFAENEQLAFCPAIIVPGIHYSDDKLLQTRVFSYADTQRHRLGPNYLQLPVNAPKCAHHNNHHEGFMNFMHRDEEVNYFPSRYDPVRHAEKYPTPPAVCSGKRERCIIEKENNFKEPGERYRSFTPERQERFIGRWIDALSDPRITHEIRSIWISYWSQADKSLGQKLASRLNVRPSI

SEQ ID NO: 19830 - protein, 491 aa, Raphanus sativus
MDPYKYRPASSYNSPFFTNSGAPVWNNNSSMTVGPRGPILLEDYHLVEKLANFDRERIPERVVHARGASAKGFFEVTHDISNLTCADFLRAPGVQTPVIVRFSTVIHERGSPETLRDPRGFAVKFYTREGNFDLVGNNFPVFFIRDGMKFPDMVHALKPNPKSHIQENWRVLDFFSHHPESLNMFTFLFDDIGIPQDYRHMEGSGVNTYMLINKSGKAHYVKFHWKPTCGVKSLLEEDAIRVGGTNHSHATQDLYDSIAAGNYPEWKLFVQIIDPADEDKFDFDPLDVTKTWPEDLLPLQPVGRMVLNKNIDNFFAENEQLAFCPAIIVPGIHYSDDKLLQTRVFSYADTQRHRLGPNYLQLPVNAPKCAHHNNHHEGFMNFMHRDEEVNYFPSRYDPVRHAEKYPTPPAVCSGKRERCIIEKENNFKEPGERYRSFTPERQERFIGRWIDALSDPRITHEIRSIWISYWSQADKSLGQKLASRLNVRPSI

SEQ ID NO: 19831 - protein, 492 aa, Raphanus sativus
MDPYKYRPSSAYNAPFYTTNGGAPVSNNISSLTIGERGPVLLEDYHLIEKVANFTRERIPERVVHARGISAKGFFEVTHDISNLTCADFLRAPGVQTPVIVRFSTVVHERASPETMRDIRGFAVKFYTREGNFDLVGNNTPVFFIRDGIQFPDVVHALKPNPKTNIQEYWRILDYMSHLPESLLTWCWMFDDVGIPQDYRHMEGFGVHTYTLVSKSGKVLFVKFHWKPTCGIKNLTDEEAKVVGGANHSHATKDLHDAISSGNYPEWKLFIQTMDPADEDKFDFDPLDVTKIWPEDILPLQPVGRLVLNRTIDNFFNETEQLAFNPGLVVPGIYYSDDKLLQCRIFAYGDTQRHRLGPNYLQLPVNAPKCAHHNNHHEGFMNFMHRDEEINYYPSKFDPVRCAEKVPIPNKSYTGIRTKCIIKKENNFKQAGDRYRSWAPDRQDRFVKRWVEILSEPRLTHEIRSIWISYWSQADASLGQKLASRLNVRPSI

SEQ ID NO: 19832 - protein, 492 aa, Raphanus sativus
MDPYKYRPSSAYNAPFYTTNGGAPVSNNISSLTIGERGPVLLEDYHLIEKVANFTRERIPERVVHARGISAKGFFEVTHDISNLTCADFLRAPGVQTPVIVRFSTVVHERASPETMRDIRGFAVKFYTREGNFDLVGNNTPVFFIRDGIQFPDVVHALKPNPKTNIQEYWRILDYMSHLPESLLTWCWMFDDVGIPQDYRHMEGFGVHTYTLVSKSGKVLFVKFHWKPTCGIKNLTDEEAKVVGGANHSHATKDLHDAISSGNYPEWKLFIQTMDPADEDKFDFDPLDVTKIWPEDILPLQPVGRLVLNRTIDNFFNETEQLAFNPGLVVPGIYYSDDKLLQCRIFAYGDTQRHRLGPNYLQLPVNAPKCAHHNNHHEGFMNFMHRDEEINYYPSKFDPVRCAEKVPIPSKSYTGIRTKCVIKKENNFKQAGDRYRSWAPDRQDRFVKRWVEILSELRLTHEIRSIWISYWSQADRSLGQKLASRLNVRPSI

SEQ ID NO: 19833 - protein, 423 aa, Prunus persica
SAKGFFEVTHDISQLTCADFLRAPGVQTPVIVRFSTVIHERGSPETLRDPRGFAVKFYTREGNFDLVGNNFPVFFVRDAMKFPDAIRAFKPNPKSHIQETWRILDFFSHLPESLHTFAFFYDDLGVPQDYRHMEGSSVHAYTLISKAGKVHYVKFHWKPTCGVKCLLEDEAIKVGGANHSHATKDLYDSIAAGNYPEWKLYIQTMDPDHEDRFDFDPLDLTKTWPEDILPLQPVGRLVLNKNIDNFFAENEQLAFNPAHVVPGIYYSDDKMLQTRIFAYSDTQRHRLGPNYLQLPVNAPKCPHHNNHHEGFMNFMHRDEEVNYFPSRHDPVRHAERYPIPSNILSGKREKCVIEKENNFKQPGERYRSWAPDRQERFIHRWVDALSDPRVTHEIRSVWISYWSQADKSLGQKLASRLNVRPSI

SEQ ID NO: 19834 - protein, 125 aa, Cicer arietinum
PKCAHHNNHHEGFMNFIHRDEEVNYFPSRHDPVRHAERFPTPPAALSGKRERCIRPKENNFKQPGERYRTWAPDRQDRFARRWIEALSDPRVTHEVRSIWISYWSQADRSLGQKIASHLNMRPSI

SEQ ID NO: 19835 - protein, 492 aa, Glycine max
MDPYKNRPSSAFNSPFWTTNSGAPIWNNNSSLTVGSRGPILLEDYHLVEKLANFDRERIPERVVHARGASAKGFFEVTHDISHLTCADFLRAPGVQTPLIVRFSTVIHERGSPETLRDPRGFAVKFYTREGNFDLVGNNFPVFFVRDGLKFPDMVHALKPNPKSHIQENWRILDFFSHHPESLHMFSFLFDDVGIPQDYRHMDGFGVNTYTLINKAGKAVYVKFHWKTTCGEKCLLDDEAIRVGGSNHSHATQDLYDSIAAGNYPEWKLYIQTLDPENEDRLDFDPLDVTKTWPEDVLPLQPVGRMVLNKNIDNFFAENEQLAFCPAIIVPGVYYSDDKLLQTRIFSYADTQRHRLGPNYLQLPANSPKCAHHNNHHDGFMNFMHRDEEVNYFPSRYDPVRHAERVPVPPRTLGGKREKCMIEKENNFKQPGERYRSWPSDRQERFVRRWVDALSDPRVTHEIRSIWISYWSQADRSLGQKIASHLNLKPSI

SEQ ID NO: 19836 - protein, 492 aa, Glycine max; identical to SEQ ID NO: 19835

SEQ ID NO: 19837 - protein, 492 aa, Glycine max
MDPYKNRPSSAFNSPFWTTNSGAPIWNNNSSLTVGSRGPILLEDYHLVEKLANFDRERIPERVVHARGASAKGFFEVTHDISHLTCADFLRAPGVQTPLIVRFSTVIHERGSPETLRDPRGFAVKFYTREGNFDLVGNNFPVFFVRDGLKFPDMVHALKPNPKSHIQENWRILDFFSHHPESLHMFSFLFDDVGIPQDYRHMDGFGVNTYTLINKAGKALYVKFHWKTTSGEKSLLDDEAIRVGGSNHSHATQDLYDSIAAGNYPEWKLYIQTLDPENEDRLDFDPLDVTKTWPEDVLPLQPVGRMVLNKNIDNFFAENEQLAFCPAIIVPGVYYSDDKLLQTRVFSYADTQRHRLGPNYLQLPANAPKCAHHNNHHDGFMNFMHRDEEVNYFPSRYDPVRHAEKVPVPPRILGGKREKCMIEKENNFKQPGERYRSWPSDRQERFVRRWVDALSDPRVTHEIRSIWISYWSQADRSLGQKIASHLNLKPSI

SEQ ID NO: 19838 - protein, 493 aa, Glycine max
  unsure (1)..(493): unsure at all Xaa locations
MDPYKNRPSSAFNSPFWTTNSGAPIWNNNSSLTVGSRGPILLEDYHLVEKLANFDRERIPERVVHARGASAKGFFEVTHDISHLTCADFLRAPGVQTPLIVRFSTVIHERGSPETLRDPRGFAVKFYTREGNFDLVGNNFPVFFVRDGLKFPDMVHALKPNPKSHIQENWRILDFFSHHPESLHMFSFLFDDVGIPQDYRHMDGFGVNTYTLINKAGKALYVKFHWKTTSGEKSLLDDEAIRVGGSNHSHATQDLYDSIAAGNYPEWKLYIQTLDPENEDRLDFDPLDVTKTWPEDVLPLQPVGRMVLNKNIDNFFAENEQLAFCPAIIVPGVYYSDDKLLQTRVFSYADTQRHRLGPNYLQLPANAPKCAHHNNHHDGFMNFMHRDEEVNYFPSRYDPVRHAEKXVPVPPRILGGKREKCMIEKENNFKQPGERYRSWPSDRQERFVRRWVDALSDPRVTHEIRSIWISYWSQADRSLGQKIASHLNLKPSI

SEQ ID NO: 19839 - protein, 492 aa, Glycine max
MDPYKHRPSSAFNSPFWTTNSGAPIWNNNSSLTVGARGPILLEDYHLVEKLANFDRERIPERVVHARGASAKGFFEVTHDISHLTCADFLRAPGVQTPVIVRFSTVIHERGSPETLRDPRGFAVKFYTREGNFDLVGNNLPVFFVRDGMKFPDMVHALKPNPKNHIQENWRILDFFSHFPESLHMFTFLFDDLGVPQDYRHMDGFGVNTYTLINKAGKAVYVKFHWKTTSGIKCLLEEEAIKVGGANHSHATQDLHDSIAAGNYPEWKLFVQTIDPEHEDKFDFDPLDVTKTWPEDIIPLQPVGRLVLNKNIDNFFAENEQLAFCPAIVVPGVYYSDDKMLQTRIFSYADSQRHRLGPNYLQLPANAPKCAHHNNHHEGFMNFIHRDEEVNYFPSRYDPVRHAERFPIPPAICSGRREKCGIEKENNFKQPGERYRSWAPDRQDRFARRWVDALSDPRVTHEIRSVWISYWSQADRSLGQKIASHLSTRPNI

SEQ ID NO: 19840 - protein, 492 aa, Glycine max
MDPYKLRPSSAFNSPFWTTNSGAPVWNNNSSLTVGARGPILLEDYHLVEKLANFDRERIPERVVHARGASAKGFFEVTHDISHLTCADFLRAPGVQTPVIVRFSTVIHERGSPETLRDPRGFAVKFYTREGNFDLVGNNLPVFFVRDGMKFPDMVHALKPNPKNHIQENWRILDFFSHFPESLHMFTFLFDDLGVPQDYRHMDGFGVNTYTLINKAGKAVYVKFHWKTTSGIKCLLEEEAIKVGGANHSHATQDLHDSIAAGNYPEWKLFVQTIDPEHEDKFDFDPLDVTKTWPEDIIPLQPVGRLVLNKNIDNFFAENEQLAFCPAIVVPGVYYSDDKMLQTRIFSYADSQRHRLGPNYLQLPANAPKCAHHNNHHEGFMNFIHRDEEVNYFPSRYDPVRHAETFPIPPAICSGRREKCGIEKENNFKQPGERYRSWAPDRQDRFNRRWVDALSDPRVTHEIRSVWISYWSQADRSLGQKIASRLSMRPNI

SEQ ID NO: 19841 - protein, 495 aa, Glycine max
  unsure (1)..(495): unsure at all Xaa locations
MDPYKLRPSSAFNSPFWTTNSGAPVWNNNSSLTVGARGPILLEDYHLVEKLANFDRERIPERVVHARGASAKGFXFEVTHDISHLTCADFLRAPGVQTPVIVRFSTVIHERGSPETLRDPRGFAVKFYTREGNFDLVGNNLPVFFVRDGMKFPDMVHALKPNPKNHIQENWRILDFFSHFPESLHMFTFLFDDLGVPQDYRHMDGFGVNTYTLINKAGKAVYVKFHWKTTSGIKCLLEEEAIKVGGANHSHATQDLHDSIAAGNYPEWKLFVQTIDPEHEDKFDFDPLDVTKTWPEDIIPLQPVGRLVLNKNIDNFFAENEQLAFCPAIVVPGVYYSDDKMLQTRIFSYADSQRHRLGPNYLQLPANAPKCAHHNNHHEGFMNFIHRDEEVNYFPSRYDPVRHAETFPIPPXAICSGRREKCGIEKENNFKQPGERYRSWAPXDRQDRFNRRWVDALSDPRVTHEIRSVWISYWSQADRSLGQKIASRLSMRPNI

SEQ ID NO: 19842 - protein, 498 aa, Glycine max
  unsure (1)..(498): unsure at all Xaa locations
MDPYKHRPSSAFNSPFWTTNSGAPIWNNNSSLTVGARGPILLEDYHLVEKLANFDRERIPERVVHAXRGASAKGFFEXVTHDISHLTCADFLRAPGVQTPVIVRFSTVIHERGSPETLRDPRGFAVKFYTREGNFDLVGNNLPVFFVRDGMKFPDMVHALKPNPKNHIQENWRILDFFSHFPESLHMFTFLFDDLGXVPQDYRHMDGFGVNTYTLINKAGKAVYVKFHWKTTSGIKCLLEEEAIKVGGANHSXHATQDLHDSIAAGNYPEWKLFVQTIDPEHEDKFDFDPLDVTKTWPEDIIPLQPVGRLVLNKNIDNFFAENEQLAFCPAIVVPGVYYSDDKMLQTRIFSYADSQRHRLGPNYLQLPANAPKCAHHNNHHEGFMNFIHRDEEVNYFPSRYDPVRHAERFPIPPAICSGRREKCGIEKENNFKQPGERYRSWAPDRQDRFARRWVDALSDPRXVTHEIRSVWISYWSQADRSLGQKIASXHLSTRPNI

SEQ ID NO: 19843 - protein, 398 aa, Glycine max
  unsure (1)..(398): unsure at all Xaa locations
TSFFFFFSSKQFKSLHXKQTQENTGLWTYNQLADGPFFDLVGNNLPVFFVRDGMKFPDMVHALKPNPKNHIQENWRILDFFSHXPESLHMFTFLFDDLGVPQDYRHMDGFGVNTYTLINKAGKAVYVKFHWKTTSGIKCLLEEEAIKVGGANHSHATQDLHDSIAAGNYPEWKLFVQTIXDPEHEXKFDFDPLDVTKTWPEDIIXLQPVGRLVLNKNIDNFFAENEQLAFCPAIVVPGVYYSDDKMLQTRIFSYADSQRHRLGPNYLQLPANAPKCAHHNNHHEGFMNFIHRDEEVNYFPSRYDPVRHAERFPIPPAICSGRREKCGIEKENNFKQPGERYRSWAPDRQDRFARRWVDALSDPRVTHEIRSVWISYWSQADRSLGQKIASHLSTRPNI

SEQ ID NO: 19844 - protein, 308 aa, Glycine max
MFTFLFDDLGVPQDYRHMDGFGVNTYTLINKAGKAVYVKFHWKTTSGIKCLLEEEAIKVGGANHSHATQDLHDSIAAGNYPEWKLFVQTIDPEHEDKFDFDPLDVTKTWPEDIIPLQPVGRLVLNKNIDNFFAENEQLAFCPAIVVPGVYYSDDKMLQTRIFSYADSQRHRLGPNYLQLPANAPKCAHHNNHHEGFMNFIHRDEEVNYFPSRYDPVRHAETFPIPPAICSGRREKCGIEKENNFKQPGERYRSWAPDRQDRFNRRWVDALSDPRVTHEIRSVWISYWSQADRSLGQKIASRLSMRPNI

SEQ ID NO: 19845 - protein, 295 aa, Glycine max
  unsure (1)..(295): unsure at all Xaa locations
XFGSRDGFGVNTYTLINKAGKALYVKFHWKTTSGEKSLLDDEAIRVGGSNHSHATQDLYDSIAAGNYPEWKLYIQTLDPENEDRLDFDPLDVTKTWPEDVLPLQPVGRMVLNKNIDNFFAENEQLAFCPAIIVPGVYYSDDKLLQTRVFSYADTQRHRLGPNYLQLPANAPKCAHHNNHHDGFMNFMHRDEEVNYFPSRYDPVRHAEKVPVPPRILGGKREKCMIEKENNFKQPGERYRSWPSDRQERFVRRWVDALSDPRVTHEIRSIWISYWSQADRSLGQKIASHLNLKPSI

SEQ ID NO: 19846 - protein, 428 aa, Phaseolus vulgaris
PERVVHARGASAKGFFEVTHDISHLTCADFLRAPGVQTPLIVRFSTVIHERGSPETLRDPRGFAVKFYTREGNFDLVGNNFPVFFVRDGLKFPDMVHALKPNPKSHIQENWRILDFFSHHPESLHMFSFLFDDVGIPQDYRHMDGFGVNTYTLISKAGKPHYVKFHWKATCGEKCLLDEEAVRVGGFNHSHATQDLHDSIAAGNYPEWKLYIQTLDPEQEDKFDFDPLDVTRICPEDVLPLQPVGRMVLNKNIDNFFAENEQLAFCPAIIVPGVYYSDDKLLQTRIFSYADSQRHRLGPNYLQIPANAPKCAHHNNHHEGFMNFMHRDEEVNYFPSRYDPVRHAERIPVPPRILDGKREKCMIEKENNFKQPGERYRSWASDRQERFLRRWVDALSEPRVTHEIRSIWISYWSQADRSLGQKIASHLN

SEQ ID NO: 19847 - protein, 119 aa, Phaseolus vulgaris
NIDNFFTEDEQLAFCPAIVVPGVYYSDDKMLQTRIFSYADSQRHRLGPNYLQLPANAPKCAHHNNHHEGFMNFMHRDEEVNYFPSRYDSVRHAESFPIPPAICSGRREKCGIEKENNIK

SEQ ID NO: 19848 - protein, 494 aa, Pisum sativum
MDPYKHRPSSAFNSPFWTTNSGAPVWNNNSSLTVGSRGPILLEDYHLVEKLAQFDRERIPERVVHARGASAKGFFEVTHDISHLTCADFLRAPGVQTPVIVRFSTVIHERGSPETLRDPRGFAVKFYTREGNYDLVGNNFPVFFVHDGMNFPDMVHALKPNPQTHIQENWRILDFFYNFPESLHMFSFLFDDVGVPQDYRHMDGFGVNTYTLINKAGKSVYVKFHWKPTCGVKCLLEEEAIQVGGSNHSHATKDLYDSIAAGNYPEWKLYIQTIDPAHEDRFEFDPLDVTKTWPEDIIPLQPVGRMVLNKNIDNFFAENEQLAFCPAIMLPGIYYSDDKMLQTRVFSYADSQRHRLGPNYLQLPVNAPKWSHHNNHHEGFMNAIHRDEEVNYFPSRHDTVRHAERVPIPTTHLSARREKCNIPKQNHFKQAGERYRTWAPDRQERFLRRWVEALSDTDPRITHEIRSIWVSYWSQADRSLGQKLASHLNMRPSI

SEQ ID NO: 19849 - protein, 484 aa, Rhizobium sp.
MKKLTNATGAPVADNFNIQTAGPRGPALLQDIWLLEKLAHFDRELIPERRMHAKGAGAYGTFTVTHDITRYTKASIFSSVGKETPLFVRFSSVAGERGSADAERDIRGFAVKFYTDEGNWDIVGNNTPVFFFRDPLRFSDLNHVVKRDPSPALRNATSNWDFWTLLPEALHQVTSVMSDRGLPTSFRHMHGFGSHTFSLIDRDNKRVWVKFHFVCQQGIENLSDAEAEAVVGKDRESNLRDLYEVIEQGNFPRWKLCIQVMEEEQALNYRHNPFDLTKVWPHAARVIEVGIMELNRNSRKANFAEIEQAAFSPANVVPGVSFSPDRISRARLFSYGDAQRYRLWLNFNHIPVNAPRCPASSYHRSYHRDGAMHADGNLGGTASYFPNSVGEWQDSPERAEPPLPLEGFDQHYDHRLEEDHYEQPGNLFRLLDPARNELLFDNTARAMNGVPQRIRQRHMTIAPKPSPAYGFGVAEALERLVPLG

SEQ ID NO: 19850 - protein, 492 aa, Vigna radiata var. radiata
MDPYKYRPSSAFNSPFWTTNSGAPVWNNNNSLTVGTRGPILLEDYHLVEKLANFDRERIPERVVHARGASAKGFFEVTHDVSHLTCADFLRAPGVQTPVIVRFSTVIHERGSPETLRDPRGFAVKFYTREGNFDLVGNNLPVFFVRDGMKFPDMVHALKPNPKNHIQENWRILDFFSHFPESLHMFSFLFDDLGVPQDYRHMDGFGVNTYTLINKAGKAVYVKFHWKTTSGVKCLLEEEAIKVGGANHSHATQDLHDSIAAGNYPEWKLFIQTIDPEHEDKFDFDPLDVTKTWPEDIIPLQPVGRLVLNKNIDNFFAENEQLAFCPAIIVPGVYYSDDKMLQTRIFSYADSQRHRLGPNYLLLPANAPKSAHHNNHHEGFMNFIHRDEEVNYFPSRYDPVRHAEKFPIPPAVFSGRREKIAIEKENNFKQAGERFRSWAPDRQDRFIRRWVDALSDPRVTHEIRSVWISYWSQADRSLGQKIASHLNMRPNI

SEQ ID NO: 19851 - protein, 503 aa, Methanobrevibacter arboriphilus
MSNKKKFTTNKGIPVPNDQASITTGKGSNYTMLGDSHLTEKLAHFGRERIPERVVHAKGTGAYGYFEVTNDLSKYTRAKFLSEVGKKTEVFIRFSTVGGERGSADAKRDPRGTAMKYYTEEGNYDLVGNNTPIFFIRDAIKFPDFIHTQKRNPKNNLSDADMFWDFMSLTPESIHQATFLFTDRGTPQNYRHMDLFGSHSFMWYNEKNEYVWVKYHFKTAQGIQNLTNDEAIKMCGENPDHATEDLFNAIEEGNYPEWNVYVQIMTPEEAEKYEFDPFDVTKVWFHGDYPLIPLGKLVLNKNPENFFAEVEQVAFAPSNFVPGIGPSPDRLLQGRLFSYEDTQRHRLGPNHHQIPINRAKNAEVNTYQRDGPMTVTDNGGSGPNYYPNSFDGPEVDETVTPPTIELKAEINRHPRPVEDVDFFQTGELWRRVLSDEDKDHLVYNIVAHLGNAQERIQYRQCALFYKAEPEYGTRVAEGIGLDISKVKNLSEMTQEERVEATKK

SEQ ID NO: 19852 - protein, 492 aa, Hevea brasiliensis
MDPYKNLPSNAYNCSFWTTNSGAPVWNNNSSLTVGARGPILLEDYHLLEKLANFDRERIPERVVHARGASAKGFFEVTHNVSQLTCADFLRAPGVQTPVIVRFSTVIHERGSPETIRDPRGFAVKFYTREGNFDLVGNNFPVFFIRDGMKFPDVVHAFKPNPKSHIQESWRIFDFLSHVPESLHMLTFLFDDLGIPQDYRHMEGSGVNTYTLINNAGKVHCVKFHWKPTCGVKCLLEEEAIKVGGSNHSHATQDLYDSIAAGNYPEWKLYIQTMDPDHEDKFDFDPLDVTKTWPEDILPLQPVGRLVLNKNIDNFFAENEQLAFCPGIVVPGISYSEDKLLQTRIFSYSDTQRHRLGSNYLQLPVNAPKCAHHNNHHDGFMNFMHRDEEVNYFPSRCDPVRHSERFPIPSTICSGRRDKCVIEKENNFEQPGERYRSWAPDRQERFLNRMVGCLSDPRITHELRSIWISYWTQCDRSLGQKLAFRLNVRPSI

SEQ ID NO: 19853 - protein, 492 aa, Manihot esculenta
MDPCKFRPSSSNNTPFWTTDAGAPVWNNNSSMTVGTRGPILLEDYHMIEKLANFTRERIPERVVHARGMSAKGFFEVTHDVSHLTCADFLRAPGVQTPVIVRFSTVIHERGSPETLRDPRGFATKFYTREGNFDIVGNNFPVFFIRDGIKFPDVIHAFKPNPKSHIQEYWRIFDFLSHHPESLSTFAWFFDDVGIPQDYRHMEGFGVHTFTFINKAGKVTYVKFHWKPTCGVKCLMDDEALKIGGANHSHATQDLYDSIAAGNYPEWRLFIQTMDPADEDKFDFDPLDMTKIWPEDIFPLQQIGRLVLNRNIDNWFAENEMLAFDPGHIVPGIHYSNDKLFQLRTFAYADTQRHRLGPNYKMLPVNAPKCAYHNNHYDGFMNFMHRDEEVDYFPSRYDPVRHAERSPIPNAICSGRREKCVIEKENNFKQPGERYRSWAPDRQERFLCRLVNALSEPRITFEIRSIWVSYWSKCDASLGQKLASRLNVRPNI

SEQ ID NO: 19854 - protein, 492 aa, Ricinus communis
MDPYRNRPSSGFNTPFWTTNSGAPVWNNNSSLTVGSRGPILLEDYHLIEKLANFDRERIPERVVHARGASAKGFFEVTHDVSHLTCADFLRAPGVQTPVIVRFSTVIHERGSPETLRDPRGFAVKFYTREGNFDLVGNNFPVFFIRDGMKFPDVVHAFKPNPKSHLQENWRIFDFLSHVPESLHMLTFLLDDLGIPQDYRHMEGSGVNTYTLINKAGKVHYVKFHWKPTCGVKCLLENEAIKVGGSNHSHATQDLYDSISAGNYPEWKLYIQIMDPAHEDKFDFDPLDVTKTWPEDILPLQPVGRLVLNKNIDNFFAENEQLAFCPGIVVPGVSYSEDKLLQTRIFSYSDTQRHRLGPNYLQLPVNAPKCAHHNNHHEGFMNFMHRDEEVNYFPSRCDPARNAESFPVPSAICSGKREKCVIEKENNFKQPGERYRSWAPDRQERFLNRLVGGLSDPRITHELRTIWISYWIQCDKSLGQKLATRLNVKPSI

SEQ ID NO: 19855 - protein, 492 aa, Ricinus communis
MDPYKFRPSSSNDTPFWTTNAGDPVSNNNSSMTVGPRGPILLEDYHMIEKLANFTRERIPERVVHARGMSAKGFFEVTHDVTDLTCADFLRAPGVQTPVIVRFSTVIHERGSPETLRDPRGFATKFYTREGNFDIVGNNFPVFFIRDGIKFPDVVHAFKPNPKSHIQEYWRIFDFCSHHPESLSTFAWFFDDVGIPQDYRHMEGFGVHTYCLINKAGKVTYVKFHWKPTCGVKCLMDDEAIKVGGANHSHATQDLYDSIAAGNFPEWKLMIQTMDPADEDKFSFDPLDMTKIWPEDMFPLHPVGRLVLNRNIDNWFAENEMLAFNPAHVVPGVYYSNDKLFQLRLFAYSDTQRHRLGTNYLQLPVNAPKCPYHNNHYDGFMNFMHRDEEVDYFQSRYDPVRHAEKVPIPNAICSGRREKCVIEKEDNFRQPGDRYRSWAPDRQERFLCRLVNALSEPRITHEIRSIWVSWWTQCDKSLGQKLASRLNVRPNI

SEQ ID NO: 19856 - protein, 90 aa, Ricinus communis
RESFPVPSAICSGKREKCVIEKENNFKQPGERYRSWPPDRQERSLNRLVGGFSEPRITQELRTIWISYWIQCDKSLGQKLATRLNVKPSI

SEQ ID NO: 19857 - protein, 492 aa, Oryza sativa (japonica cultivar-group)
MDPYKHRPSSGSNSTFWTTNSGAPVWNNNSALTVGERGPILLEDYHLIEKLAQFDRERIPERVVHARGASAKGFFEVTHDISHLTCADFLRAPGVQTPVIVRFSTVVHERGSPETLREPRGFAVKFYTREGNFDLVGNNMPVFFIRDGMKFPDMVHAFKPSPKTNMQENWRIVDFFSHHPESLHMFSFLFDDVGIPLNHRHMEGFGVNTYTLINKDGKPHLVKFHWKPTCGVKCLLDDEAVTVGGTCHSHATKDLTDSIAAGNYPEWKLYIQTIDPDHEDRFDFDPLDVTKTWPEDIIPLQPVGRMVLNKNIDNFFAENEQLAFCPAIIVPGIHYSDDKLLQTRIFSYADTQRHRLGPNYLMLPVNAPKCAYHNNHHDGSMNFMHRDEEVNYFPSRFDAARHAEKVPIPPRVLTGCREKCVIDKENNFQQAGERYRSFDPARQDRFLQRWVDALSDPRITHELRGIWISYWSQCDASLGQKLASRLNLKPNM

SEQ ID NO: 19858 - protein, 714 aa, Botryotinia fuckeliana
MYLATVLSLVGLVTAQCPYGMDKQPQKREPKDSQTSSSNFLDQFTLNDTNTYFTTDAGGPIQEDTSLKAGARGPTLLEDFIFRQKIQHFDHERVPERAVHARGAGAHGIFTSYGNYSNITAASFLNQEGKETPVFVRFSTVAESRGSADTARDVHGFATRFYTDEGNFDIVGNNIPVFFIQDAILFPDLIHAVKPSPDNEIPQAATAHDSAWDFFSQQPSSLHTLFWAMAGNGIPRSFRHMDGFGIHTFRLVTDSGTSKLVKWHWKSKQGKASLVWEEAQVLAGKNADFHRKDLWDAIESGNGPEWELGIQIVEEEDVLKFGFDLLDPTKILPEELVPVQKIGVMRLNANPRNYFAETEQVMFQPGHIVRGIDFTDDPLLQGRIFSYLDTQLNRHGGPNFEQLPINRPIVPVHNNNRDGAAHNYIPLNTAAYSPNTLNDAAPKQANQTVGRGFFTAPGRTVSGHLVREVSSTFSDVWSQPRLFYNSLIPVEQQFLINAIRFETSQLTSSVVKSNVLIQLNRVSHDLAARVASVLNLPVPEADNTYYNDNKTSSITIFGNELPTIATLNVGVLVSVKNNATLTQAANLATSFSTSGVNVKVIGEILTNGVDATYSASDATLFDGIIVTDGAENLFTNGSKSTYFPADRPRQILLDAYNWGKPVGTLGNARTSLNVASISTTPGVYSNSTSVSGLVKEFEAGLKTFRFVDRFALDD

SEQ ID NO: 19859 - protein, 479 aa, Botryotinia fuckeliana
MAQTNGVLQEPAITTMNGAPVLKPASTQRIGNQLRATLLLQDINLLELIQHITHERIPERVVHARGTSAHGYFEVTDDISDVTSAAFLNRVGKQTDIFCRFSTVAGRAESAETVRDTRGFAFKMFTEEGNLDWLFLSTPVFPIRDGAKFPSFTHATKKNPRSGLPDHKAFWDYFTHNQEGIHFLMFLFSDRATPVDFQHADIFSINTYKFTKSDGSFTYVKIHLKTNQGVKNFTQDEANQKAGVDPDFQTRSLYEDIENQKYPTWDVFAQIIDPVKAENYHINIFDATKTFPFSEFPLRKFGKITLNRNVDNFFAEQEQSAFSPTNLVPGWALTPDPIIQTRALAYADTQRYRLGANFVQLPVNAPYKKPFTPLIRDGAATVNGNLGGTPNYFPSSFYNVGAATQYAQPDEEQFQGTVVNFESEVVDADYVQPRIFWEKTLAEEPGQQDNLISNVAGHLSAVTGDKGLGSSTSGLCNVR

SEQ ID NO: 19860 - protein, 492 aa, Capsicum annuum
MDPYKHRPSSAANSPYWTTNSGAPVYNNNSSLTVGARGPILLEDYHLLEKLANFDRERIPERVVHARGASAKGFFEVTHDITRLTCADFLRAPGVQTPVIVRFSTVIHERGSPETLRDPRGFAVKFYTREGNFDLVGNNFPVFFVRDGMKFPDMVHALKPNPKSHIQENWRILDFFSHHPESLHMFSFLFDDLGIPQDYRHMEGSGVNTYTLINKAGKAHYVKFHWKPTCGVKCLLDDEAVKVGGTNHSHATQDLYDSIAAGNYPKWKLFIQTIDPDHEDKFDFDPLDVTKIWPEDILPLQPVGRLVLNKNIDNFFVENEQLAFCPAIIVPGIHYSDDKLLQTRVFSYADTQRHRLGPNYLQLPPNAPKCAHHNNHHEGFMNFMHRDEEVNYFPSRFDPCRHAEQYPIPPRVLNGKRDRCIIQKENNFKQPGERYRSWAPDRQERFICRWVDALSEPRVTHEIRTIWLSYWSQADKSLGQKLASRLNVKPTM

SEQ ID NO: 19861 - protein, 470 aa, Methylobacterium extorquens
NSLTAGSRGPVLMQDYHLIEKMAHFNRERIPERVVHAKGYGAYGTFRLTRSLSEFTRAKVLTEVGKDVPMVARFSTVGGESGSADTARDPRGFALKFYTEEGNWDLVGNNTPIFFVRDAIKFSDFIRTQKRDPRTHLKPHWRRWDFWSLSPEAIHQVMFLYSDRGTPKSARFMNGYGSHTFSLWNDRGERHWVKFHFHTKQGIQNFSADEADEVAGKDPDYSSADLSTAIEQGDFPKWKVSVQLMPELDADTYRINPFDLTKVWPHGDYPLIEIGEMELNRNPENYFAEIEQSAFEPSNVVPGIGFSPHKMLQNRVLSYADAHRYRLGVNYQQIPVNQAKNADVQTYHRDGAMRTDGNHGAQVDYEPNSFGGPKQDPSFSEPPLRIQGDAGRYGWPGDDEDLYGQPKLFWTKVLDEGGRKRLVENIVTSMGDSPRHIQERMIAHWFKVHEDFGRGVAQGLGIDTAQAAAE

SEQ ID NO: 19862 - protein, 492 aa, Nicotiana plumbaginifolia
MDPYKYRPSSANNSPFWTTNSGAPVWNNNSSMTVGTRGPILLEDYHLVEKLANFDRERIPERVVHARGASAKGFFEVTHDITHLTCADFLRAPGVQTPVIVRFSTVIHERGSPETLRDPRGFAVKFYTREGNFDLVGNNFPVFFVRDGMKFPDMVHALKPNPKSHIQENWRILDFFSHHPESLHMFSFLFDDLGVPQDYRHMEGSGVNTYMLINKAGKAHYVKFHWKPTCGVKCLLEEEAIKVGGANHSHATKDLYDSIAAGNYPEWKLFIQIIDPDHEDRFDFDPLDVTKTWPEDILPLQPVGRLVLNKNIDNFFAENEQLAFWPAIVVPGVYCSDDKLLQTRIFSYSDAQRHRLGPNYLQLPVNAPKCAHHNNHHEGFMNFMHRDEEVNYFPSRFDPCRHAEQYPIPPCVLTGKRDKCIIEKENNFKQPGERYRSWAPDRQERFICRWVDALSDPRVTHEIRSIWFSYWSQADKTLGQKIASRLNVRPTM

SEQ ID NO: 19863 - protein, 383 aa, Nicotiana sylvestris
RGSPESLRDIRGFAVKFYTREGNFDLVGNNVPVFFNRDAKSFPDTIRALKPNPKSHIQEYWRILDFFSFLPESLHTFAWFFDDVCLPTDYRHMEGYGVHAYQLINKAGKAHYVKFHWKPTCGVKCMSEEEAIRVGGTNHSHATKDLYDSIAAGNYPEWKLFIQIMDTEDVDKFDFDPLDVTKTWPEDILPLMPVGRLVLNRNIDNFFAENEQLAFNPGHIVPGLYYSEDKLLQTRIFAYADTQRHRIGPNYMQLPVNAPKCAHHNNHRDGAMNFMHRDEEVDYLPSRFDPCRHAEQYPIPSRVLTGRREMCVIEKENNFKQAGERYRSWEPDRQDRYVSKWVEHLSDPRVTYEIRSIWISYLSQADKSCGQKVASRLTLKPTM

SEQ ID NO: 19864 - protein, 492 aa, Solanum melongena
MDLSKYRPSSAYDTPFLTTNAGGPVYNNVSSLTVGPRGPVLLEDYHLIEKLATFDRERIPERVVHARGASAKGFFEVTHDVSHLTCADFLRAPGVQTPVICRFSTVVHERGSPESIRDIRGFAVKFYTREGNFDLVGNNVPVFFNRDAKSFPDTIRALKPNPKSHIQENWRILDFFSFLPESLHTFAFFYDDVCLPINYRHMEGFGVHAYQLINKAGKAHYVKFHWKPTCGVKSMTEEEAIRVGGTNHSHATKDLYDSIAAGNYPEWKLFIQIMDPEDVDKFDFDPLDVTKTWPEDILPLMPVGRLVLNRNIDNFFAENEQLAFNPGHIVPGVYYSEDKLLQTRIFAYADTQRHRIGPNYMQLPVNAPKCAHHNNHRDGAMNFMHRDEEVDYLPSRFDPCRPAEQYPIPSCVLTGRREKCVIPKENNFKQAGERYRTWEPDRQDRYINKWVESLSDPRVTHEIRSIWISYLSQADKSCGQKVASRLLVKPTM

SEQ ID NO: 19865 - protein, 502 aa, Solanum melongena
MDLSKYRPSSAYDTPFLTTNAGGPVYNNVSSLTVGPRGPVLLEDYHLIEKLATFDRERIPERVVHARGASAKGFFEVTHDVSHLTCADFLRAPGVQTPVICRFSTVVHERGSPESIRDIRGFAVKFYTREGNFDLVGNNVPVFFNRDAKSFPDTIRALKPNPKSHIQENWRILDFFSFLPESLHTFAFFYDDVCLPINYRHMEGFGVHAYQLINKAGKAHYVKFHWKPTCGVKSMTEEEAIRVGGTNHSHATKDLYDSIAAGNYPEWKLFIQIMDPEDVDKFDFDPLDVTKTWPEDILPLMPVGRLVLNRNIDNFFAENEQLAFNPGHIVPGVYYSEDKLLQTRIFAYADTQRHRIGPNYMQLPVNAPKCAHHNNHRDGAMNFMHRDEEVDYLPSRFDPCRPAEQYPIPSCVLTGRREKCVIPKENNFKQAGERYRTWEPDRQDRYINKWVESLSDPRVTHEIRSIWISYLSQADKSCGQKVASRLLSSLQCEEDEENSWKC

SEQ ID NO: 19866 - protein, 492 aa, Solanum tuberosum
MDPSKYRPSSAYDTPFLTTNAGGPVYNNVSSLTVGPRGPVLLEDYYLIEKLATFDREKIPERVVHARGASAKGFFEVTHDISHLTCADFLRAPGAQTPVICRFSTVVHERGSPESIRDIRGFAVKFYTREGNFDLVGNNVPVFFNRDAKSFPDTIRALKPNPKSHIQENWRILDFFSFLPESLHTFAFFYDDVCLPTDYRHMEGFGVHAYQLINKEGKAHYVKFHWKPTCGVKSMSEEEAIRVGGTNHSHATKDLYDSIAAGNYPEWKLFIQTMDPEDVDKFDFDPLDVTKTWPEDLLPLIPVGRLVLNRNIDNFFAENEQLAFNPGHIVPGIYYSEDKLLQTRIFAYADTQRHRIGPNYMQLPVNAPKCGHHNNHRDGAMNMTHRDEEVDYLPSRFDPCRPAEQYPIPACVLNGRRTNCVIPKENNFKQAGERYRSWESDRQDRYITKWVESLSDPRVTHEIRSIWISYLSQADKSCGQKVASRLTVKPTM

SEQ ID NO: 19867 - protein, 491 aa, Solanum tuberosum
DPSKYRPSSAYDTPFLTTNAGGPVYNNVSSLTVGPRGPVLLEDYYLIEKLATFDREKIPERVVHARGASAKGFFEVTHDISHLTCADFLRAPGAQTPVICRFSTVVHERGSPESIRDIRGFAVKFYTREGNFDLVGNNVPVFFNRDAKSFPDTIRALKPNPKSHIQENWRILDFFSFLPESLHTFAFFYDDVCLPTDYRHMEGFGVHAYQLINKEGKAHYVKFHWKPTCGVKSMSEEEAIRVGGTNHSHATKDLYDSIAAGNYPEWKLFIQTMDPEDVDKFDFDPLDVTKTWPEDLLPLIPVGRLVLNRNIDNFFAENEQLAFNPGHIVPGIYYSEDKLLQTRIFAYADTQRHRIGPNYMQLPVNAPKCGHHNNHRDGAMNMTHRDEEVDYLPSRFDPCRPAEQYPIPACVLNGRRTNCVIPKENNFKQAGERYRSWESDRQDRYITKWVESLSDPRVTHEIRSIWISYLSQADKSCGQKVASRLTVKPTM

SEQ ID NO: 19868 - protein, 492 aa, Solanum tuberosum
MDPSKYRPSSAYDTPFLTTNAGGPVYNNVSSLTVGPRGPVLLEDYYLIEKLATFDREKIPERVVHARGASAKGFFEVTHDISHLTCADFLRAPGAQTPVICRFSTVVHERGSPESIRDIRGFGVKFYNRGGNFDLVGNNVPVFFNRDAKSFPDTIRALKPNPKSHIQEDWRTLDFFSFLPESLHTFAFFYDDVCLPTDYRHMEGFGVHAYQLINKEGKAHYVKFHWKPTCGVKCMSEEEAIRVGGTNHSHATKDLYDSIAAGNYPEWKLFIQTMDPEDVDKFDFDPLDVTKTWPEDLLPLIPVGRLVLNRNIDNFFAENEQLAFNPGHIVPGIYYSEDKLLQTRIFAYADTQRHRIGPNYMQLPVNAPKCGHHNNHRDGAMNMTHRDEEVDYFPSRFDPCRPAEQYPIPACVLNGRRTNCVIPKENNSKQAGERYRSWESDRQDRYINKWVESLSDPRVTHEIRSIWISYLSQADKSCGQKVASRLTVKPTM

SEQ ID NO: 19869 - protein, 492 aa, Ipomoea batatas
MDPSKYRPSSSFNTPFCTTNSGAPVWNNTCALTVGSRGPILLEDYHLVEKIQNFTRERIPERVVHARGASAKGFFEVTHDITHLTCADFLRAPGVQTPLIVRFSTVIHERGSPETIRDPRGFAVKMYTRGGNWDLVGNNFPVFFIRDGTQFPDVIHAFKPNPKSHIQENWRILDYLSHLPESLNTFAWFYDDVGIPTDYRHMEGFGVHTFTMINKEGKANYVKFHWKPTCGVKCLLEEEAIRIGGENHSHATQDLYESIAAGNYPEWKLYIQVMDPDHEDRFDFDPLDTTKIWPEELIPLQPVGRMVLNKNIDNFFAENEMLAMDPAHIVPGIYFSDDKMLQARVFAYADTHRHRLGPNYMLLPVNAPKCAHHNNSYDGYMNFVHRDEEVDYFPSKFDNTRNAERFPTPLRIVTGQRDKCVIEKENNFKQPGDRYRSWAPDRQDRFINRWVKALSEPRVTHEIRSTWISYLTQADRSLGQKVASRLNIRPTM

SEQ ID NO: 19870 - protein, 492 aa, Helianthus annuus
MDPYKYRPSSAYNAPFWTTNYGAPVYNNDSSLTVGTRGPILLEDYHFVEKLANFDRERIPERVVHARGASAKGFFEVTHDISALTCADFLRAPGVQTPVIVRFSTVIHERGSPETLRDPRGFAVKFYTREGNFDLVGNNFPVFFVRDGMKFPDMVHSLKPNPKSHIQEDWRILDFFSHHPESLHMFTFLQDDVGVPQDYRHMDGSGVNTYTLINKTGKTHYVKFHWRPTCGVKCLLEDEAIKVGGMNHSHATKDLYDSIADGNYPEWKLFIQTMDPDHEDRFDFDPLDVTKTWPEDILPLQPVGRMVLNKNIDNFFAENEQLAFCPAIIVPGIYYSDDKLLQTRIFSYADTQRHRLGPNYLQLPANAPKCAHHNNHHDGFMNFMHRDEEVIYFPSRYDPVRHAEQSPIPPVMLSGKRNKCVIEKENNFKQPGERFRSWDPDRQERFIRRIVGALSDPRVTHEVCTIWVSYWSQADKSLGQKIASRLNVKPSY

SEQ ID NO: 19871 - protein, 492 aa, Helianthus annuus
MDPYKYRSSSAYNAPFWTTNSGAPVYNNNNSLTVGSRGPILLEDYHLVEKLANFDRERIPERVVHARGASAKGFFEVTHDITALTCADFLRAPGVQTPVIVRFSTVIHERGSPETLRDPRGFAVKFYTREGNFDLVGNNFPVFFIRDGMKFPDMVHSLKPNPKSHIQEDWRIMDFFSHHPESLHMFTFLLDDIGVPQDYRHMDGSGVNTYTLINKAGKAYYVKFHWKPTCGVKSLLEEEAIKIGGANHSHATQDLYDSIAAGNYPEWKLFIQTIDPDHEDRLDFDPLDVTKTWPEDIFPLQPVGRLVLNKNIDNFFAENEQLAFCPAIIVPGIYYSDDKLLQTRIFSYSDTQRHRLGPNYLQLPANAPKCAHHNNHYDGFMNFMHRDEEIDYFPSRYDPARHAEQYPIPPVRLSGKRDKCVIEKENNFKQPGERYRSFSPDRQERFINRVVGGLSDPRVTHEVRSIWVSYWSQADKSLGQKIASRLNVKPNY

SEQ ID NO: 19872 - protein, 492 aa, Helianthus annuus
MDPYKYRSSSAYNAPFWTTNSGAPVYNNNNSLTVGSRGPILLEDYHLVEKLANFDRERIPERVVHARGASAKGFFEVTHDITALTCADFLRAPGVQTPVIVRLSTVIHERGSPETLRDPRGFAVKFYTREGNFDLVGNNFPVFFIRDGMKFPDMVHSLKPNPKSHIQEDWRIMDFFSHHPESLHMFTFLLDDIGVPQDYRHMDGSGVNTYTLINKAGKAYYVKFHWKPTCGVKSLLEEEAIKIGGANHSHATQDLYDSIAAGNYPEWKLFIQTIDPDHEDRLDFDPLDVTKTWPEDIFPLQPVGRLVLNKNIDNFFAENEQLAFCPAIIVPGIYYSDDKLLQTRIFSYSDTQRHRLGPNYLQLPANAPKCAHHNNHYDGFMNFMHRDEEIDYFPSRYDPARHAEQYPIPPVRLSGKRDKCVIEKENNFKQPGERYRSFSPDRQERFINRVVGGLSDPRVTHEVRSIWVSYWSQADKSLGQKIASRLNVKPNY

SEQ ID NO: 19873 - protein, 492 aa, Helianthus annuus
MDPYKQRPSSAYDTPFWTTNAGAPVYNNTASLTVGNRGPILLEDYHLIEKLANFTRERIPERIVHARGASAKGFFEVTHDITHLTCADFLRAPGVQTPVIVRFSTVIHERGSPETIRDPRGFATKFYTREGNFDIVGNNFPVFFTRDAMAFPDVIHAFKPNPKSHIQEDWRILDFLSHHPESLNTMTFWLDDVGIPTDYRHMEGSSVNTLTLVNKEGKIHYVKFTWKPTCGVKCLMDDEAIKIGGANHSHATQDLYDSIQAGNFPEWKLFLQVIDPDHEDRLDFDPLDGTMTWPEDVIPLQPVGRMVLNKNIDNFFAENEQLAFNPGLVVPGIYYSDDKMLQGRIFAYSDTQRHRLGPNYLQLPVNAPKCAHHNNHYDGHMNFMHRDEEVDYFPSRYDRVQHAQKYPINPARVTGTRDRTVIPKYNDFKQPGERYRSWDPARQERFIVRMCKMLSDPRVTHELRSIWISYWTQADKSLGQKIASRLNVRPNY

SEQ ID NO: 19874 - protein, 492 aa, Helianthus annuus
MDPYKQRPSSAYNAPFWTTNAGLPVYNNTASLTVGNRGPILLEDYHLIEKLANFTRERIPERIVHARGASAKGFFEVTHDITHLTCADFLRAPGVQTPTIVRFSTVIHERGSPETIRDPRGFATKFYTREGNFDIVGNNFPVFFTRDAMAFPDVIHAFKPNPKSHIQEDWRILDFLSHHPESLNTMTFWLDDVGIPTDYRHMEGSSVNTLTLVNKEGKIHYVKFTWKPTCGVKCLMDDEAIKIGGANHSHATQDLYDSIQAGNFPEWKLYLQVIDPDHEDRLDFDPLDGTMTWPEDIIPLQPVGRMVLNKNIDNFFAENEQLAFNPGLVVPGIYYSDDKMLQGRIFAYSDTQRHRLGPNYLQLPVNAPKCAHHNNHYDGNMNFMHRDEEVDYFPSRYDRVQHAKQYPINSRQVTGTRDRTVIPKYNDFKQPGDRYRSWDPARQERFIVRMCKMLSDPRVTHELRSIWISYWTQADQSLGQKIASRLNVRPNY

SEQ ID NO: 19875 - protein, 355 aa, Rhodococcus equi
  unsure (1)..(355): unsure at all Xaa locations
MTTNQGVKVSEDEHSLKAGSRGPTLMEDFHFREKMTHFDHERIPERVVHARGFGAHGYFQVYEPMAEYTRAKFLQDPSVKTPVFVRFSTVAGSRGSADSVRDARGFATKFYTEEGNYDLVGNNIPVFFIQDAIKFPDLVHSFKPEPHNEMPXASTAHDTFWDFVANILKQAHMIMWTMSDRAIPRSFRMMEGFGVHTFRFVNEQGKARFVKFHWKPVLGTHSLVFDEAQKLAGKDPDFHRRDLWEAIEMGNYPEFELGVQMIEEEDEFSFDFDILDATKLWPEEMVPVKIIGKMTLNRNQDNVFAETEQAAFHPGHVVPGIDFSNDPLLQGRLFSYTDTQLIRLGGPNFHEIPIK

SEQ ID NO: 19876 - protein, 496 aa, Dictyostelium discoideum
MSAPVLTTSSGSPIDNNLNSMTAGVNGPILIQDFTLIDKLAHFDRERIPERVVHAKGAGAHGYFEVTSSDVPKWCKAKFLNKVGKRTPIFTRFSTVGGEKGSSDSERDPRGFAVKFYTEEGNFDMVGNNTPVFFIRDPSKFPDFIHTQKRNPQTNCKDPNMFWDFLGQTPESTHQVSILFSDRGTPKSYRHMHGFSSHTLKFVNAQGKPYWVKLHFTSETGIQNYTAEEAAKMSMNDPDSATRDLFETIAKGGEPAWKVSIQLMEFEDALKYRFNPFDVTKIWSHKDYPLIQIGRMVLNRNPENYFAEVEQAAFSPSHMVPGIEPSPDKMLQGRLFSYPDTHRHRLGVNYQQIPVNCPFAVKGGVKNYQRDGFMAVNGNGGKGPNYQPNSFGGPEPHPEFAQHKFDVSGFAARQPYNHPNDDFVQPGDLYRLMSEDAKSRFVSNLVGHMSGVTIKEIQVRAVSNFYKADKDLGARLCKGLGIDVNDVIKFAARSNL

SEQ ID NO: 19877 - protein, 496 aa, Dictyostelium discoideum
MSAPVLTTSSGSPIDNNLNSMTAGVNGPILIQDFTLIDKLAHFDRERIPERVVHAKGAGAHGYFEVPSSDVPKWCKAKFLNKVGKRTPIFTRFSTVGGEKGSSDSERDPRGFAVKFYTEEGNFDMVGNNTPVFFIRDPSKFPDFIHTQKRNPQTNCKDPNMFWDFLGQTPESTHQVSILFSDRGTPKSYRHMHGFSSHTLKFVNAQGKPYWVKLHFTSETGIQNYTAEEAAKMSMNDPDSATRDLFETIAKGGEPAWKVSIQLMEFEDALKYRFNPFDVTKIWSHKDYPLIQIGRMVLNRNPENYFAEVEQAAFSPSHMVPGIEPSPDKMLQGRLFSYPDTHRHRLGVNYQQIPVNCPFAVKGGVKNYQRDGFMAVNGNGGKGPNYQPNSFGGPEPHPEFAQHKFDVSGFAARQPYNHPNDDFVQPGDLYRLMSEDAKSRFVSNLVGHMSGVTIKEIQVRAVSNFYKADKDLGARLCKGLGIDVNDVIKFAARSNL

SEQ ID NO: 19878 - protein, 492 aa, Hordeum vulgare
MDPYKHRPTSGANSAYWTTNSGAPVWNNNNALTVGHRGPILLEDYHLIEKLAQFDRERIPERVVHARGASAKGFFEVTHDVSQLTCADFLRAPGVQTPVIVRFSTVVHERGSPETLRDPRGFAVKFYTREGNFDLVGNNMPVFFIRDGMKFPDMVHAFKPSPKTNMQENWRVVDFFSHHPESLHMFTFLFDDVGIPLNYRHMDGFGVNTYTLISRDGKAHLVKFHWKPTCGVKCLLDDEAVTVGGTCHTHATKDLTDSIAAGNYPEWKLFIQTIDADHEDRFDFDPLDVTKTWPEDIIPLQPVGRMVLNKNIDNFFAENEQLAFCPAVTVPGIHYSDDKLLQTRIFSYADTQRHRLGPNYLMLPVNAPKCAHHNNHHDGLMNFIHRDEEVNYFPSRFDPTRHAEKYPMPPRVLSGCREKCIIDKENNFKQAGERYRSFDPARQDRFLQRWVDALTDARVTHEIQSIWVSYWSQCDASLGQKLASRLKIKPNM

SEQ ID NO: 19879 - protein, 91 aa, Oryza longistaminata
RDAKARYVKFHWKPTCGVSCLMDDEATLVGGKNHSHATQDLYDSIAAGNFPEWKLFVQVIDPEEEERFDFDPLDDTKTWPEEEVPLRPVGR

SEQ ID NO: 19880 - protein, 90 aa, Oryza longistaminata
RDAKARYVKFHWKPTCGVSCLMDDEATLVGGKNHSHATQDLYDSIAAGNFPEWKLFVQVIDPEEEERFDFDPLDDTKTWPEEEVPLRPVG

SEQ ID NO: 19881 - protein, 90 aa, Oryza longistaminata
DAKARYVKFHWKPTCGVSCLMDDEATLVGGKNHSHATQDLYDSIAAGNFPEWKLFVQVIDPEEEERFDFDPLDDTKTWPEEEVPLRPVGR

SEQ ID NO: 19882 - protein, 89 aa, Oryza longistaminata
DAKARYVKFHWKPTCGVSCLMDDEATLVGGKNHSHATQDLYDSIAAGNFPEWKLFVQVIDPEEEERFDFDPLDDTKTWPEDEVPLRPVG

SEQ ID NO: 19883 - protein, 89 aa, Oryza longistaminata
DAKARYVKFHWKPTCGVSCLMDDEATLVGGKNHSHATQDLYDSIAAGNFPEWKLFVQVIDPEEEERFDFDPLDDTKTWPEEEVPLRPVG

SEQ ID NO: 19884 - protein, 81 aa, Oryza longistaminata
YVKFHWKPTCGVSCLMDDEATLVGGKNHSHATQDLYDSIAAGNFPEWKLFVQVIDPEEEERFDFDPLDDTKTWPEEEVPLR

SEQ ID NO: 19885 - protein, 84 aa, Oryza rufipogon
ARYVKFHWKPTCGVSCLMDDEATLVGGKNHSHATQDLYDSIAAGNFPEWKLFVQVIDPEEEERFDFDPLDDTKTWPEDEVPLRP

SEQ ID NO: 19886 - protein, 492 aa, Oryza sativa
MDPYKHRPSSGSNSTFWTTNSGAPVWNNNSALTVGERGPILLEDYHLIEKLAQFDRERIPERVVHARGASAKGFFEVTHDISHLTCADFLRAPGVQTPVIVRFSTVVHERGSPETLRDPRGFAVKFYTREGNFDLVGNNMPVFFIRDGMKFPDMVHAFKPSPKTNMQENWRIVDFFSHHPESLHMFSFLFDDVGIPLNYRHMEGFGVNTYTLINKDGKPHLVKFHWKPTCGVKCLLDDEAVTVGGTCHSHATKDLTDSIAAGNYPEWKLYIQTIDPDHEDRFDFDPLDVTKTWPEDIIPLQPVGRMVLNKNIDNFFAENEQLAFCPAIIVPGIHYSDDKLLQTRIFSYADTQRHRLGPNYLMLPVNAPKCAYHNNHHDGSMNFMHRDEEVNYFPSRFDAARHAEKVPIPPRVLTGCREKCVIDKENNFQQAGERYRSFDPARQDRFLQRWVDALSDPRITHELRGIWISYWSQCDASLGQKLASRLNLKPNM

SEQ ID NO: 19887 - protein, 492 aa, Oryza sativa
MDPYKHRASSGSNSTFWTTNSGAPVWNNNSALTVGERGPILLEDYHLIEKLAQFDRERIPERVVHARGASAKGFFEVTHDISHLTCADFLRAPGVQTPVIVRFSTVVHERGSPETLRDPRGFAVKFYTREGNFDLVGNNMPGFFIRDGMKFPDMVHAFKPSPKTNMQENWRIVDFFSHHPESLHMFSFLFDDVGIPLNYRHMEGFGVNTYTLINKDGKPHLVKFHWKPTCGVKCLLDDEAVTVGGTCHSHATKDLTDSIAAGNYPEWKLYIQTIDPDHEDRFDFDPLDVTKTWPEDIIPLQPVGRMVLNKNIDNFFAENEQLAFCPAIIVPGIHYSDDKLLQTRIFSYADTQRHRLGPNYLMLPVNAPKCAYHNNHHDGSMNFMHRDEEVNYFPSRFDAARHAEKVPIPPRVLTGCREKCVIDKENNFQQAGERYRSFDPARQDRFLQRWVDALSDPRITHELRGIWISYWSQCDASLGQKLASRLNLKPNM

SEQ ID NO: 19888 - protein, 482 aa, Oryza sativa
  unsure (1)..(482): unsure at all Xaa locations
MDPYKHRPSSGSNSTFWTTNSGAPVWNNNSALTVGERGPILLEDYHLIEKLAQFDRERIPERVVHARGASAKGFFEVTHDISHLTCADFLRAPGVQTPVIVRFSTVVHERGSPETLRDPRGFAVKFYTREGNFDLVGNNMPVFFIRLGMKFPDMVAAFXWRIVDFFSHHPESLHMFSFLFDDVGIPLNYRHMEGFGVNTYTLINKDGKPHLVKFHWKPTCGVKCLLDDEAVTVGGTCHSHATKDLTDSIAAGNYPEWKLYIQTIDPDHEDRFDFDPLDVTKTWPEDIIPLQPVGRMVLNKNIDNFFAENEQLAFCPAIIVPGIHYSDDKLLQTRIFSYADTQRHRLGPNYLMLPVNAPKCAYHNNHHDGSMNFMHRDEEVNYFPSRFDAARHAEKVPIPPRVLTGCREKCVIDKENNFQQAGERYRSFDPARQDRFLQRWVDALSDPRITHELRGIWISYWSQCDASLGQKLASRLNLKPNM

SEQ ID NO: 19889 - protein, 86 aa, Oryza glaberrima
GKARYVKFHWKPTCGVSCLMDDEATIVGGKNHSHATQDLYDSIAAGNFPEWKLFVQVIDPEEEERFDFDPLDDTKTWPEDEVPLRP

SEQ ID NO: 19890 - protein, 84 aa, Oryza glaberrima
ARYVKFHWKPTCGVSCLMDDEATIVGGKNHSHATQDLYDSIAAGNFPEWKLFVQVIDPEEEERFDFDPLDDTKTWPEDEVPLRP

SEQ ID NO: 19891 - protein, 492 aa, Secale cereale
MDPCKFRPSSSFDTKTTTTNPGQPVWNDNEALTVGPRGPILLEDYHLLEKIAHFARDIPEPFVHAGRASAKGFFECTHDVTGLTCADFLPSPGAGTPVIVRFSTVIHERGSPETIRDPRGFAVKFYTREGNWDLLGNNFPVFFIRDGIKFPDVIHAFKPNPKSHVQEYWRVFDFLPHHPESLHTFFFLFDDVGIPTDYRHMDGFGVNTYTFVTRAGKSHYIKFHWRPTCGVSCLMDDEATLVGGKNHSHATQDLYDSIDAGNFPEWKLFVQVIDPEQQDRFDFDPLDDTKTWPEDLVPLQPVGRLVLDRNVDNFFNENEQLAFGPGLVVPGIYYSDDKMLQCRVFAYADTQRYRLGPNYLMLPVNAPKCGFKKNHYDGAMNFMHRDEEVDYYPSRHAPLRHAEPASFPVPTRPVVGKREKTRIKKENDFVQPGERYRSWAPDRQDRFVALRRRLAHPKVSHELRVIWIDFLSKCDKSCGMKVANRLNVKPSM

SEQ ID NO: 19892 - protein, 270 aa, Secale cereale
ERIPERVVHARGASAKGFFEVPHDVSQLTCADFLGAPGVQTPVIVRFSTVVHDRGSPETLRDPRGFAVKFYTREGNFDLVGNNMPVFFIRDGMKFPDMVHAFKPSPKTNMQENWRIVDFSSHHPESLHMFTFLFDDVRIPLNYRHMDGFGVNTYTFISSDGKAHLVKFHWKPTCGVKCLLDDDAVTVGGTCHTHATKDLTDSIAAGNYPVWKVFIQTVDADHEDKFDFDPLDVTKTWPEDIIQLQPVGRMVLNKNIDNFFAENEQLAFCS

SEQ ID NO: 19893 - protein, 492 aa, Triticum aestivum
MDPYKHRPTSGANSGYWTTNSGAPVWNNNNALTVGQRGPILLEDYHLIEKLAQFDRERIPERVVHARGASAKGFFEVTHDVSQLTCADFLRAPGVQTPVIVRFSTVVHERGSPETLRDPRGFAVKFYTREGNFDLVGNNMPVFFIRDGMKFPDMVHAFKPSPKTNMQENWRIVDFFSHHPESLHMFTFLFDDVGIPLNYRHMDGFGVNTYTLISRDGKAHLVKFHWKPTCGVKCLLDDEAVTVGGTCHTHATKDLTDAIAAGNYPEWKLFIQTIDADHEDKFDFDPLDVTKTWPEDIIPLQPVGRMVLNKNIDNFFAENEQIAFCPAIIVPGIHYSDDKLLQTRIFSYADTQRHRLGPNYLMLPVNAPKCAHHNNHHEGFMNFMHRDEEVNYFPSRFDPTRHAEKVPIPPRVLTGCREKCIIEKENNFKQAGERFRSFDPARQDRFIQRWVDALSDPRVTHEHHTIWINYWSQCDASLGQKLASRLNLKPNM

SEQ ID NO: 19894 - protein, 544 aa, Triticum aestivum
MDPYKVCTPPILPQPTRSRQLAGPDRRFGCPCRPAIRSSDALGFPGFLCCSQMDPYKHRPTSGANSGYWTTNSGAPVWNNNNALTVGQRGPILLEDYHLIEKLAQFDRERIPERVVHARGASAKGFFEVTHDVSQLTCADFLRAPGVQTPVIVRFSTVVHERGSPETLRDPRGFAVKFYTREGNFDLVGNNMPVFFIRDGMKFPDMVHAFKPSPKTNMQENWRIVDFFSHHPESLHMFTFLFDDVGIPLNYRHMDGFGVNTYTLISRDGKAHLVKFHWKPTCGVKCLLDDEAVTVGGTCHTHATKDLTDSIAAGNYPEWKLFIQTIDADHEDKFDFDPLDVTKTWPEDIIPLQPVGRMVLNKNIDNFFAENEQLAFCPAITVPGIHYSDDKLLQTRIFSYADTQRHRLGPNYLMLPVNAPKCAHHNNHHDGLMNFMHRDEEVNYFPSRFDPTRHAEQYPIPPRVLSGCREKCIIEKENNFKQAGERYRSFDPARQDRFLQRWVDALTDARVTHEIQGIWVSYWSQCDTSLGQKLASRLKIKPSM

SEQ ID NO: 19895 - protein, 492 aa, Triticum aestivum
MDPYKHRPTSGANSGYWTTNSGAPVWNNNNALTVGQRGPILLEDYHLIEKLAQFDRERIPERVVHARGASAKGFFEVTHDVSQLTCADFLRAPGVQTPVIVRFSTVVHERGSPETLRDPRGFAVKFYTREGNFDLVGNNMPVFFIRDGMKFPDMVHAFKPSPKTNMQENWRIVDFFSHHPESLHMFTFLFDDVGIPLNYRHMDGFGVNTYTLISRDGKAHLVKFHWKPTCGVKCLLDDEAVTVGGTCHTHATKDLTDSIAAGNYPEWKLFIQTIDADHEDKFDFDPLDVTKTWPEDIIPLQPVGRMVLNKNIDNFFAENEQLAFCPAITVPGIHYSDDKLLQTRIFSYADTQRHRLGPNYLMLPVNAPKCAHHNNHHDGLMNFMHRDEEVNYFPSRFDPTRHAEQYPIPPRVLSGCREKCIIKKENNFKQAGERYRSFDPARQDRFLQRWVDALTDARVTHEIQGIWVSYWSQCDASLGQKLASRLKMKPNM

SEQ ID NO: 19896 - protein, 492 aa, Triticum aestivum
MDPYKHRPTSGANSGYWTTNSGAPVWNNNNALTVGQRGPILLEDYHLIEKLAQFDRERIPERVVHARGASAKGFFEVTHDVSQLTCADFLRAPGVQTPVIVRFSTVVHERGSPETLRDPRGFAVKFYTREGNFDLVGNNMPVFFIRDGMKFPDMVHAFKPSPKTNMQENWRIVDFFSHHPESLHMFTFLFDDVGIPLNYRHMDGFGVNTYTLISRDGKAHLVKFHWKPTCGVKCLLDDEAVTVGGTCHTHATKDLTDAIAAGNYPEWKLFIQTIDADHEDKFDFDPLDVTKTWPEDIIPLQPVGRMVLNKNIDNFFAENEQLAFCPAVTVPGIHYSDDKLLQTRIFSYADTQRHRLGPNYLMLPVNAPKCAHHNNHHDGLMNFMHRDEEVNYFPSRFDPTRHAEQYPIPPRVLSGCREKCIINKENNFKQAGERYRSFDPARQDRFLQRWVDALTDARVTHEIQGIWVSYWSQCDASLRQKLASRLKMKPNM

SEQ ID NO: 19897 - protein, 492 aa, Triticum aestivum
MDPYKHRPTSGANSAYWTTNSGAPVWNNNNALTVGHRGPILLEDYHLIEKLAQFDRERIPERVVHARGASAKGFFEVTHDVSQLTCADFLRAPGVQTPVIVRFSTVVHERGSPETLRDPRGFAVKFYTREGNFDLVGNNMPVFFIRDGMKFPDMVHAFKPSSKTNMQENWRVVDFFSHHPESLHMFTFLFDDVGIPLNYRHMDGFGVNTYTLISRDGKAHLVKFHWKPTCGVKCLLDDEAVTVGGTCHTHATKDLTDSIAAGNYPEWKLFIQTIDADHEDRFDFDPLDVTKTWPEDIIPLQPVGRMVLNKNIDNFFAENEQLAFCPAVTVPGIHYSDDKLLQTRIFSYADTQRHRLGPNYLMLPVNAPKCAHHNNHHDGLMNFIHRDEEVNYFPSRVDPTRHAEKDPMPPRVLSGCREKCIIDKENNFKQAGERYRSFDPARQDRFLQRWVDALTDARVTHEIQSIWVSYWSQCDASLGQKLASRLKIKPNM

SEQ ID NO: 19898 - protein, 492 aa, Triticum aestivum; identical to SEQ ID NO: 19897

SEQ ID NO: 19899 - protein, 506 aa, Acinetobacter calcoaceticus
MNDDTKKCPFSQLTTDFGAPVVDNQNSMTAGARGPLLAQDLWLNEKLANFVREVIPERRMHAKGSGAFGTFTVTHDITQYTRAKIFSEIGKKTEMFARFTTVAGERGAADAERDIRGFALKFYTEEGNWDMVGNNTPVFFLRDPRKFPDLNKAVKRDPKTNLRSATNNWDFWTLLPEALHQVTIVMSDRGIPASYRHMHGFSSHTYSFINSVNERFWVKFHFRTQQGIKNLTDAEAGELVGHDRESHQRDLFDAIERKDFPKWTLYVQVMPEQDAEKVPYHPFDLTKVWPHGDYPLIEVGEFELNRNPENFFLDVEQSAFAPSNLVPGISASPDRMLQARLFNYADAQRYRLGVNYQQIPVNAARCPVHSNHRDGQGRIDANYGGLPHYEPNSFGQWQEQPQYKEPPLKINGDADFWNYREDDNDYFSQPRALFELMTPEQQQALFDNTERAMGDALDFIKYRHIRNCYACHPAYGEGVAKALGLTVENAQAARETDPARGLPSFI

SEQ ID NO: 19900 - protein, 500 aa, Neisseria gonorrhoeae
MTTSKCPVTHLTMNNGAPVADNQNSLTAGTRGPLLTQDLWLNEKLADFVREVIPERRMHAKGSGAFGTFTVTRDITKYTRAKIFSEVGKKTEMFGRLATVAGERGADAYTRVRGFALKFYTEEGNWDVVGNNTPVFYPDLRKFPDLNKAVKRSAHQYSSATNNWDFWALLPEALHQVTIVMSDRGIPASYRHMHGFGSHTYSLWNEAGERFWVKFHFRSQQGIKNLTNEEAAKIIADDRESHQRDLYEAIERGEFPKWTMYIQVMPEADAAKVPYHPFDLTKVWPKKDYPLIEVAEFELNRNPENFFADVEQSAFAPSNLVPGIGASPDKMLQARLFNYADAQRYRLGVNFRQIPVNRPRCPVHSNQRDGQGRATELRQPAHYEPNSFGQWSQQPDFAEPPLKINGDAAHWDYRQDDDDYFSQPRALFNLMNDAQKQALFDNTAAAMGDAPDFIKYRHIRNCYRCDPAYGEGGSKALGLTVEEPQAARATDPALGQGGLL

SEQ ID NO: 19901 - protein, 265 aa, Digitalis lanata
PTCGVKCLLEEEAIKVGGANHSHATQDLYDSIAAGNYPEWKLFIQTIDPDHEDRFDFDPLDVTKTWPEDILPLQPVGRMVLNKNIDNFFAENEQLAFCPAIVVPGVYYSDDKLLQTRIFSYSDTQRHRLGPNYLQLPANAPKCAHHNNHHEGFMNFMHRDEEVNYFPSRYDPCRHAERFPHPPVALNGKRDRICIEKENNFKQPGEKYRSFPPDRQERFIKRWVDALSDPRLTHEIRSIWVSYWTQADKSLGQKLASRLNIRPTM

SEQ ID NO: 19902 - protein, 730 aa, Aspergillus niger
MRHFWLLPAVAGIAGAQCPYLSGEMSFTQEQDNAGDTIEVTEQPIDNTLYVNDTGSYMTTDFGTPISDQTSLKAGPRGPTLLEDFIFRQKLQRFDHERVPERVVHARGAGAYGTFKSYADWSNVTAADFLSANDKETPMFCRFSTVVGFRGSVDTARDVHGHACRFYTDEGNYDIVGINFAPFFIQDAIQFPDLVHAIKPMPNNEIPQAATAHTSAWDFFSQQSTALHSALWLMSGNGIPRSFRHMNGYGVHSFRFVAANGTSKVVRTPWKSQQGVASLVWDEAQAAAGKNSDYHRQDLYNAMPNGHYPKYELQAQIMDEADMLRFGFDLLDPTKLVPEEVVPYTPLGMMELNANPTNYFAEVEQAGFQPGHVVPGIDFTDDPLLQGRLFSYLDTQLTRHGGPNFEQIPVNRPRKPVHNNNRDGFGQQQIPTNNWAYTPNSMSNGYPMQANQTQGHGFFTAPYRYASGHLVRQTSPTFNDHWSQPAMFWNSLIPAEQQMVVNAIVFENSKVNSPHVRKNVVNQLNMVNNNLAVRVARGLGLDEPSPNPTYYTSNKTSNVGTFGKPLLSIEGLQVGFLASNSHPESIKQGQAMAAQFSAAGVDLNIVTEAYADGVNTTYALSDAIDFDALIIADGVQSLFASPALANQMNSTATSTLYPPARPFQILVDSFRYGKPVAAVGSGSVALKNAGIDSSRSGVYTGSSETTEKIAKEVLEGLYTFRFVDRFALDE

SEQ ID NO: 19903 - protein, 747 aa, Aspergillus oryzae
MANIVAGGLHKVQEAVQGAASKDKKLVDLAPDTHNVQSSKEPLTTDHGVRISDTDHWLKEVNDNHTGPMMLEDQIAREKIHRFDHERIPERVVHARGTAAFGNFKLHESAEDVSYAGILTDTSRNTPVFLRFSTVQGSKGSADTVRDVRGFAVKFYTDEGNWDLVGNNIPVFFIQDAIKFPDFVHAVKPEPHNEVPQAQTAHNNFWDFVYLHPEATHMFMWAMSDRAIPRSYRMMQGFGVNTFSLINKEGKRHFVKFHFIPHLGVHSLVWDEALKLAGQDPDFHRKDLMEAIDNGAYPKWDFAIQVIPEEKQDDFEFDIFDATKIWPEELVPLRVIGELELNRNVDEFFPQTEQVAFCTSHIVPGIDFSDDPLLQGRNFSYFDTQISRLGINWEEIPINRPVCPVLNHNRDGAKRHRIAQGTVTTWSNRSEAGPPAPVEHGGFASYPAKLNGIKKRGLSPKFREHHNQAQLFYNSLSEHEKVHVKKAFGFELDHCDDPIVYERLAGHRLAEIDLTLAQEVAELVGAPIPDKALRPNHGKRSKHLSQTEFPGKQPTIASRRIAIIIGDGYDPVAFNGLKGAITAVGALPFVIGTKRSPIYADGEDKSSSKGVIADHQYDGQRSTMFDATFIPGGPHVESLKANGQIRYWIIETFGHLKALGATGEAAAFIKEALGSALDVKVATSDNPQPVEWYGVVTAGKIHKPESFKEGIQIVKDAKDFISTFFYQISQHRNYKRELDGLASTVAF

SEQ ID NO: 19904 - protein, 725 aa, Aspergillus oryzae
MRALSLASLIGIASAACPYMTGELERRDTGTDDATAATEEFLSQYYMADNDTFLTSDVGGPIEDQNSLQVGDRGPTLLEDFIFRQKIQRFDHERVPERAVHARGVGAHGVFTSYGDYSNITAASFLGAEGKETPVFVRFSTVAGSRGSSDLARDVHGFATRFYTDEGNFDIVGNNIPVFFIQDAILFPDLIHAVKPRGDNEIPQAATAHDSAWDFFSQQPSSLHTLLWAMSGHGIPRSLRHVDGFGIHTFRFVTDNGDSKLVKFHWKSLQGKASMVWEEAQQVSGKNPDFMRQDLFEAIEAGRYPEWELGVQIMDEEDQLKFGFDLFDPTKIVPEEYVPITKLGKMTLNRNPRNYFAETEQVMFQPGHIVRGVDFTEDPLLQGRLFSYLDTQLNRHGGPNFEQLPINQPRVPVHNNNRDGAGQMFIPLNPNAYSPNTLNKGSPKQANQTVGKGFFTAPGRESTGRFTRAVSPSFEDVWSQPRLFYNSLTPAEQQFVVDAIRFENSNVKSSVVRNNVIIQLNRVSNDLARRVARAIGVEEPEADPTYYHNNKTTDVGTFGQKLKKLDGLKVGFLASVETPASIEAASELSKQLSEDGVDVVVVAERLSDGVDQTYSGSDAIQFDAVIVAPGAEGLFSTFSFTAPSNATSSSTLFPAGRPLQIVIDGFRFGKPVGAVGSAATALKNAGIQTSRDGVYVDKSVTSGFVDGIKDGLRTFKFLDRFKLDH

SEQ ID NO: 19905 - protein, 696 aa, Penicillium janthinellum
TASGKLQRKFLDRFAISMGRGVALGKTYGTLGAASRGATLLQDLLFTEIIFAFDRERVPERAVHARGTGAHGTFLSYEDWSNLTAASFLSAEGKFTPEMTRFSTVSGARGSADTARDVHGFATRFYVDEGNFDIVGNNIPVFFIWDVIIEPTLMALHAQKPNPRFHLPRGQQDPNRISDNLTARGDSLAQGSQISSERGSPKAYSNTEPNKHRSFRLVTDNGKQFQCSNHWQPLQGFIDLGVEEAWRFPEEGEGYVAENLFESIELLTVGDEELEIQSMSFNNDLRERFNSSEVTKSSVVRLVPLITQGKLVFNKNIQMLFNEVIGAMFQPGHIVRGVDFTEDPLLQGRLFSYLDTQLNRHGPNIQQLGFNRPPRAPIHNNNRDGAGEMIDLPPFASFVETQEWGAKDIKQTAVGQNKFDQEHRFSHWKFGVNGFVHTRNDDNVTHARGFFTAPERGQQKKRVAAFDRMFTVVGLSVDGQQANSDQYADFDAAAGKKVAKAIGVEAPKPNSNYFHPTDVFGEHIAASGTKYGVPEGNTKGVLLASVNKPASIAQGAKLQVVASSGDFAEFFISAKQLNMREVTQGIIPLVPVLKLAKLDLGKTFRFQLMQVGNIEELERFGFDLPDLTDKQVDLSAMGMFETTFRPTSRAAQFEQGKTKLVKGLQGKNAFMDRALKQPSNNREKIQRFADRFAVQD

SEQ ID NO: 19906 - protein, 670 aa, Penicillium janthinellum
AAAQRRQNDSSVFLAIMVAAAVESESSLTDGDAGALLLQDISEWDEVFRFDRLEAVERAAHAAAAAAFGAFVARGDWTASAAAAFQAAGKQIAFMAAFSTVAGAKGSATVRDADAFAAKFASAAALQELVGNNSPISFFIFDLLFAAILFASKAKAANQAAFAAAAELAAESLFVRLPSLHQVSFFALAGFAAVAAHRHMNGYGSHTFKLVAKDGSVYCSKFWYKADQGQAAEVWKDAEEVAAEDVDYFRDLNFQAEAAGRYPLWELASQVMTFSDFEIDPFNENIPTKVVPRESVPLIVDAELLLNRNPLNMFAEVEQVFMDVAAASKGADEVEDPLIQRQFAYIDTHLSELTASYGIPVCRPYATVLNDQEDGARYDDVQDVLVIAPNAFSASAVEVQIPAAAAFNLAAARVAAAGDVRVNAVVEADQRKQSRQFWASDVNAQKKRLVDAFRMEVASAVSASIQVDVTVEFSFVAAAAAARIAAAVGSAAAGALANRRQIKVIASLAVLAKADAKVRQKNALESSSQAVAVDAKAAAQDIVDSSDAANVVTVAREFAVLPQTAAADAAEFVAAASAKAFSSFPAMEVISVAAAAGAVAEPARASLDLNMAMFFSRIVASRGAAANAIAALVKASRDGVFVAAVLAKAAANNRAAEAIFKFEVRQAVDA

SEQ ID NO: 19907 - protein, 716 aa, Claviceps purpurea
MVRTSLAAFSLAVAGLASAQCPFADPGRLAARAQGLDESSRGHLAGFEVDDSEGYLTSDVGGPIEDQNSLKAGDRGPTLLEDFIFRQKITHFDHERVPERAVHARGTGAHGTFTSYGDYSNITAASFLGQKDKKTPVFVRFSTVAGSRGSADTARDVHGFAVRLYTDEGNFDIVGNNVPVFFIQDAIQFPDLIHSVKPRQDNEIPQAATAHDSAWDFFSQQTSTLHTLFWAMAGYGIPRSLRHMDGFGVHTYRLVTDDGTSKLVKWHWKSKQGKASLVWDEAQRAAGKNADYHRQDLFDAIQSGNYPEWELNLQIINEDQALAFGFDVLDPTKIIPEEYAPLMPVGVMRLDANPSNYFAETEQVMFQPGHIVRGVDFTEDPLLQGRIFSYLDTQINRHGGPNFEQLPINRPVVPIHNNNRDGAGQNFIHKNNAPYTPNTLNKGFPKQANQKEGKGFFTAPGRKVSGSLQRRLSNTFLDHWTQPRLFFNSITPIEQQFLINAIRFETSHLSQVVQKNVLAQLNKISHDVAVRVGKALGLDAPPADDKYYHNNQTKGLSIFGEELPTIATLIVGVLASTASKNSLAQAQALKDAFKTREVNVIVVAESLATGVDQTYDAADAVSFDGIVVADGVEALFDNTKKSSLFQPGRPSQIVNDGYNWGKPMGFLGSAKRAVKATSVVEGAGVYMRNSTATLVGDFQKGLAKFKFTDRFPMDTK

SEQ ID NO: 19908 - protein, 736 aa, Podospora anserina
MASYLPSMEKVQHAVLGPRGGDKVADLQKETKEMSDKARLTTDYGVKQTSADDWLKIVNNDKTGPMLLEDPFARERIHRFDHERIPERVVHARGSGAFGKFKLFESAEDVTFAPILTDTSRETPIFIRFSTVLGSRGSADTVRDVRGFAIKFYTQEGNWDIVANNIPVFFIQDAIKFPDVIHAGKPEPHNEVPQAQTAHNNFWDFQYNHTEATHMFMWAMSDRGIPRSYRMMQGFGVNTFTLINAKGERHFVKFIFTPELGVHSLIWDEALKLAGQDPDFHRKDLWEAIENGVFPKWKFGIQVIPEADEHKFDFDILDATKIWPEDLVPVRYIGEFELNRNPDEFFPQTEQVAFCTSHIVPGIGFSDDPLLQGRNFSYFDTQLSRLGINWQELPINRPVCPVMNFNRDGAMRHTITKGTVNYWPNRFEKVKPATHEEGGYVEYAEKVAGIKARARSAKFKEHFAQAQLFWNSMSAVEKNHIINALGFELDHCEDPVVYERMVTRLADIDLGLAQTVAEMVGGEPPKEASRPNHGRKAPGLSQTEFPGSKPTIASRRIAILVADGYDQVAYSAAYAAISAGLAIPLVIGTKRSKIVAAGGAGSTTPHHHLEGFRSTMVDAIFIPGGVDSIRALSKNGRALHWIREAFGHLKAIGATGEAVDLVNKAIGLPAVSVSESAEVQDSYGVVTMRETKPGSLSEAVDIVKAGAGFMEKFFHNIAQHRCWARELDGLHSQVAY

SEQ ID NO: 19909 - protein, 726 aa, Podospora anserina
MKRLLTWATLVGSMSAVTKAACPFADPNYHLAKRDEGASQQTENILEEYEVDDSNAYMSSDVGGPMEDQNSLKAGYRGSTLMEDWIFRQKIQHFDHERIPERAVHARGAGAHGTFTSYADWSNITAASFLGGAGKKTPVFVRFSTVAGSRGSADTARDVHGFATRFYTDEGNFDIVGNNIPVFFIQDAIRFPDLIHSVKPSPDNEVPQAATAHDSAWDFFSQQPSTMHTLFWAMSGNGIPRSYRHMDGFGVHTFRFVTDDGNSKLIKWHFKTKQGKASLVWEEAQVLAGKNADFHRQDLWDAIESGNGPEWELSVQIVDEEKALAFGFDLLDPTKIIPEELAPLVPLGIMKLDRNPTNYFAETEQVMYQPGHIVRGVDFTEDPLLQGRLFSYLDTQLNRNQGGPNFEQIPINRPVSPVHNNNRDGAGQMLIHKNVYPYTPNTLNGGYPLQANQTHGKGFFTAPNRIVDGKLVRALSPTFDDHWSQPRLFYNSLTRVEQQFLINAIRFEASHLKNEQVKKNVLEQINRVSNDVAKRVAVALGLEAPAPDPAFYHNNVTAGLSIFNGTLPTIATLRVGVLASSFNDGSLAQARELKEQLSKEGVVVTVVGEVLKEGVDQTYSAADATGYDAVVVTDGAEGLLTGGKNSPLFPAGRPGQILVDSYRWGKPVAAVGENSGQALEQTVGVSRGQDEGVVVGEGVEQVVKGVEEGLRVFRYLGRFPVDEGAE

SEQ ID NO: 19910 - protein, 482 aa, Bordetella pertussis
MNAMTNKTLTTAAGAPVADNNNTMTAGPRGPALLQDVWFLEKLAHFDRERIPERVVHAKGSGAYGTFTVTHDISRYTRARIFAEVGKQTPLFLRFSTVAGERGAADAERDVRGFAIKFYTDEGNWDLVGNNTPVFFIRDPLKFPDFIHTQKRDPKTNLRNATAAWDFWSLNPESLHQVTILMSDRGLPQNYRQQHGFGSHTYSFVNDAGERFYVKFHFKSQQGIACYTDGEAAELVGRDRESAQRDLFQNIEQGQFPRWTLKVQVMPEAEAATYHINPFDLTKVWPHADYPLIEVGVLELNKNPENYFAEVEQAAFTPANVVPGIGFSPDKMLQGRLFSYGDTHRYRLGINHHQIPVNAPRCPFHSFHRDGMGRVDGNGGATLNYEPNSFGEWREAKHAAEPPLALDGQAADRWNHRVDEDYYSQPGALFRLMNDDQKQQLFGNIGRHMAGVPEEIQRRQLEHFRRADPAYAAGVAKALGLK

SEQ ID NO: 19911 - protein, 745 aa, Cladosporium fulvum
MATEKISSGLGKLQDQLNGAAEGQKVAHVKNDPLYKDYHEPSNRITTDYGVKQHNTDDWLKIASEDKTGPMLLEDHAAREKINRFDHERIPERVVHARGSAAFGTFKLHKSLEQYTTAGVLTDTSRTTPTFLRFSTVLGSRGSADTVRDVRGFAIKHYTPEGNWDVVGNNIPVFFIQDAIKFPDVIHAGKPEPDNEVPQAQTAHNNFWDFQFMHTEATHMFMWTQSDRAIPRSYRMMQGFGVNTFTLTNAKGERFFVKFHWTPHLGVHSFVWDEALKLAGQDPDFHRKDLWEAIEAKAYPKWDFGVQVISEGEEDNFEFDILDATKVWPEELVPIQYVGELELNRNPDEFFPQTEQVAFCTGHVVPGIGFSDDPLLQGRNFSYQDTQISRLGVNFQELPINRPVCPVMNNNRDGALRHTVTKGKVNYWPNRFEATPPAAAEEKPYLDYPQKVAGMKTRLRSKKFSEHFNQAQLFYNSMSEPEKEHIKFALAFELDHCEDPVVYDRVSQRLADIDLSLAQSVADLVGGQIPQQQGRPNHGKKSKGLSQTEFPGKTPTIETRRIAIIIADGYDLVAYNGIVAAAKACQALPFTIAPRRSPIYAAGESKENSKGVKPDHHLEGMRSTMFDSVFVPGGADSVATLRKNGRALHWVREAFAHLKAIGAVGEAVDFVRNACQLPGMTFSASEEVTDSYGVVTAAKVKPESLSEAVKIGKDAADFVSKYFYEISQHKNFERELKGFPLMVAY

SEQ ID NO: 19912 - protein, 223 aa, Malassezia furfur
RFSTVGGGAGSVDTPRDVRGFSVKFYTGEGNWDLVGNDIPVFFIQDAIKFPDLIHSVKMEADRGYPQAASAHDTFWDWVTLMPEATHVLMWAMSDRGIPRSLRMMEGFGIHTFQLVNENGDAHFVKFHWKPKLGVQSTIWDETTKLQGADNDYHRKDLFEAIENGMFPEWELGIQVFDKKFAEKQPYDVLDSTKLIPEEDIPVQVIGRMVLNRNPDNCFAEIE

SEQ ID NO: 19913 - protein, 502 aa, Toxoplasma gondii
MTQVPPVTFQQYGPVITTSAGNPVDDNQNSVTAGPYGPAILSNFHLIDKLAHFDRERIPERVVHAKGGGAFGYFEVTHDITRFCKAKLFEKIGKRTPVFARFSTVAGESGSADTRRDPRGFALKFYTEEGNWDMVGNNTPIFFVRDAIKFPDFIHTQKRHPQTHLHDPNMVWDFFSLVPESVHQVTFLYTDRGTPDGFRHMNGYGSHTFKFINKDNEAFYVKWHFKTNQGIKNLNRQRAKELESEDPDYAVRDLFNAIAKREFPSWTFCIQVMPLKDAETYKWNVFDVTKVWPHGDYPLIPVGKLVLDRNPENYFQDVEQAAFAPAHMVPGIEPSEDRMLQGRMFSYIDTHRHRLGANYHQIPVNRPWNARGGDYSVRDGPMCVDGNKGSQLNYEPNSVDGFPKEDRNAAVSGTTTVSGTVACHPQEHPNSDFEQPGNFYRTVLSEPEREALIGNIAEHLRQARRDIQERQVKIFYKCDPEYGERVARAIGLPTAACYPAKM

SEQ ID NO: 19914 - protein, 484 aa, Proteus mirabilis
MEKKKLTTAAGAPVVDNNNVITAGPRGPMLLQDVWFLEKLAHFDREVIPERRMHAKGSGAFGTFTVTHDITKYTRAKIFSEVGKKTEMFARFSTVAGERGAADAERDIRGFALKFYTEEGNWDMVGNNTPVFYLRDPLKFPDLNHIVKRDPRTNMRNMAYKWDFFSHLPESLHQLTIDMSDRGLPLSYRFVHGFGSHTYSFINKDNERFWVKFHFRCQQGIKNLMDDEAEALVGKDRESSQRDLFEAIERGDYPRWKLQIQIMPEKEASTVPYNPFDLTKVWPHADYPLMDVGYFELNRNPDNYFSDVEQAAFSPANIVPGISFSPDKMLQGRLFSYGDAHRYRLGVNHHQIPVNAPKCPFHNYHRDGAMRVDGNSGNGITYEPNSGGVFQEQPDFKEPPLSIEGAADHWNHREDEDYFSQPRALYELLSDDEHQRMFARIAGELSQASKETQQRQIDLFTKVHPEYGAGVEKAIKVLEGKDAK

SEQ ID NO: 19915 - protein, 484 aa, Proteus mirabilis
  unsure (1)..(484): unsure at all Xaa locations
MEKKKLTTAAGAPVVDNNNVITAGPRGPMLLQDVWFLEKLAHFDREVIPERRXHAKGSGAFGTFTVTHDITKYTRAKIFSEVGKKTEMFARFSTVAGERGAADAERDIRGFALKFYTEEGNWDMVGNNTPVFYLRDPLKFPDLNHIVKRDPRTNMRNMAYKWDFFSHLPESLHQLTIDMSDRGLPLSYRFVHGFGSHTYSFINKDNERFWVKFHFRCQQGIKNLMDDEAEALVGKDRESSQRDLFEAIERGDYPRWKLQIQIMPEKEASTVPYNPFDLTKVWPHADYPLMDVGYFELNRNPDNYFSDVEQAAFSPANIVPGISFSPDKMLQGRLFSYGDAHRYRLGVNHHQIPVNAPKCPFHNYHRDGAMRVDGNSGNGITYEPNSGGVFQEQPDFKEPPLSIEGAADHWNHREDEDYFSQPRALYELLSDDEHQRMFARIAGELSQASKETQQRQIDLFTKVHPEYGAGVEKAIKVLEGKDAK

SEQ ID NO: 19916 - protein, 484 aa, Proteus mirabilis
  unsure (1)..(484): unsure at all Xaa locations
MEKKKLTTAAGAPVVDNNNVITAGPRGPMLLQDVWFLEKLAHFDREVIPERRXHAKGSGAFGTFTVTHDITKYTRAKIFSEVGKKTEMFARFSTVAGERGAADAERDIRGFALKFYTEEGNWDMVGNNTPVFYLRDPLKFPDLNHIVKRDPRTNMRNMAYKWDFFSHLPESLHQLTIDMSDRGLPLSYRFVHGFGSHTYSFINKDNERFWVKFHFRCQQGIKNLMDDEAEALVGKDRESSQRDLFEAIKRGDYPRWKLQIQIMPEKEASTVPYNPFDLTKVWPHADYPLMDVGYFELNRNPDNYFSDVEQAAFSPANIVPGISFSPDKMLQGRLFSYGDAHRYRLGVNHHQIPVNAPKCPFHNYHRDGAMRVDGNSGNGITYEPNSGGVFQEQPDFKEPPLSIEGAADHWNHREDEDYFSQPRALYELLSDDEHQRMFARIAGELSQASKETQQRQIDLFTKVHPEYGAGVEKAIKVLEGKDAK

SEQ ID NO: 19917 - protein, 484 aa, Proteus mirabilis
MEKKKLTTAAGAPVVDNNNVITAGPRGPMLLQDVWFLEKLAHFDREVIPERRZHAKGSGAFGTFTVTHDITKYTRAKIFSEVGKKTEMFARFSTVAGERGAADAERDIRGFALKFYTEEGNWDMVGNNTPVFYLRDPLKFPDLNHIVKRDPRTNMRNMAYKWDFFSHLPESLHQLTIDMSDRGLPLSYRFVHGFGSHTYSFINKDNERFWVKFHFRCQQGIKNLMDDEAEALVGKDRESSQRDLFEAIERGDYPRWKLQIQIMPEKEASTVPYNPFDLTKVWPHADYPLMDVGYFELNRNPDNYFSDVEQAAFSPANIVPGISFSPDKMLQGRLFSYGDAHRYRLGVNHHQIPVNAPKCPFHNYHRDGAMRVDGNSGNGITYEPNSGGVFQEQPDFKEPPLSIEGAADHWNHREDEDYFSQPRALYELLSDDEHQRMFARIAGELSQASKETQQRQIDLFTKVHPEYGAGVEKAIKVLEGKDAK

SEQ ID NO: 19918 - protein, 524 aa, Caenorhabditis elegans
MPNDPSDNQLKTYKETYPVSLEFKGTDAFSTTTTTIYSNLFQKPQVITTSNGAPIYSKTAVLTAGRRGPMLMQDVVYMDEMAHFDRERIPERVVHAKGAGAHGYFEVTHDISKYCKADIFNKVGKQTPLLIRFSTVGGESGSADTARDPRGFAIKFYTEEGNWDLVGNNTPIFFIRDPIHFPNFIHTQKRNPQTHLKDPNMIFDFWLHRPEALHQVMFLFSDRGLPDGYRHMNGYGSHTFKMVNKDGKAIYVKFHFKPTQGVKNLTVEKAGQLASSDPDYSIRDLFNAIEKGDFPVWKMFIQVMTFEQAEKWEFNPFDVTKVWPHGDYPLIEVGKMVLNRNPRNYFAEVEQSAFCPAHIVPGIEFSPDKMLQGRIFSYTDTHFHRLGPNYIQLPVNCPYRSRAHNTQRDGAMAYDNQQHAPNFFPNSFNYGKTRPDVKDTTFPATGDVDRYESGDDNNYDQPRQFWEKVLDTGARERMCQNFAGPLGECHDFIIKGMIDHFSKVHPDFGARVKALIQKQARSHI

SEQ ID NO: 19919 - protein, 500 aa, Caenorhabditis elegans [sequence omitted]

SEQ ID NO: 19920 - protein, 497 aa, Caenorhabditis elegans
MPNDPSDNQLKTYKETYPKPQVITTSNGAPIYSKTAVLTAGRRGPMLMQDVVYMDEMAHFDRERIPERVVHAKGAGAHGYFEVTHDISKYCKADIFNKVGKQTPLLIRFSTVGGESGSADTARDPRGFAIKFYTEEGNWDLVGNNTPIFFIRDPIHFPNFIHTQKRNPQTHLKDPNMIFDFWLHRPEALHQVMFLFSDRGLPDGYRHMNGYGSHTFKMVNKDGKAIYVKFHFKPTQGVKNLTVEKAGQLASSDPDYSIRDLFNAIEKGDFPVWKMFIQVMTFEQAEKWEFNPFDVTKVWPHGDYPLIEVGKMVLNRNPRNYFAESAFCPAHIVPGIEFSPDKMLQGRIFSYTDTHFHRLGPNYIQLPVNCPYRSRAHNTQRDGAMAYDNQQHAPNFFPNSFNYGKTRPDVKDTTFPATGDVDRYESGDDNNYDQPRQFWEKVLDTGARERMCQNFAGPLGECHDFIIKGMIDHFSKVHPDFGARVKALIQKQARSHI

SEQ ID NO: 19921 - protein, 497 aa, Caenorhabditis elegans
MPNDPSDNQLKTYKETYPKPQVITTSNGAPIYSKTAVLTAGRRGPMLMQDVVYMDEMAHFDRERIPERVVHAKGAGAHGYFEVTHDITKYCKADMFNKVGKQTPLLVRFSTVAGESGSADTVRDPRGFSLKFYTEEGNWDLVGNNTPIFFIRDAIHFPNFIHALKRNPQTHMRDPNALFDFWMNRPESIHQVMFLYSDRGIPDGFRFMNGYGAHTFKMVNKEGNPIYCKFHFKPAQGSKNLDPTDAGKLASSDPDYAIRDLFNAIESRNFPEWKMFIQVMTFEQAEKWEFNPFDVTKVWPHGDYPLIEVGKMVLNRNVKNYFAEVEQAAFCPAHIVPGIEFSPDKMLQGRIFSYTDTHYHRLGPNYIQLPVNCPYRSRAHTTQRDGAMAYESQGDAPNYFPNSFRGYRTRDDVKESTFQTTGDVDRYETGDDHNYEQPRQFWEKVLKEEERDRLVGNLASDLGGCLEEIQNGMVKEFTKVHPDFGNALRHQLCQKKH

SEQ ID NO: 19922 - protein, 512 aa, Caenorhabditis elegans
MPMLPHMVNLTVNDTKPGPMAEDQLKAYRDRNQEPHLLTTSNGAPIYSKTAVLTAGRRGPMLMQDIVYMDEMAHFDRERIPERVVHAKGGGAHGYFEVTHDITKYCKADMFNKVGKQTPLLVRFSTVAGESGSADTVRDPRGFSLKFYTEEGNWDLVGNNTPIFFIRDAIHFPNFIHALKRNPQTHMRDPNALFDFWMNRPESIHQVMFLYSDRGIPDGFRFMNGYGAHTFKMVNKEGNPIYCKFHFKPAQGSKNLDPTDAGKLASSDPDYAIRDLFNAIESRNFPEWKMFIQVMTFEQAEKWEFNPFDVTKVWPHGDYPLIEVGKMVLNRNVKNYFAEVEQAAFCPAHIVPGIEFSPDKMLQGRIFSYTDTHYHRLGPNYIQLPVNCPYRSRAHTTQRDGAMAYESQGDAPNYFPNSFRGYRTRDDVKESTFQTTGDVDRYETGDDHNYEQPRQFWEKVLKEEERDRLVGNLASDLGGCLEEIQNGMVKEFTKVHPDFGNALRHQLCQKKH

SEQ ID NO: 19923 - protein, 497 aa, Caenorhabditis elegans
MPNDPSDNQLKTYKETYPKPQVITTSNGAPIYSKTAVLTAGRRGPMLMQDVVYMDEMAHFDRERIPERVVHAKGAGAHGYFEVTHDITKYCKADMFNKVGKQTPLLVRFSTVAGESGSADTVRDPRGFSLKFYTEEGNWDLVGNNTPIFFIRDAIHFPNFIHALKRNPQTHMRDPNALFDFWMNRPESIHQVMFLYSDRGIPDGFRFMNGYGAHTFKMVNKEGNPIYCKFHFKPAQGSKNLDPTDAGKLASSDPDYAIRDLFNAIESRNFPEWKMFIQVMTFEQAEKWEFNPFDVTKVWPHGDYPLIEVGKMVLNRNVKNYFAEVEQAAFCPAHIVPGIEFSPDKMLQGRIFSYTDTHYHRLGPNYIQLPVNCPYRSRAHTTQREVAMAYESQENAPNSFPNSFRGYRTRDDVKESTFQTTGDVDRYETGDDHNYEQPRQFWEKVLKEEERDRLVGNLASDLGGCLEEIQNGMVKEFTKVHPDFGNALRHQLCQKKH

SEQ ID NO: 19924 - protein, 496 aa, Caenorhabditis elegans
MPNDPSDNQLKTYKETYPKPQVITTSNGAPIYSKTAVLTAGRRGPMLMQDVVYMDEMAHFDRERIPERVVHAKGAGAHGYFEVTHDITKYGKADMFHKVGKQTPLLVRFSTVAGESGSADTVRDPRGFSLKFYTEEGNWDLVGNNTPIFFIRDAIHFPNFIHALKRNPQTHMRDPNALFDFWMNRPESIQVMFLYSDRGIPDGFRFMNGYGAHTFKMVNKEGNPIYCKFHFKPAQPSKNLDPTDAGKLASSDPDYAIRDLFNAIESRNLPEWKMFIQVMTIEQAEKWEFNPFDVTKVWPHGDYPLIEVAKMLLNRNVKNYFAEVEQAAFCPAHIVPGIEFSPDKMLQGRIFSYTDTHYHRLGPNYIQLPVNCPYRSRAHTTQRDGAMAYESQGDAPNYFPNSFRGYRTRDDVKESTFQTTGDVGSLWTGDDHNYEQPRQFWEKVLKEEERDRLVGNLASDLGGCLEEIQNGMVKEFTKVHPDFGNALRHQLCQKKH

SEQ ID NO: 19925 - protein, 541 aa, Ascaris suum
MPQTKGKPHEEQLEQYKNSQTKPFVLTTSNGAPIFNKKASLTVGPRGPLLLQDVVFLDEMAHFDRERIPERVVHAKGGGAHGFFEVTDDITKYCKADVFSTIGKRTPIFIRFSTVGGELGSADTQRDPRGFAIKFYTEEGNWDLVGNNTPIFFIRDPIFFPNFIHTQKRNPVTHLKDPNMMWDFFSLRPETTHQVMILFGDRGIPDGFRHMDGFGSHTFKLVNKDGNAVYCKFHIKTAQGIRNLPPDVAIKLAGEDPDYSIRDLYDSIENGNYPVWRLMIQVMTFEEAANYRFNPFDITKVWSHKEFPLILVGKIVLNKNPTNYFAEVEQIAFAPSHVVPGIEFSPDKMLQGRLFAYPDTQFHRLGPNYVQLPINCPYRSRAHNTQRDGCFALDYNQGGMPTYHPNSFNGAIERTDVKESAWSVSGDVDRFNGDDEDNFSQPRDLWLKVMDETERARLVDNIADSLKYCKAFIQERAINNFTQVHQDFGNALRNALQKANEAMQKKREEEAEFNAKESVMMPCAIDDRMKNISNLAKYCKY

SEQ ID NO: 19926 - protein, 552 aa, Edwardsiella tarda
MAGMVIYPIVNIDFLQFLEKTQLNKPSQHATTTEESAMNIVNGINGLIAKKNVLFFLTSLAISPSVLADTLTRDNGAPVGDNQNSQTAGPNGPVMLQDVQLLQKLQRFDRERVPERVVHARGTGAHGVFTPTADISDLTVAKVFTPGSTTPVFVRFSSVVHGTHSPETLRDPRGFATKFYTAEGNWDLVGNNFPTFFIRDAIKFPDMVHAFKPDPRTNLDNDARRFDFFSHLPESTRTLTLLYSNEGTPLSYRNMDGNSVHAYKLINDKGESPLCEVHWKTRQGIKNLDPQQVEQIQGKDYSHMTQDLVTAINRGDYPKWDLYIQVLRPADLKNFDFDPLDATKAWPDVPERKIGEMVLNKNPDNVFQETEQVAMAPSNLIPGIEPSEDKLLQGRLFAYADTQFYRIGANGLSLPINKPHSVVNNGNQDGQLNSGHTLDKGVNYQPSRIYPREELVSSRYSQTPLSGTTQQSKIQREQNFKQAGELYRSYSKKEQNDLINSLGTSLASADTVSKNIMLSYFYKADKDYGTRLTSVANGDLPTVKNLADKLQD

SEQ ID NO: 19927 - protein, 131 aa, Edwardsiella tarda
VTAINRGDYPKWDLYIQVLKPADLKNFDFDPLDATKVWPDVPERKIGEMVLNKNPDNVFQETEQVAMAPSNLIPGIEPSEDKLLQGRLFAYADTQFYRIGANGLSLPINKPHSVVNNGNQDGQLNSGHTLD

SEQ ID NO: 19928 - protein, 497 aa, Nostoc punctiforme
MTEPQNLTTADGIPVSDNQNSLTAGARGPVLIQDFHLIEKLAHFNRERIPERVVHAKGAAAHGTLTITNDITRYSKAKLFSEIGKKTELILRFSTVGGEKGSADAERDPRGFSLKFYTEEGNWDLVGNNTPIFFIRDPLKFPDFIHTQKRNPQTNCKDQNAKWDFWSLSPESLHQVTILFSDRGIPKTHRHMDGFGSHTFSLINAEGDRVWCKFHFKTLQGHQTLTEEESAKIKGEDPDHATHDLFEAIAKKDYPKWRMCIQVMTEEQAEKHPDNPFDLTKVWKQGEYPLIEVGILELNRNPENYFAEVEQAAFSPSAVVPGVSFSPDKMLQARIFSYPDAQRYRLGGNYQQLPVNQPKCPVMHYQRDGFMASGNNGGSVPNYEPNSAEGTPKENPAYAEPPSHLGDVTVDRYSHREGNDDYTQAGNLYRLLTPEQQERLAKNIVGSLSQAREDIQMRQLCHFFRADVSYGRRVAEGLGIAIDPSMFSHDAQPVGNW

SEQ ID NO: 19929 - protein, 85 aa, Oryza barthii
KARYVKFHWKPTCGVSCLMDDEATIVGGKNHSHATQDLYDSIAAGNFPEWKLFVQVIDPEEEERFDFDPLDDTKTWPEDEVPLRP

SEQ ID NO: 19930 - protein, 492 aa, Hypericum perforatum
MDPYKYRPSSAFNSPFWTTNSGAPVYSNDHSLTVGSRGPILLEDYHLVEKLANFDRERIPERVVHARGASAKGFFEVTHDISHLSCADFLRAPGVQTPVIVRFSTVIHERGSPETLRDPRGFAVKFYTREGNFDLVGNNFPVFFIRDGMKFPDMVHALKPNPKSHIQEDWRILDFFSHHPESLHMFSFLFDDIGIPQDYRHMEGSGVNTYTLVNKAGKVHYVKFHWKPTCGVKSLLEDEAIKVGGSNHSHATKDLYDSIAAGNYPEWKLFIQTIDPDHEDRFDFDPLDVTKTWPEDILPLQPVGRLVLNKNIDNFFAENEQLAFCPAIVVPGIYYSDDKLLQTRIFSYSDTQRHRLGPNYLQLPVNAPKSAHHNNHHEGFMNFMHRDEEVNYFPSRYDPVRHAEKYPIPPVVLNGRREKCMIAKENNFKQPGERYRSFSPDRQERFLNRWISSLSDPRVTHEIRAIWVTYWYQADKSLGQKLASRLNVRPNM

SEQ ID NO: 19931 - protein, 492 aa, Soldanella alpina
MDPYKYRSSSAFNTPFWTTNSGAPVWNNNSSLTVGTRGPILLEDYHLVEKLANFDRERIPERVVHARGASAKGFFEVTHDISHLTCADFLRAPGVQTPVIVRFSTVIHERGSPETLRDPRGFAVKFYTREGNFDLVGNNFPVFFVRDGMKFPDMVHALKPNPKSHIQENWRILDFFSHHPESLHMFTFLFDDLGVPQDYRHMEGSGVNTYTLINKAGKAQYVKFHWKPTCGVKCLLEDEAIKVGGANHSHATKDLYDSISAGNYPEWKLFIQIIEPDHEDKFDFDPLDVTKTWPEDIIPLMPVGRLVLNKNIDNFFAENEQLAFCPALIVPGVYYSDDKLLQTRIFSYADTQRHRLGPNYLQLPPNAPKCAHHNNHHEGLMNFMHRDEEVNYFPSRFDPVRHAERHPIPPPVLTGKRDRCMIEKENNFKQPGERYRTFAPDRQERFVCRWVDALSDPRVTHEIRSIWISYWTQADKSLGQKLASRLNVRPTM

SEQ ID NO: 19932 - protein, 567 aa, Vibrio cholerae
  unsure (1)..(567): unsure at all Xaa locations
MISKNMRSHLKLSFKSIFSIKFIVISHLVKRVIYPYILAGQKRAFDFFILRNVGQNGRSHWRATMHMSKSFLIISMGFVAVSVQAQTLTRDNGAPVGDNQNSITAGEHGSVLLQDVHLIQKLQRFARERIPERVVHARGTGAHGEFVASGDFSDLTLSAPFTSKGKITPVFVRFSTVIHSKGSPETLRDPRGFATKFYTEQGNWDLVGNNLPVFFIRDSIKFPDMVHSLKPSPVTNLQDPNRFFDFFSHEPGSTHMLTWVYTNLGTPASYRTMDGFGVHAYKWINQKGDVNYVKFHWKSLQGIESLRPDEVVKVQGQDFNHLTNDLYTQINAGNHPKWDLYVQVLTPEQLSKLDYNGLDATKVWLDVPEKKVGTMTLNKVPDNFFLETEQSAFAPSNLIPGIEPSEDRLLQGRLFAYADTQLYRLGANLFQLPINRPLVEVNSHNQEGASNSAQTASDINYQPSRKLELKEDPQFKAVQTQLVGSVQQKAISNPRNFYQAGVLYRSLNEQDKQDLITNLXGXLNKVTDKEIKATMVSHFYRADKDYGTRLARATNTDLKQVAKLAAM

SEQ ID NO: 19933 - protein, 567 aa, Vibrio cholerae
  unsure (1)..(567): unsure at all Xaa locations
MISKNMRSHLKLSFKSIFSIKFIVISHLVKRVIYPYILAGQKRAFDFFILRNVGQNGRSHWRATMHMSKSFLIISMGFVAVSVQAQTLTRDNGAPVGDNQNSITAGEHGSVLLQDVHLIQKLQRFARERIPERVVHARGTGAHGEFVASGDFSDLTLSAPFTSKGKITPVFVRFSTVIHSKGSPETLRDPRGFATKFYTEQGNWDLVGNNLPVFFIRDSIKFPDMVHSLKPSPVTNLQDPNRFFDFFSHEPGSTHMLTWVYTNLGTPASYRTMDGFGVHAYKWINQKGDVNYVKFHWKSLQGIESLRPDEVVKVQGQDFNHLTNDLYTQINAGNHPKWDLYVQVLTPEQLSKLDYNGLDATKVWLDVPEKKVGTMTLNKVPDNFFLETEQSAFAPSNLIPGIEPSEDRLLQGRLFAYADTQLYRLGANLFQLPINRPLVEVNSHNQEGASNSAQTASDINYQPSRKLELKEDPQFKAVQTQLVGSVQQKAISNPRNFYQAGVLYRSLNEQDKQDLITNLXGBLNKVTDKEIKATMVSHFYRADKDYGTRLARATNTDLKQVAKLAAM

SEQ ID NO: 19934 - protein, 482 aa, Vibrio fischeri
MSKKLTTAAGCPVAHNQNVQTAGKRGPQLLQDVWFLEKLAHFDREVIPERRMHAKGSGAYGTFTVTHDITKYTKAKLFSEIGKQTELFARFTTVAGERGAADAERDIRGFALKFYTEEGNWDLVGNNTPVFFLRDPLKFPDLNHAVKRDPRTNMRSAKNNWDFWTSLPEALHQVTIVMSDRGIPATYRHMHGFGSHTFSFINSDNERFWVKFHFKSQQGIKNLSDAEAAQVIGQDRESHQRDLLESIDNQDFPKWTLKVQIMPEADAATVPYNPFDLTKVWPHKDYPLIEVGEFELNRNPQNFFAEVEQSAFNPANVVPGISFSPDKMLQGRLFAYGDAQRYRLGVNHQHIPVNAPRCPVHSYHRDGAMRVDGNFGSTLGYEPNNEGQWAEQPDFAEPALNLDGAAAHWDHREDEDYFSQPGDLFRLMTAEQQAILFDNTARNLNGVPKEIQLRHLRHCYKADPAYGEGIGKLLDIDVSEFN

SEQ ID NO: 19935 - protein, 492 aa, Zantedeschia aethiopica
MDPYRQRPSSAFNSPFWTTNSGAPVWNNNNSLTVGARGPILLEDYHLLEKLAQFDRERIPERVVHARGASAKGFFEVTHDVSHLTCADFLRAPGVQTPVIVRFSTVIHERGSPETLRDPRGFAVKFYTREGNFDLVGNNFPVFFIRDGIKFPDMVHALKPNPKTHIQENWRILDFFSHHPESLHMFTFLFDDIGIPTDYRHMDGSGVHTYTLVSKEGKAHYVKFHWKPTCGVKSLLDDEAVVVGGANHSHATKDLTDAIAAGNYPEWKLYIQIMDPDHEDRFDFDPLDVTKTWPEDILPLQPVGRMVLNKNIDNFFAENEQLAFCPAIIVPGIYYSDDKLLQTRIFSYADTQRHRLGPNYLMLPANAPKCAHHNNHHEGFMNFMHRDEEVNYFPSRYDPVRHAEQFPIPPRILNGGREKCCIQKENNFKQPGEKYRSWAPDRQERFIKRWIDALSDPRVTHEIRTIWITYWSQCDKFLGQKLASRLNIKPTL

SEQ ID NO: 19936 - protein, 484 aa, Actinobacillus actinomycetemcomitans
MSAKCPFDHNSATLTTAAGAPVVDNDNTMSAGPRGPLLLQDVWYQEKLAHFARERIPERVVHAKGSAAFGTFTVTHDITQYTKAALFSEVGKQTEVLLRFSTVAGERGAADAERDVRGFSLKFYTEQGNWDLVGNNTPVFFIRDPLKFPDFIHTQKRNPQTNLRDATAAWDFWSRHPESMHQIMILFSDRGIPASLRNMNGYGSHTYSFINADNERFWVKFHFKTQQGHKFLTNAEAAKVVGEDRESSQRDLYDAIANGNFPRWNVRIQIMPEADAEKHNYSFDLTKVWPHKDYPLIDVGVLELNRNPQNYFAEVEQAAFAPNNNVPGIGFSPDRMLQGRLFSYQDAQRYRLGVNHHQIPVNAPKCPYHTTHRDGAMRVDHNGGTHPNYAPNRFDTYVPTHDQGPSLQLEREGAHFNFRDYDEDYYSQPAALYAIMDAAQRDRLAGNFAASLAEVTDDAIVEHQLVHFERVNTELANAIRTKLA

SEQ ID NO: 19937 - protein, 508 aa, Haemophilus influenzae Rd
MSSQCPFSHLAATNLTMGNGAPVADNQNSLTAGPRGPLLAQDLWLNEKLADFVREVIPERRMHAKGSGAFGTFTVTHDITKYTRAKIFSEVGKKTEMFARFTTVAGERGAADAERDIRGFALKFYTEEGNWDLVGNNTPVFFLRDPRKFPDLNKAVKRDPRTNMRSATNNWDFWTLLPEALHQVTVVMSDRGIPASYRHMHGFGSHTYSFWNEAGERFWVKFHFRTQQGIKNLTDAEAAEIIANDRESHQRDLYEAIERGDFPKWTLFVQIMPEADAEKVPYHPFDLTKVWSKKDYPLIEVGEFELNRNPENFFADVEQSAFAPSNLVPGIGASPDRMLQARLFNYADAQRYRLGVNYRQIPVNRPRCPVHSNQRDGQGRVDGNYGSLPHYEPNSFSQWQQQPDFAEPPLRINGDAAHWDYRNDDNDYFSQPRALFNLMNAEQKQSLFNNTAAAMGDAPDFIKYRHIRNCHWCDAAYGEGVAKALGLTVEDALKARDTDPALGQGGLL

SEQ ID NO: 19938 - protein, 506 aa, Drosophila melanogaster
MAGRDAASNQLIDYKNSQTVSPGAITTGNGAPIGIKDASQTVGPRGPILLQDVNFLDEMSHFDRERIPERVVHAKGAGAFGYFEVTHDITQYCAAKIFDKVKKRTPLAVRFSTVGGESGSADTARDPRGFAVKFYTEDGVWDLVGNNTPVFFIRDPILFPSFIHTQKRNPQTHLKDPDMFWDFLTLRPESAHQVCILFSDRGTPDGYCHMNGYGSHTFKLINAKGEPIYAKFHFKTDQGIKNLDVKTADQLASTDPDYSIRDLYNRIKTCKFPSWTMYIQVMTYEQAKKFKYNPFDVTKVWSQKEYPLIPVGKMVLDRNPKNYFAEVEQIAFSPAHLVPGVEPSPDKMLHGRLFSYSDTHRHRLGPNYLQIPVNCPYKVKIENFQRDGAMNVTDNQDGAPNYFPNSFNGPQECPRARALSSCCPVTGDVYRYSSGDTEDNFGQVTDFWVHVLDKCAKKRLVQNIAGHLSNASQFLQERAVKNFTQVHADFGRMLTEELNLAKSSKF

SEQ ID NO: 19939 - protein, 506 aa, Drosophila melanogaster
MCSRDTASNQLIDYKNNDSEVQREITTSSGTPVGVKDAIQTVGPRGPALLQDFQFLDEVMHFDSERIPERVAYAKGAGAFGYFECTHDISKFCAASIFDKVRKRTAVAMRFSVACGEQGSADTVREQRGFAVKFYTDDGIWDIVGCNMPVHYVRDPMLFPSLVHAQKRNPQTHLKDPDMFWDFMTLRPETLHALLMYFSDRGTPDGYRHLHGYGVHTYRMINASGETQYVRFHFKTDQGIKNLDARRCEELMSHDPDYAIRDLYNSIKKGNYPSWSMYIQVMLNEEAKKCRFNPFDVTKVWPQKDFPLLPVGKIVLDRNPTNYFTEVEQLAFSPAHMVPGIEPSPDKMLQGRLFAYGDSQRHRLGVNYMQIPVNCPYRVNVRNFQRDGAMTVTDNQNGAPNYFPNSFCGPRESPRALGLQTCCPLSGDVYRFMSGDTEDNFSQVTDFWTYTLDNCGRKRLVRNLSEHLTEASQFLQERAVKLFTMVHSDFGRLMTEALNTARISKF

SEQ ID NO: 19940 - protein, 508 aa, Haemophilus influenzae
MSSQCPFSHLAATNLTMGNGAPVADNQNSLTAGPRGPLLAQDLWLNEKLADFVREVIPERRMHAKGSGAFGTFTVTHDITKYTRAKIFSEVGKKTEMFARFTTVAGERGAADAERDIRGFALKFYTEEGNWDLVGNNTPVFFLRDPRKFPDLNKAVKRDPRTNMRSATNNWDFWTLLPEALHQVTVVMSDRGIPASYRHMHGFGSHTYSFWNEAGERFWVKFHFRTQQGIKNLTDAEAAEIIANDRESHQRDLYEAIERGDFPKWTLFVQIMPEADAEKVPYHPFDLTKVWSKKDYPLIEVGEFELNRNPENFFADVEQSAFAPSNLVPGIGASPDRMLQARLFNYADAQRYRLGVCYRQIPVNRPRCPVHSNQRDGQGRVDGTYGSLPHYEPNSFSQWQQQPDFAEPPLRISGDAAHWDYRTDDNDYFSQPRALFNLMNAEQKQSLFNNTAAAMGDAPDFIKYRHIRNCHWCDAAYGEGVAKALGLTVEDALKARDTDPALGQGGLL

SEQ ID NO: 19941 - protein, 513 aa, Apis mellifera ligustica
MTEIKRNPSADQLIDYKKNLKPDCPIFLTGSGTPISKKASLTVGPNGPILLQDYVFLDELSHFNRERIPERVVHAKGAGAFGYFEVTHDITKYSKAKVFSSIGKRTPIAVRFSTVGGESGSADTVRDPRGFAVKFYTEEGVWDLVGNNTPIFFIKDPIYFPSFIHTQKRNPVTHLKDADMFWDFLSLRPESTHQVMFLFSDRGIPDGYRHMNGYGSHTFSLVNAKDEIVYCKFHYKTDQGIKNLPVDKAGELSASNPDYAIQDLYDAIAKNQYPTWTFYIQVMTPTQAKSFKWNPFDLTKVWPHDEYPLIPVGKLVLNRNPENYFADIEQIAFDPAHMVPGIGASPDKMLQGRMFTYGDAHRHRLGPNNLQLPVNCPFKEISVINYQRDGQATINNQNGAPNYFPNSFGGPRECPAVAPPTYFVSGDVGRYDVDPKEDNFGQVTLFWRNVLDDKEKSRLVNNLVQNLSNASMFIVERAVKNFTQVDADLGLRLTEGLRNKGVLINRYGKTARL

SEQ ID NO: 19942 - protein, 509 aa, Vibrio rumoiensis
MSDDTKKCPVTHMTTDFGAPVVTNRDSLTAGPRGPLLAQDVWLNEKLAGFVREVIPERRMHAKGSGAFGTFTVTHDITKYTRAKIFSEVGKKTEMFARFTTVAGERGAADAERDIRGFALKFYTEEGNWDMVGNNTPVFFIRDPRQFPDLNKAVKRDPRTNLRSATNNWDYWTLLPEALHQVTVVMSDRGIPASYRHMHGFSSHTYSLWNQAGERFWVKMHFRTQQGIKNLTDAEAGELVAQDRESHQRDLYEAIERGEYPKWTMFIQVMPEADAEKYALHPFDLTKVWYKGDYPLIEVGEFELNKNSENFFADVEQVAFSPSNLVPGIGVSPDRMLQARLFNYADAQRYRLGVNYHQIPVNQARCPVHSNHRDGQGRVDGNYGALPHYEPNSFGQWQGQPQFSEPPLKLTGNAAHWSYDKDDHNYFEQPGKLFRLMNDGQKEALFGNTGRAMGDAPEFIKFRHIRNCHAADPAYGAGVAKALGINLEKALASKKDDPMYGNPLVALPA

SEQ ID NO: 19943 - protein, 482 aa, Wolbachia endosymbiont of Onchocerca volvulus
MSQNKTLTTASGPPVADNQNSRSAGPRGPLLLDDFHLIEKLAHFNRENIPERRVHAKGSGAYGTFTVTQDITQYTSAKLFDSVGKQTPTFLRFSTVGGERGSADTERDPRGFALKFYTEEGNWDIVGNNTPVFFIRDPLKFPDFIHTQKRLPQSNLKSAQMMWDFWSHSPEALHQVTILFSDRGIPDGYRHMHGFGSHTYSLINAKGERHWVKWHYKTKQGIKNLAPADAARLAGTDPDYAQRDLFGAIERGDFPKWRVCIQIMTEAQANAHYENPFDVTKTWSQKEFPLIEVGELELNRNPLNYFAEVEQAAFGPSNMVPGVGLSPDRMLQGRVFAYADAHRYRVGTNHQQLPVNAPRSPVNSYQRDGSMAFGSNGGAAPNYEPNSYADAPKQAPQYAEPALALSGAADRYDHREDTDYYSHAGALFRLMNDEQKALLINNIAGAMAGVSSDVVQRQLQYFFKADPAYGEGIASALGVSLN

SEQ ID NO: 19944 - protein, 87 aa, Leersia perrieri
KARYVKFHWKPTCGVSCLMDDEATLVGGKNRSHATQDLYDSIAAGNFPEWKLFVQVIDPEEEERFDFDPLDDTKTWPEDEVPLRPVG

SEQ ID NO: 19945 - protein, 90 aa, Porteresia coarctata
RDGKARYVKFHWKPTCGVSCLMDDEATLVGGKNHSHATQDLYDSIAAGNFPEWKLFVQVINPEEEERFDFDPLDDTKTWPEDEVPLRPVG

SEQ ID NO: 19946 - protein, 526 aa, Danio rerio
MADDREKSTDQMKLWKEGRGSQRPDVLTTGAGVPIGDKLNAMTAGPRGPLLVQDVVFTDEMAHFDRERIPERVVHAKGAGAFGYFEVTHDITRYSKAKVFEHVGKTTPIVVRFSTVAGEAGSPDTVRDPRGFAVKFYTDEGNWDLTGNNTPTFFIRDTLLSPSFIHSQKRNPQTHLKDPDMVWDFWSLRPESLHQVSFLFSDRGIPDGYRHMNGYGSHTFKLVNAQGQPVYCKFHYKTNQGIKNIPVEEADRLAATDPDYSIRDLYNAIANGNFPSWTFYIQVMTFEQAENWKWNPFDLTKVWSHKEFPLIPVGRFVLNRNPVNYFAEVEQLAFDPSNMPPGIEPSPDKMLQGRLFSYPDTHRHRLGANYLQLPVNCPYRTRVANYQRDGPMCMHDNQGGAPNYYPNSFSAPDVQPRFLESKCKVSPDVARYNSADDDNVTQVRTFFTQVLNEAERERLCQNMAGHLKGAQLFIQKRMVQNLMAVHSDYGNRVQALLDKHNAEGKKNTVHVYSRGGASAVAAASKM

SEQ ID NO: 19947 - protein, 526 aa, Danio rerio
MADDREKSTDQMKLWKEGRGSQRPDVLTTGAGVPIGDKLNAMTAGPRGPLLVQDVVFTDEMAHFDRERIPERVVHAKGAGAFGYFEVTHDITRYSKAKVFEHVGKTTPIAVRFSTVAGEAGSSDTVRDPRGFAVKFYTDEGNWDLTGNNTPIFFIRDTLLFPSFIHSQKRNPQTHLKDPDMVWDFWSLRPESLHQVSFLFSDRGIPDGYRHMNGYGSHTFKLVNAQGQPVYCKFHYKTNQGIKNIPVEEADRLAATDPDYSIRDLYNAIANGNFPSWTFYIQVMTFEQAENWKWNPFDLTKVWSHKEFPLIPVGRFVLNRNPVNYFAEVEQLAFDPSNMPPGIEPSPDKNAAGRLFSYPDTHRHRLGANYLQLPVNCPYRTRVANYQRDGPMCMHDNQGGAPNYYPNSFSAPDVQPRFLESKCKVSPDVARYNSADDDNVTQVRTFFTQVLNEAERERLCQNMAGHLKGAQLFIQKRTVQNLMAVHSDYGNRVQALLDKHNAEGKKNTVHVYSRGGASAVAAASKM

SEQ ID NO: 19948 - protein, 486 aa, Bacteroides fragilis
MENKKLTAANGRPIADNQNSQTAGPRGPIMLQDPWLIEKLAHFDREVIPERRMHAKGSGAYGTFTVTHDITKYTRAAIFSQVGKQTECFVRFSTVAGERGAADAERDIRGFAMKFYTEEGNWDLVGNNTPVFFLRDPLKFPDLNHAVKRDPRNNMRSANNNWDFWTLLPEALHQVTITMSPRGIPASYRHMHGFGSHTYSFLNAENKRIWVKFHLKTMQGIKNLTDQEAEAIIAKDRESHQRDLYESIERGDFPKWKFQIQLMTEEEADNYRINPFDLTKVWPHKDFPLQDVGILELNRNPENYFAEVEQSAFNPMNIVEGIGFSPDKMLQGRLFSYGDAQRYRLGVNSEQIPVNKPRCPFHAFHRDGAMRVDGNYGSAKGYEPNSYGEWQDSPEKKEPPLKVHGDVFNYNEREYDDDYYSQPGDLFRLMPADEQQLLFENTARAMGDAELFIKQRHVRNCYKADPAYGTGVAQALGIDLEEALKE

SEQ ID NO: 19949 - protein, 492 aa, Avicennia marina
MDPYKYCPSSSFNTPHTTTNGGHPVYNDNSSLTVGTRGPVLLEDYQLIDKLAHFTRERIPERVVHARGATAKGFFEVTHDVSHLTCADFLRAPGVQTPLIVRFSTVIHERGSPETLRDPRGFAVKFYTREGNFDIVGNNFPVFFIRDAIKFPDVIHAFKPNPKSHIQESWRILDFCSHFPESLLTFAWFYDDVGIPQDYRHMEGFGVHSYTLINKAGKVNYVKFHWKPTCGVKCLMEDEAVRIGGTNHSHATQDLYDSIAAGNYPEWKLYFQIMDPDQEDRFDFDPLDTTKIWPEDIIPLIPVGRMVLNKNIDNFFAENEMLAFSPHMIVPGINFSNDKMLQTRIFAYGDTQRHRLGPNYLLLPVNAPKCAYHNNHYDGFMNFMHRDEEVDYFPSKYDPTRHAERHPIPNAVITGRRDRRVIEKEDNFKQAGDRYRSWAPDRQERFLRRWVDALSDPRLTLEIRSIWVSYWSQADKSFGQKLASRLNVRPTM

SEQ ID NO: 19950 - protein, 528 aa, Rana rugosa
MADRREKSADQMKLWKESRANQKPDVLTTGGGNPVSDKLNLLTVGPRGPLLVQDVVFTDEMAHFDRERIPERVVHAKGAGAFGYFEVTHDITRYSKAKVFEFIGKRTPIAVRFSTVAGEAGSADTVRDPRGFAVKFYTEDGNWDLTGNNTPIFFVRDAMLFPSFIHSQKRNPQTHMKDPDMVWDFWALRPESLHQVSFLFSDRGIPDGHRHMNGYGSHTFKLVNAKDEPIYCKFHFKTDQGIRNLTVEEANRLSAEDPDYGIHDLYEAIANGNYPSWTFYIQVMTFEQAERYPFNPFDLTKIWPHKDYPLIPVGKLVLNRNPANYFAEVEQIAFDPSNMPPGIEPSPDKMLQGRLFSYPDTHRHRLGANYLQLPVNCPYKARVANYQRDGPMCFSDNQGGAPNYFPNSFSAPENQPAARESKFRVSADVARYNSSDDDNVSQVRDFYTKVLSEEERKRLCENIAGHLKGAQIFIQKRAVKNFTDVHPDYGNRVQALLDKYNAEGHHKKVIKTYTQHSAHVTANDKANL

SEQ ID NO: 19951 - protein, 505 aa, Helicobacter pylori 26695
MVNKDVKQTTAFGAPVWDDNNVITAGPRGPVLLQSTWFLEKLAAFDRERIPERVVHAKGSGAYGTFTVTKDITKYTKAKIFSKVGKKTECFFRFSTVAGERGSADAVRDPRGFAMKYYTEEGNWDLVGNNTPVFFIRDAIKFPDFIHTQKRDPQTNLPNHDMVWDFWSNVPESLYQVTWVMSDRGIPKSFRHMDGFGSHTFSLINAKGERFWVKFHFHTMQGVKHLTNEEAAEVRKYDPDSNQRDLFNAIARGDFPKWKLSIQVMPEEDAKKYRFHPFDVTKIWYLQDYPLMEVGIVELNKNPENYFAEVEQAAFSPANVVPGIGYSPDRMLQGRLFSYGDTHRYRLGVNYPQIPVNKPRCPFHSSSRDGYMQNGYYGSLQNYTPSSLPGYKEDKSARDPKFNLAHIEKEFEVWNWDYRADDSDYYTQPGDYYRSLPADEKERLHDTIGESLAHVTHKEIVDKQLEHFKKADPKYAEGVKKALEKHQKMMKDMHGKDMHHTKKKK

SEQ ID NO: 19952 - protein, 505 aa, Helicobacter pylori J99
MVNKDVKQTTAFGAPVWDDNNVITAGPRGPVLLQSTWFLEKLAAFDRERIPERVVHAKGSGAYGTFTVTKDITKYTKAKIFSKVGKKTECFFRFSTVAGEKGSADAVRDPRGFAMKYYTEEGNWDLVGNNTPVFFIRDAIKFPDFIHTQKRDPQTNLPNPDMVWDFWSNVPESLYQVTWVMSDRGIPKSFRHMDGFGSHTFSLINAKGERFWVKFHFETMQGVKHLTNEEAAEVRKYDPDSNQRDLFDAIAGGDFPKWKMSIQVMPEEDAKKYRFHPFDVTKIWYLQDYPLMEVGIVELNKNPENYFAEVEQAAFTPANVVPGIGYSPDRMLQGRLFSYGDTHRYRLGVNYPQIPVNRPRCPFHSSSRDGYMQNGYYGSLQNYTPSSLPGYKEDKSARDPKFNLAHIEKEFEVWNWDYRAEDSDYYTQPGDYYRSLPADEKERLYDTIGGSLAHVTHKEIVDKQLEHFKKADPKYAEGVKKALEKHQKMMKDMHAKDMHHMKKKK

SEQ ID NO: 19953 - protein, 533 aa, Bacillus halodurans
MKDQNQDPNKRSDNETDETLTNRQGHPVTNNQHVRTVGDRGPTTLENYDFLEKISHFDRERIPERVVHARGAGAHGYFESYGTYGDEPISKYTRAKVFTEKGKQTPVFVRFSSVIHGGHSPETLRDPRGFAVKFYTEDGNWDLVGNNLKIFFIRDPLKFPDLVHAFKPDPVTNVQDGERIFDFISQTPEAMHMITFLFSPWGIPANYRMMQGSGVNTYKWVNEEGNAVLVKYHWEPKQGIKNLTQKEAEAIQAKNFNHATLDLYEAIEDGDYPEWELYVQIMSDDAHPELDFDPLDPTKLWYKDQFPWVPVGRMVLNKNPENYFAEVEQAAFGTGVLVDGLDFSDDKLLQGRTFSYSDTQRYRVGANYLQLPINAPKKRVATNQRDGQMEYHVDIGPKQNPHVNYEPSLLNGLKEAKQDGQDHTPYVEGELQRASIDRQNDYGQAGETYRRLSDWERDDLILNLVNTLAPCHEDIQKQMIDHFSQCDPEYGRRVKEGLEKQKGADTHRQPQGGADGDAAMHAAEALGHPSDPY

SEQ ID NO: 19954 - protein, 480 aa, Desulfovibrio vulgaris
MTKHKLTTNAGAPVPDNQNAMTAGPRGPMLLQDVWFLEKLAHFDREVIPERRMHAKGSGAYGTFTVTHDITSYTKAALFSKIGKKTDLFVRFSTVAGERGAATAERDIRGFAIKFYTEQGNWDLVGNNTPVFFLRDPLKFPDLNHAVKRDPRTNMRSAKNNWDFWTSLPEALHQVTVVMSDRGIPASYRHMHGFGSHTFSFISPDNQRYWVKFHLRTQQGIKNLTDAEAEAIVARDRESHQRDLYDSIERGDFPRWTNYVQVMPEKDAEKLPYHPFDLTKVWFHKDCPLIEVGVLELNRNPENYFAEVEQAAFNPANVVPGISFSPDKMLQGRLFSYGDAHRYRLGVNHHLIPVNAARCPVHSYHRDGAMRVDGNHGSTLAYEPNSYGEWQEQPDFAEPPLAIRGDAAHWNFREDDADYYDQPGRLFRLMTPQQQDELFQNTARAMGDAPEEIKRRHVGNCAKADPAYGAGVARALGLKM

SEQ ID NO: 19955 - protein, 479 aa, Desulfovibrio vulgaris (strain Miyazaki)
MTKHKLTTNAGAPVPDNQNAMTAGPRGPMLLQDVWFLEKLAHFDREVIPERRMHAKGSGAYGTFTVTHDITSYTKAALFSKIGKKTDLFVRFSTVAGERGAATAERDIRGFAIKFYTEQGNWDLVGNNTPVFFLRDPLKFPDLNHAVKRDPRTNMRSAKNNWDFWTSLPEALHQVTVVMSDRGIPASYRHMHGFGSHTFSFISPDNQRYWVKFHLRTQQGIKNLTDAEAEAIVARDRESHQRDLYDSIERGDFPRWTMYVQVMPEKDAEKLPYHPFDLTKVWFHKDCPLIEVGVLELNRNPENYFAEVEQAAFNPANVVPGISFSPDKMLQGRLFSYGDAHRYRLGVNHHLIPVNAARCPVHSYHRDGAMRVDGNHGSTLAYEPNSYGEWQEQPDFAEPPLAIRGDAAHWNFREDADYYDQPGRLFRLMTPQQQDELFQNTARAMGDAPEEIKRRHVGNCAKADPAYGAGVARALGLKM

SEQ ID NO: 19956 - protein, 487 aa, Nitrosomonas europaea
MKMDDAKKKLTTSAGAPVADNQNVMTAGPRGPMLLQDIWFLEKLAHFDREVIPERRMHAKGSGAYGTFTVTHDITRYTRANIFSQIGKKTDLFVRFSTVAGERGAADAERDIRGFAIKFYTEEGNWDLVGNNTPVFFLRDPLKFPDLNHAVKRDPRTNLRSARNNWDFWTLLPEALHQITIVMSDRGLPATYRHMHGFGSHTFSFINARQERYWVKFHFRTQQGIKNLTDAEAEALVGKDRESHQRDLYESIENGEFPRWTLFVQIMPESDAASLPYNPFDLTKVWPHKDYPLIEVGVMELNRNPENYFAEVEQAAFNPASVVPGISFSPDKMLQGRLFSYGDAQRYRLGVNHYQIPVNAPRCPFHHYHRDGAMRVDGNQGSTLGYEPNSYQEWQQQPEYAEPPLTLEGAAAHWNHRVDEDYYIQPGNLFRLMNSSQQQVLFDNTARSIGEAPREIQIRHITNCLKADRAYGEGVARALGIALSEVD

SEQ ID NO: 19957 - protein, 527 aa, Homo sapiens
MADSRDPASDQMQHWKEQRAAQKADVLTTGAGNPVGDKLNVITVGPRGPLLVQDVVFTDEMAHFDRERIPERVVHAKGAGAFGYFEVTHDITKYSKAKVFEHIGKKTPIAVRFSTVAGESGSADTVRDPRGFAVKFYTEDGNWDLVGNNTPIFFIRDPILFPSFIHSQKRNPQTHLKDPDMVWDFWSLRPESLHQVSFLFSDRGIPDGHRHMNGYGSHTFKLVNANGEAVYCKFHYKTDQGIKNLSVEDAARLSQEDPDYGIRDLFNAIATGKYPSWTFYIQVMTFNQAETFPFNPFDLTKVWPHKDYPLIPVGKLVLNRNPVNYFAEVEQIAFDPSNMPPGIEASPDKMLQGRLFAYPDTHRHRLGPNYLHIPVNCPYRARVANYQRDGPMCMQDNQGGAPNYYPNSFGAPEQQPSALEHSIQYSGEVRRFNTANDDNVTQVRAFYVNVLNEEQRKRLCENIAGHLKDAQIFIQKKAVKNFTEVHPDYGSHIQALLDKYNAEKPKNAIHTFVQSGSHLAAREKANL

SEQ ID NO: 19958 - protein, 497 aa, Homo sapiens
RDPASDQMQHWKEQRAAQKADVLTTGAGNPVGDKLNVITVGPRGPLLVQDVVFTDEMAHFDRERIPERVVHAKGAGAFGYFEVTHDITKYSKAKVFEHIGKKTPIAVRFSTVAGESGSADTVRDPRGFAVKFYTEDGNWDLVGNNTPIFFIRDPILFPSFIHSQKRNPQTHLKDPDMVWDFWSLRPESLHQVSFLFSDRGIPDGHRHMNGYGSHTFKLVNANGEAVYCKFHYKTDQGIKNLSVEDAARLSQEDPDYGIRDLFNAIATGKYPSWTFYIQVMTFNQAETFPFNPFDLTKVWPHKDYPLIPVGKLVLNRNPVNYFAEVEQIAFDPSNMPPGIEASPDKMLQGRLFAYPDTHRHRLGPNYLHIPVNCPYRARVANYQRDGPMCMQDNQGGAPNYYPNSFGAPEQQPSALEHSIQYSGEVRRFNTANDDNVTQVRAFYVNVLNEEQRKRLCENIAGHLKDAQIFIQKKAVKNFTEVHPDYGSHIQALLDKYN

SEQ ID NO: 19959 - protein, 498 aa, Homo sapiens
SRDPASDQMQHWKEQRAAQKADVLTTGAGNPVGDKLNVITVGPRGPLLVQDVVFTDEMAHFDRERIPERVVHAKGAGAFGYFEVTHDITKYSKAKVFEHIGKKTPIAVRFSTVAGESGSADTVRDPRGFAVKFYTEDGNWDLVGNNTPIFFIRDPILFPSFIHSQKRNPQTHLKDPDMVWDFWSLRPESLHQVSFLFSDRGIPDGHRHMNGYGSHTFKLVNANGEAVYCKFHYKTDQGIKNLSVEDAARLSQEDPDYGIRDLFNAIATGKYPSWTFYIQVMTFNQAETFPFNPFDLTKVWPHKDYPLIPVGKLVLNRNPVNYFAEVEQIAFDPSNMPPGIEASPDKMLQGRLFAYPDTHRHRLGPNYLHIPVNCPYRARVANYQRDGPMCMQDNQGGAPNYYPNSFGAPEQQPSALEHSIQYSGEVRRFNTANDDNVTQVRAFYVNVLNEEQRKRLCENIAGHLKDAQIFIQKKAVKNFTEVHPDYGSHIQALLDKYN

SEQ ID NO: 19960 - protein, 498 aa, Homo sapiens
  unsure (1)..(498): unsure at all Xaa locations
SRDPASDQMQHWKEQRAAQKADVLTTGAGNPVGDKLNVITVGPRGPLLVQDVVFTDEMAHFDRERIPERVVXAKGAGAFGYFEVTHDITKYSKAKVFEHIGKKTPIAVRFSTVAGESGSADTVRDPRGFAVKFYTEDGNWDLVGNNTPIFFIRDPILFPSFIHSQKRNPQTHLKDPDMVWDFWSLRPESLHQVSFLFSDRGIPDGHRHMNGYGSHTFKLVNANGEAVYCKFHYKTDQGIKNLSVEDAARLSQEDPDYGIRDLFNAIATGKYPSWTFYIQVMTFNQAETFPFNPFDLTKVWPHKDYPLIPVGKLVLNRNPVNYFAEVEQIAFDPSNMPPGIEASPDKMLQGRLFAYPDTHRHRLGPNYLHIPVNCPYRARVANYQRDGPMCMQDNQGGAPNYYPNSFGAPEQQPSALEHSIQYSGEVRRFNTANDDNVTQVRAFYVNVLNEEQRKRLCENIAGHLKDAQIFIQKKAVKNFTEVHPDYGSHIQALLDKYN

SEQ ID NO: 19961 - protein, 527 aa, Homo sapiens [sequence omitted]

SEQ ID NO: 19962 - protein, 451 aa, Homo sapiens
KGAGAFGYFEVTHDITKYSKAKVFEHIGKKTPIAVRFSTVAGESGSADTVRDPRGFAVKFYTEDGNWDLVGNNTPIFFIRDPILFPSFIHSQKRNPQTHLKDPDMVWDFWSLRPESLHQVSFLFSDRGIPDGHRHMNGYGSHTFKLVNANGEAVYCKFHYKTDQGIKNLSVEDAARLSQEDPDYGIRDLFNAIATGKYPSWTFYIQVMTFNQAETFPFNPFDLTKVWPHKDYPLIPVGKLVLNRNPVNYFAEVEQIAFDPSNMPPGIEASPDKMLQGRLFAYPDTHRHRLGPNYLHIPVNCPYRARVANYQRDGPMCMQDNQGGAPNYYPNSFGAPEQQPSALEHSIQYSGEVRRFNTANDDNVTQVRAFYVNVLNEEQRKRLCENIAGHLKDAQIFIQKKAVKNFTEVHPDYGSHIQALLDKYNAEKPKNAIHTFVQSGSHLAAREKANL

SEQ ID NO: 19963 - protein, 527 aa, Canis familiaris
MADSRDPASDQMKLWKEQRAAQKPDVLTTGGGNPIGDKLNVMTAGPRGPLLVQDVVFTDEMAHFDRERIPERVVHAKGAGAFGYFEVTHDITKYSKAKVFEHIGKRTPIAVRFSTVAGESGSADTVRDPRGFAVKFYTEDGNWDLVGNNTPIFFIRDAILFPSFIHSQKRNPQTHLKDPDMVWDFWSLRPESLHQVSFLFSDRGIPDGHRHMNGYGSHTFKLVNAAGEAVYCKFHYKTDQGIKNLSVEDAARLSHEDPDYGLRDLFNAIATGNYPSWTFYIQVMTFSQAETFPFNPFDLTKIWPHQDYPLIPVGKLVLNRNPVNYFAEVEQMAFDPSNMPPGIEPSPDKMLQGRLFAYPDTHRHRLGPNYLQIPVNCPFRARVANYQRDGPMCMLDNQGGAPNYYPNSFSAPEQQRCVLEHSSQCSPDVQRFNSANEDNVTQVRTFYLKVLGEEERKRLCENIAGHLKDAQLFIQKKAVKNFSDVHPDYGARIQALLDKYNAEKPKNAIHTFMQHGSHLAAREKANL

SEQ ID NO: 19964 - protein, 527 aa, Canis familiaris
MADSRDPASDQMKLWKEQRAAQKPDVLTTGGGNPIGDKLNVMTAGPRGPLLVQDVVFTDEMAHFDRERIPERVVHAKGAGAFGYFEVTHDITKYSKAKVFEHIGKRTPIAVRFSTVAGESGSADTVRDPRGFAVKFYTEDGNWDLVGNNTPIFFIRDAILFPSFIHSQKRNPQTHLKDPDMVWDFWSLRPESLHQVSFLFSDRGIPDGHRHMNGYGSHTFKLVNAAGEAVYCKFHYKTDQGIKNLSVEDAARLSHEDPDYGLRDLFNAIATGNYPSWTFYIQVMTFSQAETFPFNPFDLTKIWPHQDYPLIPVGKLVLNRNPVNYFTEVEQMAFDPSNMPPGIEPSPDKMLQGRLFAYPDTHRHRLGPNYLQIPVNCPFRARVANYQRDGPMCMLDNQGGAPNYYPNSFSAPEQQRCVLEHSSQCSPDVQRFNSANEDNVTQVRTFYLKVLGEEERKRLCENIAGHLKDAQLFIQKKAVKNFSDVHPDYGARIQALLDKYNAEKPKNAIHTFMQHGSHLAAREKANL

SEQ ID NO: 19965 - protein, 503 aa, Sus scrofa
MADNRDPASDQMKHWKEQRAAQKPDILTTGSGNPIGDKLNILTAGPRGPLLVQDVVFTDEMAHFDRERIPERVVHAKGAGAFGYFEVTHDITRFSKAKVFEHVGKRTPIAVRFSTVAGESGSADTVRDPRGFAVKFYTEDGNWDLVGNNTPIFFIRDAILFPSFIHSQKRNPQTHLKDPDMVWDFWSLRPESLHQVSFLFSDRGIPDGHRHMNGYGSHTFKLVNEKGEAVYCKFHYKTDQGIKNLSVEDAARLPQEDPDYGIRDLFNAIATGNYPSWTFYIQVMTFQEAEAFPFNPFDLTKVWPHSEYPLIPVGKLVLNRNPVNYFAEVEQMAFDPSNMPPGIEPSPDKMLQGRLFGYPDTHRHRLGANYLQIPVNCPFRARVANYQRDGPMCFQDNQGGAPNYYPNSFSAPEQTHSALEHCTRYSGDVQRFNSANEDNVTQVRTFYLNVLNEEERKRLCENIAGHLKDAQLFIQKKAVKNFSDVHPDYGARIQALLDKYNAE

SEQ ID NO: 19966 - protein, 506 aa, Bos taurus
ADNRDPASDQMKHWKEQRAAQKPDVLTTGGGNPVGDKLNSLTVGPRGPLLVQDVVFTDEMAHFDRERIPERVVHAKGAGAFGYFEVTHDITRYSKAKVFEHIGKRTPIAVRFSTVAGESGSADTVRDPRGFAVKFYTEDGNWDLVGNNTPIFFIRDALLFPSFIHSQKRNPQTHLKDPDMVWDFWSLRPESLHQVSFLFSDRGIPDGHRHMDGYGSHTFKLVNADGEAVYCKFHYKTDQGIKNLSVEDAARLAHEDPDYGLRDLFNAIATGNYPSWTLYIQVMTFSEAEIFPFNPFDLTKVWPHGDYPLIPVGKLVLNRNPVNYFAEVEQLAFDPSNMPPGIEPSPDKMLQGRLFAYPDTHRHRLGPNYLQIPVNCPYRARVANYQRDGPMCMMDNQGGAPNYYPNSFSAPEHQPSALEHRTHFSGDVQRFNSANDDNVTQVRTFYLKVLNEEQRKRLCENIAGHLKDAQLFIQKKAVKNFSDVHPEYGSRIQALLDKYNEEKPKN

SEQ ID NO: 19967 - protein, 505 aa, Bos taurus
ABBRBPASDQMKHWKEQRAAQKPDVLTTGGGNPVGDKLNSLTVGPRGPLLVQDVVFTDEMAHFDRERIPERVVHAKGAGAFGYFEVTHDITRYSKAKVFEHIGKRTPIAVRFSTVAGESGSADTVRDPRGFAVKFYBBBBTTZPGGVILFFWIRDALLFPSFIHSQKRNPQTHLKBBPMVWDFWSLRPESLHQVSFLFSDRGIPDGHRHMHBTSGGYFKLVNADGEAVYCKFHYKTDQGIKNLSVEDAARLAHEDPDYGLRDLFBTAAIGNYPSWTLYIQVMTFSEAEIFPFNPFDLTKVWPHGDYPLIPVGKLVLNRNPVNYFAEVEQLAFDPSNMPPGIEPSPDKMLQGRLFAYPDTHRHRLGPNYLQIPVNCPYRARVANYQRDGPMCBBBBZPPGGAMMYYSFSAPEHQPSALEHRTHFSGDVQRFNSANDDNVTQVRTFYLKVLNEEQRKRLCENIAGHLKDAQLFZIKKAVKNFSDVHPEYGSRIQALLDKYNEEKPKN

SEQ ID NO: 19968 - protein, 484 aa, Rhodospirillum rubrum
MTTRLTTTAGAPVADNQNSLTAGPRGPVLLQDYQLIEKLAHQNRERIPERVVHAKGWGAHGTLTITHDISRYTRAKLFSAVGKTTPVLARFSTVAGELGAADAERDVRGFSLKFYTEEGNWDLAGNNTPVFFVRDPLKFPDFIHTQKRHPRTHLRSPTAMWDFWSLSPESLHQVTILMSDRGLPLDPMHMNGYGSHTYSFWNDAGERFWVKFHFKTQQGHAHLTNAAAKVVVGESRESYQEALFGTIESGHFPRWTLFVQIMAEREAETTPYNPFDLTKVWPHGDFPLIEVGVLELNRNAENYFAEIEQAAFSPSNVVPGIGHSPDKMLQARVFAYADAHRYRLGTHYEALPVNAPLSPVNHYHKDGPMRFFPNNPNADAYYEPNSFGGPKEDPSVKEPPLRINGDADHYNHREGNDDYVQVGALFALFDEGERQRLFSNIAEAMAGVPEEIIRRQLVHFHRADPAYGEGVAKALGLAPVSQPA

SEQ ID NO: 19969 - protein, 394 aa, Hordeum vulgare subsp. vulgare
VRFSTVIHERGSPETIRDPRGFAVKFYTREGNWDLLGNNFPVFFIRDGIKFPDVIHAFKPNPKSHVQEYWRVFDFLSHHPESLHTFFFLFDDVGIPTDYRHMDGFGVNTYTFVSRAGKSHYVKFHWRPTCGVSCLMDDEATLVGGKNHSHATQDLYDSIDAGNFPEWKLFVQVIDPDEEDRFDFDPLDDTKTWPEDLVPLQPVGRLVLDRNVDNFFNENEQLAFGPGLVVPGIYYSDDKMLQCRVFAYADTQRYRLGPNYLMLPVNAPKCGFKNNHYDGAMNFMHRDEEVDYYPSRHAPLRHAEPASFPVPTRPVVGKREKTRIKKENDFVQPGERYRSWAPDRQDRFVRRFSDALAHPKVSHELRVIWIDFLSKCDKSCGMKVANRLNVKPSM

SEQ ID NO: 19970 - protein, 484 aa, Pseudomonas fluorescens PfO-1
MSQNKTLTTASGAPVADNQNSRSSGPRGPLLLDDFHLIEKLAHFNRENIPERRVHAKGSGAYGTFTVTRDITQYTSAKLFSAVGKQTPTFLRFSTVGGERGSADTERDPRGFALKFYTEEGNWDIVGNNTPVFFIRDPLKFPDFIHTQKRLPQSNLKSAQMMWDFWSHSPEALHQVTILFSDRGIPDGYRHMHGFGSHTYSLISAQGERHWVKWHYKTKQGIKNLAPADAARLAGTDPDYAQRDLFEAIERGDFPKWSVCIQIMTEAQAAAHYENPFDVTKTWSQKEFPLIEVGELELNRNPLNYFAEVEQAAFGPSNMVPGVGLSPDRMLQGRVFAYADAHRYRVGTNHQQLPVNAPRSPVNTYQRDGSMAFGSNGGAAPNYEPNSYVESPKQAPHYAEPALALSGAADRYDHREDSDYYSHAGALFRLMSDEQKALLVSNIAGAMGGVSSDVIDRQLQHFYKADPAYGEAIAKLLNVQLNEV

SEQ ID NO: 19971 - protein, 477 aa, Pseudomonas fluorescens PfO-1
MNKLTTAAGAPVVDNNNVQTAGPRGPMLLQDVWLLEKLAHFDREVIPERRMHAKGSGAFGTFTVTHDITRFTKARLFSSVGKTTDVFVRFSTVAGERGAADAERDIRGFAIKFYTEQGNWDLVGNNTPVFFLRDPLKFPDLNHAVKRDPRTNMRSARNNWDFWTLLPEALHQVTIVMSDRGLPRTYRHMHGFGSHTFSFISPANERFWVKFTWKTQQGIENLTDQQAATLIGDDRESAQRDLYNAIEEGHFPQWKLYVQVMPELDAETYPINPFDLTKVWPHADYPLIEVGVLELNRNPDNYFADVEQAAFNPANVVPGISFSPDKMLQARLFSYGDAQRYRVGVNHHQIPVNAPRCPVNSYHRDGQMRTDANAGSTIGYEPNSYGQWAEQPDFSEPPLALKGSAGHWNHREDDDYFSQPGALFRAMSTAQQQVLFENTARSIHGASAQTRQRHIDNCTRADPAYGAGVAQAIEALG

SEQ ID NO: 19972 - protein, 482 aa, Pseudomonas aeruginosa PAO1
MEEKTRLTTAAGAPVVDNQNVQTAGPRGPMLLQDVWFLEKLAHFDREVIPERRMHAKGSAAYGTFTVTHDITPYTRAKIFSQVGKKTDMFLRFSTVAGERGAADAERDIRGFSMRFYTEQGNWDLVGNNTPVFYLRDPLKFPDLNHVVKRDPRTNLRNATFKWDFFSHLPESLHQLTIDFSDRGLPKSYRHIHGFGSHTFSFINANNERFWVKFHFKTQQGIENLTNAEAAEVIAQDRESSQRDLYESIEKGDFPRWKMYVQIMPEKEAATYRYNPFDLTKVWPHGDYPLIEVGFFELNRNPDNYFAEVEQAAFTPANVVPGIGFSPDKMLQGRLFSYGDAHRYRLGVNHHQIPVNAARCPHQVYHRDGGMRVDGNNAHQRVTYEPNSFNQWQEQPDFSEPPLSLEGAADHWNHRVDDDYYSQPAALFHLFTDEQKQRLFANIAEDIRDVPEQIQRRQIGLFLKVDPAYGKGVADALGLKLD

SEQ ID NO: 19973 - protein, 479 aa, Pseudomonas putida
MSKILTTASGAPVADNQNSRSAGPRGPLLLDDFHLIEKLAHFNRENIPERRVHAKGSGAYGTFTVTRDITGYTSAKLFEQVGKQTETFLRFSTVGGERGSADTERDPRGFAVKFYTEEGNWDIVGNNTPVFFIRDPLKFPDFIHTQKRHPQSNLKNAQIFWDSWSHSPEALHQVTILFSDRGIPDGYRHMHGFGSHTYSLINAQGERTWVKWHFKTQQGIKNLAPADAARLAGTDPDYAQRDLFEAIERGDYPRWTVCIQVMSEAEAASRDENPFDVTKTWSQKDYPLIEVGVLELNRNPLNYFAEVEQAAFGPSNMVPGVGLSPDRMLQGRVFAYADAHRYRVGTNHQQLPVNAPRCPVNSYQRDGSMATGSYGSAPNYEPNSYAAAPKQSPRHAEPALALNGSADRYDHREDADYYSHAGALFRLMSDEQKALLISNIAGTMAGVSENVIQRQLQYFFKADPAYGEGIAKGLGINLA

SEQ ID NO: 19974 - protein, 491 aa, Oryza sativa (indica cultivar-group)
MDPCKFRPSSSFDTKTTTTNAGAPVWNDNEALTVGPRGPILLEDYHLIEKVAHFARERIPERVVHARGASAKGFFECTHDVTDITCADFLRSPGAQTPVIVRFSTVIHERGSQETIRDPRGFAVKFYTREGNWDLLGNNFPVFFIRDGIKFPDVIHAFKPNPRSHVQEYWRVFDFLSHHPESLHTFFFLFDDVGIPTDYRHMDGFGVNTYTFVTRDAKARYVKFHWKPTCGVSCLMDDEATLVGGKNHSHATQDLYDSIAAGNFPEWKLFVQVIDPEEEERFDFDPLDDTKTWPEDEVPLRPVGRLVLNRNVDNFFNENEQLAFGPGLVVPGIYYSDDKMLQCRVFAYADTQRYRLGPNYLMLPVNAPKCAHHNNHYDGAMNFMHRDEEVDYYPSRHAPLRHAPPTPITPRPVVGRRQKATIHKQNDFKQPGERYRSWAPDRQERFIAVRRRVAHPKVSPELRAIWVNYLSQCDESLGVKIANRLNVKPSM

SEQ ID NO: 19975 - protein, 91 aa, Oryza sativa (indica cultivar-group)
RDAKARYVKFHWKPTCGVSCLMDDEATLVGGKNHSHATQDLYDSIAAGNFPEWKLFVQVIDPEEEERFDFDPLDDTKTWPEDEVPLRPVGR

SEQ ID NO: 19976 - protein, 492 aa, Lycopersicon esculentum
MDPYKYRPSSAFNSPFCTTNSGAPVFNNNSSLTVGARGPVLLEDYHLVEKLANFDRERIAERVVHARGASAKGFFEVTHDIAHLTCADFLRAPGVQTPVIVRFSTVIHERGSPETLRDPRGFAVKFYTREGNFDLVGNNFPVFFIRDGMKFPDMVHALKPNPKSHIQENWRVLDFFSHHPESLHMFTFLFDDIGIPQDYRHMDGSGVHTFTLINRAGKSTYVKFHWKPTCGVKSLLEEKAIRVGGANHSHATQDLYDSIAAGNYPEWKPSIQIMGPEHEDKFDFDPLDVTKTWPEDILPLQPVGRLVLNKNIDNFLYMNEQLAFCPSIVVPGVYYSDDKMLQTRIFSYSDTQRYRLGPNYLQLPANAPKCAHHNNHYDGSMNFMHRDEEIDYFPSRYDQVRHAEVYPIPSTVCSGKREKCIIQKENNFKQPGERYRSFTPDRQERFIRRWVEALSDPRITYEIRSIWITYWSQADKSLGQKLASRLNVRPSI

SEQ ID NO: 19977 - protein, 492 aa, Lycopersicon esculentum
MDPSKYRPSSAYDTPFLTTNAGGPVYNNVSSLTVGPRGPVLLEDYYLIEKLATFDREKIPERVVHARGASAKGFFEVTHDISHLTCADFLRAPGAQTPVICRFSTVVHERGSPESIRDIRGFAVKFYTREGNFDLVGNNVPVFFNRDAKSFPDTIRALKPNPKSHIQENWRILDFFSFLPESLHTFAFFYDDVCLPTDYRHMEGFGVHAYQLINKEGKAHYVKFHWKPTCGVKCMSEEEAIRVGGTNHSHATKDLYDSIAAGNYPEWKLFIQTMDPEDVDKFDFDPLDVTKTWPEDLLPLIPVGRLVLNRNIDNFFAENEQLAFNPGHIVPGIYYSEDKLLQTRIFAYADTQRHRIGPNYMQLPVNAPKCGHHNNHRDGAMNMTHRDEEVDYLPSRFDPCRPAEQYPIPSCVLNGRRTNCVIPKENNFKQAGERYRSWEPDRQDRYINKWVESLSDPRVTHEIRSIWISYLSQADKSCGQKVASRLTVKPTM

SEQ ID NO: 19978 - protein, 90 aa, Lycopersicon esculentum
NRAGKSTYVKFHRKPTCGVMSLLEEEADRVGGANHSHATQDLYDSTAAGNYPEWKIFIQTMDPDHEDRFDFDPLDVTKTWPDDILPLQPD

SEQ ID NO: 19979 - protein, 494 aa, Hordeum vulgare
MDPCKFRPSSSFDTKTTTTNAGQPVWNDNEALTVGPRGPILLEDYHLLEKIAHFARERIPERVVHARGASAKGFFECTHDVTGLTCADFLRAPGARTPVIVRFSTVIHERGSPETIRDPRGFAVKFYTREGNWDLLGNNFPVFFIRDGIKFPDVIHAFKPNPKSHVQEYWRVFDFLSHHPESLHTFFFLFDDVGIPTDYRHMDGFGVNTYTFVSRAGKSHYVKFHWRPTCGVSCLMDDEATLVGGKNHSHATQDLYDSIDAGNFPEWKLFVQVIDPDEEDRFDFDPLDDTKTWPEDLVPLQPVGRLVLDRNVDNFFNENEQLAFGPGLVVPGIYYSDDKMLQCRVFAYADTQRYRLGPNYLMLPVNAPKCGFKNNHYDGAMNFMHRDEEVDYYPSRHAPLRHAEPASFPVPTRPVVGKREKTRIKKENDFVQPGERYRSWAPDRQDRFVRRFSDALAHPKVSHELRVIWIDFLSKCDKSCGMKVANRLNVKPSM

SEQ ID NO: 19980 - protein, 492 aa, Oryza sativa
  unsure (1)..(492): unsure at all Xaa locations
MDPCKFRPSSSFDTKTTTTNAGAPVWNDNEALTVGPRGPILLEDYHLIEKVAHFARERIPERVVHARGASAKGFFECTHDVTDITCADFLRSPGAQTPVIVRFSTVIHERGSPETIRDPRGFAVKFYTREGNWDLLGNNFPVFFIRDGIKFPDVIHAFKPNPRSHVQEYWRVFDFLSHHPESLHTFFFLFDDVGIPTDYRHMDGFGVNTYTFVTRDAKARYVKFHWKPTCGVSCLMDDEATLVGGKNHSHATQDLYDSIAAGNFPEWKLFVQVIDPEEEERFDFDPLDDTKTWPEDEVPLRPVGRLVLNRNVDNFFNENEQLAFGPGLVVPGIYYSDDKMLQCRVFAYADTQRYRLGPNYLMLPVNAPKCAHHNNHYDGAMNFMHRDEEVDYYPSRHAPLRHAPPTPITPRPVVGRRQKATIHKQNDFKQPGERYRSWAPDRQERFIRRXRRRVAHPKVSPELRAIWVNYLSQCDESLGVKIANRLNVKPSM

SEQ ID NO: 19981 - protein, 491 aa, Oryza sativa
MDPCKFRPSSSFDTKTTTTNAGAPVWNDNEALTVGPRGPILLEDYHLIEKVAHFARERIPERVVHARGASAKGFFECTHDVTDITCADFLRSPGAQTPVIVRFSTVIHERGSPETIRDPRGFAVKFYTREGNWDLLGNNFPVFFIRDGIKFPDVIHAFKPNPRSHVQEYWRVFDFLSHHPESLHTFFFLFDDVGIPTDYRHMDGFGVNTYTFVTRDAKARYVKFHWKPTCGVSCLMDDEATLVGGKNHSHATQDLYDSIAAGNFPEWKLFVQVIDPEEEERFDFDPLDDTKTWPEDEVPLRPVGRLVLNRNVDNFFNENEQLAFGPGLVVPGIYYSDDKMLQCRVFAYADTQRYRLGPNYLMLPVNAPKCAHHNNHYDGAMNFMHRDEEVDYYPSRHAPLRHAPPTPITPRPVVGRRQKATIHKQNDFKQPGERYRSWAPDRQERFIPLRRRVAHPKVSPELRAIWVNYLSQCDESLGVKIANRLNVKPSM

SEQ ID NO: 19982 - protein, 491 aa, Oryza sativa
MDPCKFRPSSSFDTKTTTTNAGAPVWNDNEALTVGPRGPILLEDYHLIEKVAHFARERIPERVVHARGASAKGFFECTHDVTDITCADFLRSPGAQTPVIVRFSTVIHERGSPETIRDPRGFAVKFYTREGNWDLLGNNFPVFFIRDGIKFPDVIHAFKPNPRSHVQEYWRVFDFLSHHPESLHTFFFLFDDVGIPTDYRHMDGFGVNTYTFVTRDAKARYVKFHWKPTCGVSCLMDDEATLVGGKNHSHATQDLYDSIAAGNFPEWKLFVQVIDPEEEERFDFDPLDDTKTWPEDEVPLRPVGRLVLNRNVDNFFNENEQLAFGPGLVVPGIYYSDDKMLQCRVFAYADTQRYRLGPNYLMLPVNAPKCAHHNNHYDGAMNFMHRDEEVDYYPSRHAPLRHAPPTPITPRPVVGRRQKATIHKQNDFKQPGERYRSWAPDRQERFIAVRRRVAHPKVSPELRAIWVNYLSQCDESLGVKIANRLNVKPSM

SEQ ID NO: 19983 - protein, 495 aa, Triticum aestivum
  unsure (1)..(495): unsure at all Xaa locations
MDPCKFRPSSSFDTKTTTTNAGQPVWNDNEALTVGPRGPILLEDYHLLEKIAHFARERIPERVVHARGASAKGFFECTHDVTGLTCADFLRAPGARTPVIVRFSTVIHERGSPETIRDPRGFAVKFYTREGNWDLLGNNFPVFFIRDGIKFPDVIHAFKPNPKSHVQEYWRVFDFLSHHPESLHTFFFLFDDVGIPTDYRHMDGSGVNTYTFVSRAGKSHYVKFHWXRPTCGVSCLMDDEATLVGGKNHSHATQDLYDSIDAGNFPEWKLFVQVIDPDDEDRFDFDPLDDTKTWPEDLVPLQPVGRLVLDRNVDNFFNENEQLAFGPGLVVPGIYYSDDKMLQCRVFAYADTQRYRLGPNYLMLPVNAPKCGFKNNHYDGAMNFMHRDEEVDYYPSRHAPLRHAEPASFPVPTRPVVGKREKTRIKKENDFVQPGERYRSWAPDRQDRFVRRFADALAHPKVSHELRVIWIDFLSKCDKSCGMKVANRLNVKPSM

SEQ ID NO: 19984 - protein, 41 aa, Sporobolus stapfianus
MDPTKFRPSSRHDVGVMTTNAGAPVWKDIEVMTVGPRGPYP

SEQ ID NO: 19985 - protein, 319 aa, Chlamydomonas sp. W80
MIGSKINAPRASMASRAAAPLRAAARPVRRLAVAPMAKASAATLAECQAECAALVKKASCAPILVRLAWHDSGNYDATTKTGGANGSIRFDPEMKHGGNAGLPLAVKLLEPIKKKFPDVGYADLFQMASATAIEVSGGPKIDMKYGRVDAADESAVPPEGRLPSAGAPFQEAQGPEPAKEAKDQSPQGHLRRVFGRMGLSDQDIVALSGAHTLGRAFKNRSGAAPLESTKFTKDGPGTKGGQSWTEEWLKFDNRYFTMLLEAEAGTCDPELLQLATDNALLTDPAFRPLVEKYAKDNAAFCADYAAAHKRLSELGSTFE

SEQ ID NO: 19986 - protein, 291 aa, Hordeum vulgare subsp. vulgare
MAAPVVDAEYLRQVDRARRAFRALIASKGCAPIMLRLAWHDAGTYDVNTRTGGANGSIRYEEEYTHGSNAGLKIAIDLLEPIKAKHPKITYADLHQLAGVVAVEVTGGPTVEFIPGRRDSSVCPREGRLPDAKKGAPHLRDIFYRMGLTDKDIVALSGGHSLGKAHPERSGFDGAWTRDPLKFDNSYFLELLKGESEGLLKLPTDKALLDDPEFRRYVELYAKDEDVFFKDYAESHKKLSELGFTPRSSGPASTKSDVSTAVVLAQSAVGVAVAAAVVIAGYLYEASKRSK

SEQ ID NO: 19987 - protein, 390 aa, Dichomitus squalens
MAFKLWSMLPLVALATVAVAAPSRQTVCSDGTVVPDSVCCEFVPLAQALQKEVLMGDCGEDAHELLRLTFHDAIAISRSKGPSAGGGADGSMLIFPTVEPAFFANLGIADSVNNLIPFLSQFPKISAGDLVQFAGAVAVGNCPGAPQLEFRAGRPNATAPAIEGLIPEPQNNITEILERFDDAGGFSPFEVVSLLASHTVARADHVDPTLDAAPFDSTPFTFDTQIFLEVLLKGVGFPGTGNNTGEVSSPLPVSSGTDVGELRLQSDFGLAHDERTACFWQGFVNEQEFMAQSFKAAMAKLAVLGHNADDLVDCSAVVPKPKPATGKPASFPATKGPKDLELSCTSKKFPTLTTDHGAQETLIPHCSNGSMNCTTVQFDGPATNFDGDDS

SEQ ID NO: 19988 - protein, 395 aa, Dichomitus squalens
MAFKWSSILALVTLATLASAAPTQSTVTCSDGTVVPDSVCCEFIPLREALNDQVIQSDCGEDAHELLRLTFHDAIAISQSLGPSAGGGADGSMLLFPTVEPAFFANLGIADSVNNLIPFMSQFPNISPGDLVQFAGAVAITNCPGAPQLEFLAGRPNGTAPAIDGLIPEPQDSIDDILARFDDAGGFTPFEVVSLLASHTVARADHVDPTLDAAPFDSTPFTFDTQIFLEVLLKGTGFPGTDNNTGEVASPIPVTNGTDVGELRLQSDFGLAHDSRTACFWQGFVNQQDFMAQSFKAAMAKLAVLGHNAADLVNCSAVIPTPLPATGKPATFPATLGPDDLELSCTTEPFPSLTTDPGAQETLIPHCSDGSMDCESVQFDGPATNFGGDDDDDDS

SEQ ID NO: 19989 - protein, 250 aa, Suaeda maritima subsp. salsa
MGKSYPTVSEENQKSIEKAKKKLRGLISEKHCAPIMLRLAWHSAGTFDVQSKTPGPFGTMRHQAELAHGANNGLDIALRLLEPIKEQFPEISFADFYQLAGVVAVEVTGGPEIPFHPGREDKPEPPQEGRLPDATKGCDHLRDVFIKQMGLTDQDIVALSGGHTLGRCHKDRSGFEGPWTPNPLVFDNSLLKELLSGEKDGLLQLPSDKALLADPVFRPLVEKYAADEDAFFADYSDAHLKLSELGFADA

SEQ ID NO: 19990 - protein, 751 aa, Geobacillus stearothermophilus
MENQNRQNAAQCPFHGSVTNQSSNRTTNKDWWPNQLNLSILHQHDRKTNPHDEEFNYAEEFQKLDYWALKEDLRKLMTESQDWWPADYGHYGPLFIRMAWHSAGTYRTGDGRGGASTGTQRFAPLNSWPNNANLDKARRLLWPIKKKYGNKISWADLFILAGNVAIESMGGKTIGFGGGRVDVWHPEEDVYWGSEKEWLASERYSGDRELENPLAAVQMGLTYVNPEGPDGKPDPKAAARDIRETFRRMGMNDEETVALIAGGHTFGKAHGAGPATHVGPEPEAAPIEAQGLGWISSYGKGKGSDTITSGIEGAWTPTPTQWDTSYFDMLFGYDWWLTKSPAGAWQWMAVDPDEKDLAPDAEDPSKKVPTMMMTTDLALRFDPEYEKIARRFHQNPEEFAEAFARAWFKLTHRDMGPKTRYLGPEVPKEDFIWQDPIPEVDYELTEAEIEEIKAKILNSGLTVSELVKTAWASASTFRNSDKRGGANGARIRLAPQKDWEVNEPERLAKVLSVYEDIQRELPKKVSIADLIVLGGSAAVEKAARDAGFDVKVPFFPGRGDATQEQTDVESFAVLEPFADGFRNYQKQEYSVPPEELLVDKAQLLGLTAPEMTVLVGGLRVLGANYRDLPHGVFTDRIGVLTNDFFVNLLDMNYEWVPTDSGIYEIRDRKTGEVRWTATRVDLIFGSNSILRSYAEFYAQDDNQEKFVRDFINAWVKVMNADRFDLVKKARESVTALQNIHGSRSKKVRVLQ

SEQ ID NO: 19991 - protein, 751 aa, Geobacillus stearothermophilus
MENQNRQNAAQCPFHGSVTNQSSNRTTNKDWWPNQLNLSILHQHDRKTNPHDEEFNYAEEFQKLDYWALKEDLRKLMTESQDWWPADYGHYGPLFIRMAWHSAGTYRTGDGRGGASTGTQRFAPLNSWPNNANLDKARRLLWPIKKKYGNKISWADLFILAGNVAIESMGGKTIGFGGGRVDVWHPEEDVYWGSEKEWLASERYSGDRELENPLAAVQMGLTYVNPEGPDGKPDPKAAARDIRETFRRMGMNDEETVALIAGGHTFGKAHGAGPATHVGPEPEAAPIEAQGLGWISSYGKGKGSDTITSGIEGAWTPTPTQWDTSYFDMLFGYDWWLTKSPAGAWQWMAVDPDEKDLAPDAEDPSKKVPTMMMTTDLALRFDPEYEKIARRFHQNPEEFAEAFARAWFKLTHRDMGPKTRYLGPEVPKEDFIWQDPIPEVDYELTEAEIEEIKAKILNSGLTVSELVKTAWASASTFRNSDKRGGANGARIRLAPQKDWEVNEPERLAKVLSVYEDIQRELPKKVSIADLIVLGGSAAVEKAARDAGFDVKVPFFPGRGDATQEQTDVESFAVLEPFADGFRNYQKQEYSVPPEELLVDKAQLLGLTAPEMTVLVGGLRVLGANYRDLPHGVFTDRIGVLTNDFFVNLLDMNYEWVPTDSGIYEIRDRKTGEVRWTATRVDLIFGSNSILRSYAEFYAQDDNQEKFVRDFINAWVKVMNADRFDLVKKARESVTALQTGDSDRSMKKTILQ

SEQ ID NO: 19992 - protein, 751 aa, Geobacillus stearothermophilus
MENQNRQNAAQCPFHGSVTNQSSNRTTNKDWWPNQLNLSILHQHDRKTNPHDEEFNYAEEFQKLDYWALKEDLRKLMTESQDWWPADYGHYGPLFIRMAWHSAGTYRTGDGRGGASTGTQRFAPLNSWPNNANLDKARRLLWPIKKKYGNKISWADLFILAGNVAIESMGGKTIGFGGGRVDVWHPEEDVYWGSEKEWLASERYSGDRELENPLAAVQMGLTYVNPEGPDGKPDPKAAARDIRETFRRMGMNDEETVALIAGGHTFGKAHGAGPATHVGPEPEAAPIEAQGLGWISSYGKGKGSDTITSGIEGAWTPTPTQWDTSYFDMLFGYDWWLTKSPAGAWQWMAVDPDEKDLAPDAEDPSKKVPTMMMTTDLALRFDPEYEKIARRFHQNPEEFAEAFARAWFKLTHRDMGPKTRYLGPEVPKEDFIWQDPIPEVDYELTEAEIEEIKAKILNSGLTVSELVKTAWASASTFRNSDKRGGANGARIRLAPQKDWEVNEPERLAKVLSVYEDIQRELPKKVSIADLIVLGGSAAVEKAARDAGFDVKVPFFPGRGDATQEQTDVESFAVLEPFADGFRNYQKQEYSVPPEELLVDKAQLLGLTAPEMTVLVGGLRVLGANYRDLPHGVFTDRIGVLTNDFFVNLLDMNYEWVPTDSGIYEIRDRKTGEVRWTATRVDLIFGSNSILRSYAEFYAQDDNQEKFVRDFINAWVKVMNADRFDLVKKARESVTALQILTGLRSVGAVVLQ

SEQ ID NO: 19993 - protein, 751 aa, Geobacillus stearothermophilus
MENQNRQNAAQCPFHGSVTNQSSNRTTNKDWWPNQLNLSILHQHDRKTNPHDEEFNYAEEFQKLDYWALKEDLRKLMTESQDWWPADYGHYGPLFIRMAWHSAGTYRTGDGRGGASTGTQRFAPLNSWPNNANLDKARRLLWPIKKKYGNKISWADLFILAGNVAIESMGGKTIGFGGGRVDVWHPEEDVYWGSEKEWLASERYSGDRELENPLAAVQMGLTYVNPEGPDGKPDPKAAARDIRETFRRMGMNDEETVALIAGGHTFGKAHGAGPATHVGPEPEAAPIEAQGLGWISSYGKGKGSDTITSGIEGAWTPTPTQWDTSYFDMLFGYDWWLTKSPAGAWQWMAVDPDEKDLAPDAEDPSKKVPTMMMTTDLALRFDPEYEKIARRFHQNPEEFAEAFARAWFKLTHRDMGPKTRYLGPEVPKEDFIWQDPIPEVDYELTEAEIEEIKAKILNSGLTVSELVKTAWASASTFRNSDKRGGANGARIRLAPQKDWEVNEPERLAKVLSVYEDIQRELPKKVSIADLIVLGGSAAVEKAARDAGFDVKVPFFPGRGDATQEQTDVESFAVLEPFADGFRNYQKQEYSVPPEELLVDKAQLLGLTAPEMTVLVGGLRVLGANYRDLPHGVFTDRIGVLTNDFFVNLLDMNYEWVPTDSGIYEIRDRKTGEVRWTATRVDLIFGSNSILRSYAEFYAQDDNQEKFVRDFINAWVKVMNADRFDLVKKARESVTALQGCSRSRSDVIEGLQ

SEQ ID NO: 19994 - protein, 751 aa, Geobacillus stearothermophilus
MENQNRQNAAQCPFHGSVTNQSSNRTTNKDWWPNQLNLSILHQHDRKTNPHDEEFNYAEEFQKLDYWALKEDLRKLMTESQDWWPADYGHYGPLFIRMAWHSAGTYRIGDGRGGASTGTQRFAPLNSWPDNANLDKARRLLWPIKKKYGNKISWADLFILAGNVAIESMGGKTIGFGGGRVDVWHPEEDVYWGSEKEWLASERYSGDRELENPLAAVQMGLIYVNPEGPDGKPDPKAAARDIRETFRRMGMNDEETVALIAGGHTFGKAHGAGPATHVGPEPEAAPIEAQGLGWISSYGKGKGSDTITSGIEGAWTPTPTQWDTSYFDMLFGYDWWLTKSPAGAWQWMAVDPDEKDLAPDAEDPSKKVPTMMMTTDLALRFDPEYEKIARRFHQNPEEFAEAFARAWFKLTHRDMGPKTRYLGPEVPKEDFIWQDPIPEVDYELTEAEIEEIKAKILNSGLTVSELVKTAWASASTFRNSDKRGGANGARIRLAPQKDWEVNEPERLAKVLSVYEDIQRELPKKVSIADLIVLGGSAAVEKAARDAGFDVKVPFFPGRGDATQEQTDVESFAVLEPFADGFRNYQKQEYSVPPEELLVDKAQLLGLTAPEMTVLVGGLRVLGANYRDLPHGVFTDRIGVLTNDFFVNLLDMNYEWVPTDSGIYEIRDRKTGEVRWTATRVDLIFGSNSILRSYAEFYAQDDNQEKFVRDFINAWVKVMNADRFDLVKKARESVTALQTSNRDRSNRDVTLQ

SEQ ID NO: 19995 - protein, 745 aa, Geobacillus stearothermophilus
MENQNRQNAAQCPFHGSVTNQSSNRTTNKDWWPNQLNLSILHQHDRKTNPHDEEFNYAEEFQKLDYWALKEDLRKLMTESQDWWPADYGHYGPLFIRMAWHSAGTYRIGDGRGGASTGTQRFAPLNSWPDNANLDKARRLLWPIKKKYGNKISWADLFILAGNVAIESMGGKTIGFGGGRVDVWHPEEDVYWGSEKEWLASERYSGDRELENPLAAVQMGLIYVNPEGPDGKPDPKAAARDIRETFRRMGMNDEETVALIAGGHTFGKAHGAGPATHVGPEPEAAPIEAQGLGWISSYGKGKGSDTITSGIEGAWTPTPTQWDTSYFDMLFGYDWWLTKSPAGAWQWMAVDPDEKDLAPDAEDPSKKVPTMMMTTDLALRFDPEYEKIARRFHQNPEEFAEAFARAWFKLTHRDMGPKTRYLGPEVPKEDFIWQDPIPEVDYELTEAEIEEIKAKILNSGLTVSELVKTAWASASTFRNSDKRGGANGARIRLAPQKDWEVNEPERLAKVLSVYEDIQRELPKKVSIADLIVLGGSAAVEKAARDAGFDVKVPFFPGRGDATQEQTDVESFAVLEPFADGFRNYQKQEYSVPPEELLVDKAQLLGLTAPEMTVLVGGLRVLGANYRDLPHGVFTDRIGVLTNDFFVNLLDMNYEWVPTDSGIYEIRDRKTGEVRWTATRVDLIFGSNSILRSYAEFYAQDDNQEKFVRDFINAWVKVMNADRFDLVKKARESVTALQSTFLRRSG

SEQ ID NO: 19996 - protein, 751 aa, Geobacillus stearothermophilus
MENQNRQNAAQCPFHGSVTNQSSNRTTNKDWWPNQLNLSILHQHDRKTNPHDEEFNYAEEFQKLDYWALKEDLRKLMTESQDWWPADYGHYGPLFIRMAWHSAGTYRIGDGRGGASTGTQRFAPLNSWPDNANLDKARRLLWPIKKKYGNKISWADLFILAGNVAIESMGGKTIGFGGGRVDVWHPEEDVYWGSEKEWLASERYSGDRELENPLAAVQMGLIYVNPEGPDGKPDPKAAARDIRETFRRMGMNDEETVALIAGGHTFGKAHGAGPATHVGPEPEAAPIEAQGLGWISSYGKGKGSDTITSGIEGAWTPTPTQWDTSYFDMLFGYDWWLTKSPAGAWQWMAVDPDEKDLAPDAEDPSKKVPTMMMTTDLALRFDPEYEKIARRFHQNPEEFAEAFARAWFKLTHRDMGPKTRYLGPEVPKEDFIWQDPIPEVDYELTEAEIEEIKAKILNSGLTVSELVKTAWASASTFRNSDKRGGANGARIRLAPQKDWEVNEPERLAKVLSVYEDIQRELPKKVSIADLIVLGGSAAVEKAARDAGFDVKVPFFPGRGDATQEQTDVESFAVLEPFADGFRNYQKQEYSVPPEELLVDKAQLLGLTAPEMTVLVGGLRVLGANYRDLPHGVFTDRIGVLTNDFFVNLLDMNYEWVPTDSGIYEIRDRKTGEVRWTATRVDLIFGSNSILRSYAEFYAQDDNQEKFVRDFINAWVKVMNADRFDLVKKARESVTALQCTTVSRSNEKAGLQ

SEQ ID NO: 19997 - protein, 751 aa, Geobacillus stearothermophilus
MENQNRQNAAQCPFHGSVTNQSSNRTTNKDWWPNQLNLSILHQHDRKTNPHDEEFNYAEEFQKLDYWALKEDLRKLMTESQDWWPADYGHYGPLFIRMAWHSAGTYRTGDGRGGASTGTQRFAPLNSWPNNANLDKARRLLWPIKKKYGNKISWADLFILAGNVAIESMGGKTIGFGGGRVDVWHPEEDVYWGSEKEWLASERYSGDRELENPLAAVQMGLTYVNPEGPDGKPDPKAAARDIRETFRRMGMNDEETVALIAGGHTFGKAHGAGPATHVGPEPEAAPIEAQGLGWISSYGKGKGSDTITSGIEGAWTPTPTQWDTSYFDMLFGYDWWLTKSPAGAWQWMAVDPDEKDLAPDAEDPSKKVPTMMMTTDLALRFDPEYEKIARRFHQNPEEFAEAFARAWFKLTHRDMGPKTRYLGPEVPKEDFIWQDPIPEVDYELTEAEIEEIKAKILNSGLTVSELVKTAWASASTFRNSDKRGGANGARIRLAPQKDWEVNEPERLAKVLSVYEDIQRELPKKVSIADLIVLGGSAAVEKAARDAGFDVKVPFFPGRGDATQEQTDVESFAVLEPFADGFRNYQKQEYSVPPEELLVDKAQLLGLTAPEMTVLVGGLRVLGANYRDLPHGVFTDRIGVLTNDFFVNLLDMNYEWVPTDSGIYEIRDRKTGEVRWTATRVDLIFGSNSILRSYAEFYAQDDNQEKFVRDFINAWVKVMNADRFDLVKKARESVTALQNIHGPRSGKKVNLQ

SEQ ID NO: 19998 - protein, 751 aa, Geobacillus stearothermophilus
MENQNRQNAAQCPFHGSVTNQSSNRTTNKDWWPNQLNLSILHQHDRKTNPHDEEFNYAEEFQKLDYWALKEDLRKLMTESQDWWPADYGHYGPLFIRMAWHSAGTYRIGDGRGGASTGTQRFAPLNSWPDNANLDKARRLLWPIKKKYGNKISWADLFILAGNVAIESMGGKTIGFGGGRVDVWHPEEDVYWGSEKEWLASERYSGDRELENPLAAVQMGLIYVNPEGPDGKPDPKAAARDIRETFRRMGMNDEETVALIAGGHTFGKAHGAGPATHVGPEPEAAPIEAQGLGWISSYGKGKGSDTITSGIEGAWTPTPTQWDTSYFDMLFGYDWWLTKSPAGAWQWMAVDPDEKDLAPDAEDPSKKVPTMMMTTDLALRFDPEYEKIARRFHQNPEEFAEAFARAWFKLTHRDMGPKTRYLGPEVPKEDFIWQDPIPEVDYELTEAEIEEIKAKILNSGLTVSELVKTAWASASTFRNSDKRGGANGARIRLAPQKDWEVNEPERLAKVLSVYEDIQRELPKKVSIADLIVLGGSAAVEKAARDAGFDVKVPFFPGRGDATQEQTDVESFAVLEPFADGFRNYQKQEYSVPPEELLVDKAQLLGLTAPEMTVLVGGLRVLGANYRDLPHGVFTDRIGVLTNDFFVNLLDMNYEWVPTDSGIYEIRDRKTGEVRWTATRVDLIFGSNSILRSYAEFYAQDDNQEKFVRDFINAWVKVMNADRFDLVKKARESVTALQPDNINRSTGTRKLQ

SEQ ID NO: 19999 - protein, 751 aa, Geobacillus stearothermophilus
MENQNRQNAAQCPFHGSVTNQSSNRTTNKDWWPNQLNLSILHQHDRKTNPHDEEFNYAEEFQKLDYWALKEDLRKLMTESQDWWPADYGHYGPLFIRMAWHSAGTYRTGDGRGGASTGTQRFAPLNSWPNNANLDKARRLLWPIKKKYGNKISWADLFILAGNVAIESMGGKTIGFGGGRVDVWHPEEDVYWGSEKEWLASERYSGDRELENPLAAVQMGLTYVNPEGPDGKPDPKAAARDIRETFRRMGMNDEETVALIAGGHTFGKAHGAGPATHVGPEPEAAPIEAQGLGWISSYGKGKGSDTITSGIEGAWTPTPTQWDTSYFDMLFGYDWWLTKSPAGAWQWMAVDPDEKDLAPDAEDPSKKVPTMMMTTDLALRFDPEYEKIARRFHQNPEEFAEAFARAWFKLTHRDMGPKTRYLGPEVPKEDFIWQDPIPEVDYELTEAEIEEIKAKILNSGLTVSELVKTAWASASTFRNSDKRGGANGARIRLAPQKDWEVNEPERLAKVLSVYEDIQRELPKKVSIADLIVLGGSAAVEKAARDAGFDVKVPFFPGRGDATQEQTDVESFAVLEPFADGFRNYQKQEYSVPPEELLVDKAQLLGLTAPEMTVLVGGLRVLGANYRDLPHGVFTDRIGVLTNDFFVNLLDMNYEWVPTDSGIYEIRDRKTGEVRWTATRVDLIFGSNSILRSYAEFYAQDDNQEKFVRDFINAWVKVMNADRFDLVKKARESVTALQFDTSTRSGSGENLQ

SEQ ID NO: 20000 - protein, 751 aa, Geobacillus stearothermophilus
MENQNRQNAAQCPFHGSVTNQSSNRTTNKDWWPNQLNLSILHQHDRKTNPHDEEFNYAEEFQKLDYWALKEDLRKLMTESQDWWPADYGHYGPLFIRMAWHSAGTYRIGDGRGGASTGTQRFAPLNSWPDNANLDKARRLLWPIKKKYGNKISWADLFILAGNVAIESMGGKTIGFGGGRVDVWHPEEDVYWGSEKEWLASERYSGDRELENPLAAVQMGLIYVNPEGPDGKPDPKAAARDIRETFRRMGMNDEETVALIAGGHTFGKAHGAGPATHVGPEPEAAPIEAQGLGWISSYGKGKGSDTITSGIEGAWTPTPTQWDTSYFDMLFGYDWWLTKSPAGAWQWMAVDPDEKDLAPDAEDPSKKVPTMMMTTDLALRFDPEYEKIARRFHQNPEEFAEAFARAWFKLTHRDMGPKTRYLGPEVPKEDFIWQDPIPEVDYELTEAEIEEIKAKILNSGLTVSELVKTAWASASTFRNSDKRGGANGARIRLAPQKDWEVNEPERLAKVLSVYEDIQRELPKKVSIADLIVLGGSAAVEKAARDAGFDVKVPFFPGRGDATQEQTDVESFAVLEPFADGFRNYQKQEYSVPPEELLVDKAQLLGLTAPEMTVLVGGLRVLGANYRDLPHGVFTDRIGVLTNDFFVNLLDMNYEWVPTDSGIYEIRDRKTGEVRWTATRVDLIFGSNSILRSYAEFYAQDDNQEKFVRDFINAWVKVMNADRFDLVKKARESVTALQDHSNVRSEVSDMLQ

SEQ ID NO: 20001 - protein, 735 aa, Geobacillus stearothermophilus
MENQNRQNAAQCPFHGSVTNQSSNRTTNKDWWPNQLNLSILHQHDRKTNPHDEEFNYAEEFQKLDYWALKEDLRKLMTESQDWWPADYGHYGPLFIRMAWHSAGTYRTGDGRGGASTGTQRFAPLNSWPNNANLDKARRLLWPIKKKYGNKISWADLFILAGNVAIESMGGKTIGFGGGRVDVWHPEEDVYWGSEKEWLASERYSGDRELENPLAAVQMGLTYVNPEGPDGKPDPKAAARDIRETFRRMGMNDEETVALIAGGHTFGKAHGAGPATHVGPEPEAAPIEAQGLGWISSYGKGKGSDTITSGIEGAWTPTPTQWDTSYFDMLFGYDWWLTKSPAGAWQWMAVDPDEKDLAPDAEDPSKKVPTMMMTTDLALRFDPEYEKIARRFHQNPEEFAEAFARAWFKLTHRDMGPKTRYLGPEVPKEDFIWQDPIPEVDYELTEAEIEEIKAKILNSGLTVSELVKTAWASASTFRNSDKRGGANGARIRLAPQKDWEVNEPERLAKVLSVYEDIQRELPKKVSIADLIVLGGSAAVEKAARDAGFDVKVPFFPGRGDATQEQTDVESFAVLEPFADGFRNYQKQEYSVPPEELLVDKAQLLGLTAPEMTVLVGGLRVLGANYRDLPHGVFTDRIGVLTNDFFVNLLDMNYEWVPTDSGIYEIRDRKTGEVRWTATRVDLIFGSNSILRSYAEFYAQDDNQEKFVRDFINAWVKVMNADRFDLVKKARESVTA

SEQ ID NO: 20002 - protein, 751 aa, Geobacillus stearothermophilus
MENQNRQNAAQCPFHGSVTNQSSNRTTNKDWWPNQLNLSILHQHDRKTNPHDEEFNYAEEFQKLDYWALKEDLRKLMTESQDWWPADYGHYGPLFIRMAWHSAGTYRIGDGRGGASTGTQRFAPLNSWPDNANLDKARRLLWPIKKKYGNKISWADLFILAGNVAIESMGGKTIGFGGGRVDVWHPEEDVYWGSEKEWLASERYSGDRELENPLAAVQMGLIYVNPEGPDGKPDPKAAARDIRETFRRMGMNDEETVALIAGGHTFGKAHGAGPATHVGPEPEAAPIEAQGLGWISSYGKGKGSDTITSGIEGAWTPTPTQWDTSYFDMLFGYDWWLTKSPAGAWQWMAVDPDEKDLAPDAEDPSKKVPTMMMTTDLALRFDPEYEKIARRFHQNPEEFAEAFARAWFKLTHRDMGPKTRYLGPEVPKEDFIWQDPIPEVDYELTEAEIEEIKAKILNSGLTVSELVKTAWASASTFRNSDKRGGANGARIRLAPQKDWEVNEPERLAKVLSVYEDIQRELPKKVSIADLIVLGGSAAVEKAARDAGFDVKVPFFPGRGDATQEQTDVESFAVLEPFADGFRNYQKQEYSVPPEELLVDKAQLLGLTAPEMTVLVGGLRVLGANYRDLPHGVFTDRIGVLTNDFFVNLLDMNYEWVPTDSGIYEIRDRKTGEVRWTATRVDLIFGSNSILRSYAEFYAQDDNQEKFVRDFINAWVKVMNADRFDLVKKARESVTALQGGNGVRSNIKGILQ

SEQ ID NO: 20003 - protein, 751 aa, Geobacillus stearothermophilus
MENQNRQNAAQCPFHGSVTNQSSNRTTNKDWWPNQLNLSILHQHDRKTNPHDEEFNYAEEFQKLDYWALKEDLRKLMTESQDWWPADYGHYGPLFIRMAWHSAGTYRTGDGRGGASTGTQRFAPLNSWPNNANLDKARRLLWPIKKKYGNKISWADLFILAGNVAIESMGGKTIGFGGGRVDVWHPEEDVYWGSEKEWLASERYSGDRELENPLAAVQMGLTYVNPEGPDGKPDPKAAARDIRETFRRMGMNDEETVALIAGGHTFGKAHGAGPATHVGPEPEAAPIEAQGLGWISSYGKGKGSDTITSGIEGAWTPTPTQWDTSYFDMLFGYDWWLTKSPAGAWQWMAVDPDEKDLAPDAEDPSKKVPTMMMTTDLALRFDPEYEKIARRFHQNPEEFAEAFARAWFKLTHRDMGPKTRYLGPEVPKEDFIWQDPIPEVDYELTEAEIEEIKAKILNSGLTVSELVKTAWASASTFRNSDKRGGANGARIRLAPQKDWEVNEPERLAKVLSVYEDIQRELPKKVSIADLIVLGGSAAVEKAARDAGFDVKVPFFPGRGDATQEQTDVESFAVLEPFADGFRNYQKQEYSVPPEELLVDKAQLLGLTAPEMTVLVGGLRVLGANYRDLPHGVFTDRIGVLTNDFFVNLLDMNYEWVPTDSGIYEIRDRKTGEVRWTATRVDLIFGSNSILRSYAEFYAQDDNQEKFVRDFINAWVKVMNADRFDLVKKARESVTALQGSIYNRSIKGEALQ

SEQ ID NO: 20004 - protein, 751 aa, Geobacillus stearothermophilus
MENQNRQNAAQCPFHGSVTNQSSNRTTNKDWWPNQLNLSILHQHDRKTNPHDEEFNYAEEFQKLDYWALKEDLRKLMTESQDWWPADYGHYGPLFIRMAWHSAGTYRTGDGRGGASTGTQRFAPLNSWPNNANLDKARRLLWPIKKKYGNKISWADLFILAGNVAIESMGGKTIGFGGGRVDVWHPEEDVYWGSEKEWLASERYSGDRELENPLAAVQMGLTYVNPEGPDGKPDPKAAARDIRETFRRMGMNDEETVALIAGGHTFGKAHGAGPATHVGPEPEAAPIEAQGLGWISSYGKGKGSDTITSGIEGAWTPTPTQWDTSYFDMLFGYDWWLTKSPAGAWQWMAVDPDEKDLAPDAEDPSKKVPTMMMTTDLALRFDPEYEKIARRFHQNPEEFAEAFARAWFKLTHRDMGPKTRYLGPEVPKEDFIWQDPIPEVDYELTEAEIEEIKAKILNSGLTVSELVKTAWASASTFRNSDKRGGANGARIRLAPQKDWEVNEPERLAKVLSVYEDIQRELPKKVSIADLIVLGGSAAVEKAARDAGFDVKVPFFPGRGDATQEQTDVESFAVLEPFADGFRNYQKQEYSVPPEELLVDKAQLLGLTAPEMTVLVGGLRVLGANYRDLPHGVFTDRIGVLTNDFFVNLLDMNYEWVPTDSGIYEIRDRKTGEVRWTATRVDLIFGSNSILRSYAEFYAQDDNQEKFVRDFINAWVKVMNADRFDLVKKARESVTALQYVRSHRSNGGRGLQ

SEQ ID NO: 20005 - protein, 751 aa, Geobacillus stearothermophilus
MENQNRQNAAQCPFHGSVTNQSSNRTTNKDWWPNQLNLSILHQHDRKTNPHDEEFNYAEEFQKLDYWALKEDLRKLMTESQDWWPADYGHYGPLFIRMAWHSAGTYRIGDGRGGASTGTQRFAPLNSWPDNANLDKARRLLWPIKKKYGNKISWADLFILAGNVAIESMGGKTIGFGGGRVDVWHPEEDVYWGSEKEWLASERYSGDRELENPLAAVQMGLIYVNPEGPDGKPDPKAAARDIRETFRRMGMNDEETVALIAGGHTFGKAHGAGPATHVGPEPEAAPIEAQGLGWISSYGKGKGSDTITSGIEGAWTPTPTQWDTSYFDMLFGYDWWLTKSPAGAWQWMAVDPDEKDLAPDAEDPSKKVPTMMMTTDLALRFDPEYEKIARRFHQNPEEFAEAFARAWFKLTHRDMGPKTRYLGPEVPKEDFIWQDPIPEVDYELTEAEIEEIKAKILNSGLTVSELVKTAWASASTFRNSDKRGGANGARIRLAPQKDWEVNEPERLAKVLSVYEDIQRELPKKVSIADLIVLGGSAAVEKAARDAGFDVKVPFFPGRGDATQEQTDVESFAVLEPFADGFRNYQKQEYSVPPEELLVDKAQLLGLTAPEMTVLVGGLRVLGANYRDLPHGVFTDRIGVLTNDFFVNLLDMNYEWVPTDSGIYEIRDRKTGEVRWTATRVDLIFGSNSILRSYAEFYAQDDNQEKFVRDFINAWVKVMNADRFDLVKKARESVTALQPYSFIRSEGSAGLQ

SEQ ID NO: 20006 - protein, 746 aa, Geobacillus stearothermophilus
MENQNRQNAAQCPFHGSVTNQSSNRTTNKDWWPNQLNLSILHQHDRKTNPHDEEFNYAEEFQKLDYWALKEDLRKLMTESQDWWPADYGHYGPLFIRMAWHSAGTYRIGDGRGGASTGTQRFAPLNSWPDNANLDKARRLLWPIKKKYGNKISWADLFILAGNVAIESMGGKTIGFGGGRVDVWHPEEDVYWGSEKEWLASERYSGDRELENPLAAVQMGLIYVNPEGPDGKPDPKAAARDIRETFRRMGMNDEETVALIAGGHTFGKAHGAGPATHVGPEPEAAPIEAQGLGWISSYGKGKGSDTITSGIEGAWTPTPTQWDTSYFDMLFGYDWWLTKSPAGAWQWMAVDPDEKDLAPDAEDPSKKVPTMMMTTDLALRFDPEYEKIARRFHQNPEEFAEAFARAWFKLTHRDMGPKTRYLGPEVPKEDFIWQDPIPEVDYELTEAEIEEIKAKILNSGLTVSELVKTAWASASTFRNSDKRGGANGARIRLAPQKDWEVNEPERLAKVLSVYEDIQRELPKKVSIADLIVLGGSAAVEKAARDAGFDVKVPFFPGRGDATQEQTDVESFAVLEPFADGFRNYQKQEYSVPPEELLVDKAQLLGLTAPEMTVLVGGLRVLGANYRDLPHGVFTDRIGVLTNDFFVNLLDMNYEWVPTDSGIYEIRDRKTGEVRWTATRVDLIFGSNSILRSYAEFYAQDDNQEKFVRDFINAWVKVMNADRFDLVKKARESVTALQLSGIIDLTG

SEQ ID NO: 20007 - protein, 751 aa, Geobacillus stearothermophilus
MENQNRQNAAQCPFHGSVTNQSSNRTTNKDWWPNQLNLSILHQHDRKTNPHDEEFNYAEEFQKLDYWALKEDLRKLMTESQDWWPADYGHYGPLFIRMAWHSAGTYRTGDGRGGASTGTQRFAPLNSWPNNANLDKARRLLWPIKKKYGNKISWADLFILAGNVAIESMGGKTIGFGGGRVDVWHPEEDVYWGSEKEWLASERYSGDRELENPLAAVQMGLTYVNPEGPDGKPDPKAAARDIRETFRRMGMNDEETVALIAGGHTFGKAHGAGPATHVGPEPEAAPIEAQGLGWISSYGKGKGSDTITSGIEGAWTPTPTQWDTSYFDMLFGYDWWLTKSPAGAWQWMAVDPDEKDLAPDAEDPSKKVPTMMMTTDLALRFDPEYEKIARRFHQNPEEFAEAFARAWFKLTHRDMGPKTRYLGPEVPKEDFIWQDPIPEVDYELTEAEIEEIKAKILNSGLTVSELVKTAWASASTFRNSDKRGGANGARIRLAPQKDWEVNEPERLAKVLSVYEDIQRELPKKVSIADLIVLGGSAAVEKAARDAGFDVKVPFFPGRGDATQEQTDVESFAVLEPFADGFRNYQKQEYSVPPEELLVDKAQLLGLTAPEMTVLVGGLRVLGANYRDLPHGVFTDRIGVLTNDFFVNLLDMNYEWVPTDSGIYEIRDRKTGEVRWTATRVDLIFGSNSILRSYAEFYAQDDNQEKFVRDFINAWVKVMNADRFDLVKKARESVTALQDALSYRSNTAVRLQ

SEQ ID NO: 20008 - protein, 751 aa, Geobacillus stearothermophilus
MENQNRQNAAQCPFHGSVTNQSSNRTTNKDWWPNQLNLSILHQHDRKTNPHDEEFNYAEEFQKLDYWALKEDLRKLMTESQDWWPADYGHYGPLFIRMAWHSAGTYRTGDGRGGASTGTQRFAPLNSWPNNANLDKARRLLWPIKKKYGNKISWADLFILAGNVAIESMGGKTIGFGGGRVDVWHPEEDVYWGSEKEWLASERYSGDRELENPLAAVQMGLTYVNPEGPDGKPDPKAAARDIRETFRRMGMNDEETVALIAGGHTFGKAHGAGPATHVGPEPEAAPIEAQGLGWISSYGKGKGSDTITSGIEGAWTPTPTQWDTSYFDMLFGYDWWLTKSPAGAWQWMAVDPDEKDLAPDAEDPSKKVPTMMMTTDLALRFDPEYEKIARRFHQNPEEFAEAFARAWFKLTHRDMGPKTRYLGPEVPKEDFIWQDPIPEVDYELTEAEIEEIKAKILNSGLTVSELVKTAWASASTFRNSDKRGGANGARIRLAPQKDWEVNEPERLAKVLSVYEDIQRELPKKVSIADLIVLGGSAAVEKAARDAGFDVKVPFFPGRGDATQEQTDVESFAVLEPFADGFRNYQKQEYSVPPEELLVDKAQLLGLTAPEMTVLVGGLRVLGANYRDLPHGVFTDRIGVLTNDFFVNLLDMNYEWVPTDSGIYEIRDRKTGEVRWTATRVDLIFGSNSILRSYAEFYAQDDNQEKFVRDFINAWVKVMNADRFDLVKKARESVTALQDYTNIRSGGVDTLQ

SEQ ID NO: 20009 - protein, 751 aa, Geobacillus stearothermophilus
MENQNRQNAAQCPFHGSVTNQSSNRTTNKDWWPNQLNLSILHQHDRKTNPHDEEFNYAEEFQKLDYWALKEDLRKLMTESQDWWPADYGHYGPLFIRMAWHSAGTYRIGDGRGGASTGTQRFAPLNSWPDNANLDKARRLLWPIKKKYGNKISWADLFILAGNVAIESMGGKTIGFGGGRVDVWHPEEDVYWGSEKEWLASERYSGDRELENPLAAVQMGLIYVNPEGPDGKPDPKAAARDIRETFRRMGMNDEETVALIAGGHTFGKAHGAGPATHVGPEPEAAPIEAQGLGWISSYGKGKGSDTITSGIEGAWTPTPTQWDTSYFDMLFGYDWWLTKSPAGAWQWMAVDPDEKDLAPDAEDPSKKVPTMMMTTDLALRFDPEYEKIARRFHQNPEEFAEAFARAWFKLTHRDMGPKTRYLGPEVPKEDFIWQDPIPEVDYELTEAEIEEIKAKILNSGLTVSELVKTAWASASTFRNSDKRGGANGARIRLAPQKDWEVNEPERLAKVLSVYEDIQRELPKKVSIADLIVLGGSAAVEKAARDAGFDVKVPFFPGRGDATQEQTDVESFAVLEPFADGFRNYQKQEYSVPPEELLVDKAQLLGLTAPEMTVLVGGLRVLGANYRDLPHGVFTDRIGVLTNDFFVNLLDMNYEWVPTDSGIYEIRDRKTGEVRWTATRVDLIFGSNSILRSYAEFYAQDDNQEKFVRDFINAWVKVMNADRFDLVKKARESVTALQIDDYNRSKDNINLQ

SEQ ID NO: 20010 - protein, 751 aa, Geobacillus stearothermophilus
MENQNRQNAAQCPFHGSVTNQSSNRTTNKDWWPNQLNLSILHQHDRKTNPHDEEFNYAEEFQKLDYWALKEDLRKLMTESQDWWPADYGHYGPLFIRMAWHSAGTYRIGDGRGGASTGTQRFAPLNSWPDNANLDKARRLLWPIKKKYGNKISWADLFILAGNVAIESMGGKTIGFGGGRVDVWHPEEDVYWGSEKEWLASERYSGDRELENPLAAVQMGLIYVNPEGPDGKPDPKAAARDIRETFRRMGMNDEETVALIAGGHTFGKAHGAGPATHVGPEPEAAPIEAQGLGWISSYGKGKGSDTITSGIEGAWTPTPTQWDTSYFDMLFGYDWWLTKSPAGAWQWMAVDPDEKDLAPDAEDPSKKVPTMMMTTDLALRFDPEYEKIARRFHQNPEEFAEAFARAWFKLTHRDMGPKTRYLGPEVPKEDFIWQDPIPEVDYELTEAEIEEIKAKILNSGLTVSELVKTAWASASTFRNSDKRGGANGARIRLAPQKDWEVNEPERLAKVLSVYEDIQRELPKKVSIADLIVLGGSAAVEKAARDAGFDVKVPFFPGRGDATQEQTDVESFAVLEPFADGFRNYQKQEYSVPPEELLVDKAQLLGLTAPEMTVLVGGLRVLGANYRDLPHGVFTDRIGVLTNDFFVNLLDMNYEWVPTDSGIYEIRDRKTGEVRWTATRVDLIFGSNSILRSYAEFYAQDDNQEKFVRDFINAWVKVMNADRFDLVKKARESVTALQVTIFYRSAAGEELQ

SEQ ID NO: 20011 - protein, 751 aa, Geobacillus stearothermophilus
MENQNRQNAAQCPFHGSVTNQSSNRTTNKDWWPNQLNLSILHQHDRKTNPHDEEFNYAEEFQKLDYWALKEDLRKLMTESQDWWPADYGHYGPLFIRMAWHSAGTYRIGDGRGGASTGTQRFAPLNSWPDNANLDKARRLLWPIKKKYGNKISWADLFILAGNVAIESMGGKTIGFGGGRVDVWHPEEDVYWGSEKEWLASERYSGDRELENPLAAVQMGLIYVNPEGPDGKPDPKAAARDIRETFRRMGMNDEETVALIAGGHTFGKAHGAGPATHVGPEPEAAPIEAQGLGWISSYGKGKGSDTITSGIEGAWTPTPTQWDTSYFDMLFGYDWWLTKSPAGAWQWMAVDPDEKDLAPDAEDPSKKVPTMMMTTDLALRFDPEYEKIARRFHQNPEEFAEAFARAWFKLTHRDMGPKTRYLGPEVPKEDFIWQDPIPEVDYELTEAEIEEIKAKILNSGLTVSELVKTAWASASTFRNSDKRGGANGARIRLAPQKDWEVNEPERLAKVLSVYEDIQRELPKKVSIADLIVLGGSAAVEKAARDAGFDVKVPFFPGRGDATQEQTDVESFAVLEPFADGFRNYQKQEYSVPPEELLVDKAQLLGLTAPEMTVLVGGLRVLGANYRDLPHGVFTDRIGVLTNDFFVNLLDMNYEWVPTDSGIYEIRDRKTGEVRWTATRVDLIFGSNSILRSYAEFYAQDDNQEKFVRDFINAWVKVMNADRFDLVKKARESVTALQNNSYRRSENDGDLQ

SEQ ID NO: 20012 - protein, 754 aa, Geobacillus stearothermophilus
MENQNRQNAAQCPFHGSVTNQSSNRTTNKDWWPNQLNLSILHQHDRKTNPHDEEFNYAEEFQKLDYWALKEDLRKLMTESQDWWPADYGHYGPLFIRMAWHSAGTYRIGDGRGGASTGTQRFAPLNSWPDNANLDKARRLLWPIKKKYGNKISWADLFILAGNVAIESMGGKTIGFGGGRVDVWHPEEDVYWGSEKEWLASERYSGDRELENPLAAVQMGLIYVNPEGPDGKPDPKAAARDIRETFRRMGMNDEETVALIAGGHTFGKAHGAGPATHVGPEPEAAPIEAQGLGWISSYGKGKGSDTITSGIEGAWTPTPTQWDTSYFDMLFGYDWWLTKSPAGAWQWMAVDPDEKDLAPDAEDPSKKVPTMMMTTDLALRFDPEYEKIARRFHQNPEEFAEAFARAWFKLTHRDMGPKTRYLGPEVPKEDFIWQDPIPEVDYELTEAEIEEIKAKILNSGLTVSELVKTAWASASTFRNSDKRGGANGARIRLAPQKDWEVNEPERLAKVLSVYEDIQRELPKKVSIADLIVLGGSAAVEKAARDAGFDVKVPFFPGRGDATQEQTDVESFAVLEPFADGFRNYQKQEYSVPPEELLVDKAQLLGLTAPEMTVLVGGLRVLGANYRDLPHGVFTDRIGVLTNDFFVNLLDMNYEWVPTDSGIYEIRDRKTGEVRWTATRVDLIFGSNSILRSYAEFYAQDDNQEKFVRDFINAWVKVMNADRFDLVKKARESVTALQSYTTPFLDLRLVLNCSK

SEQ ID NO: 20013 - protein, 751 aa, Geobacillus stearothermophilus
MENQNRQNAAQCPFHGSVTNQSSNRTTNKDWWPNQLNLSILHQHDRKTNPHDEEFNYAEEFQKLDYWALKEDLRKLMTESQDWWPADYGHYGPLFIRMAWHSAGTYRTGDGRGGASTGTQRFAPLNSWPNNANLDKARRLLWPIKKKYGNKISWADLFILAGNVAIESMGGKTIGFGGGRVDVWHPEEDVYWGSEKEWLASERYSGDRELENPLAAVQMGLTYVNPEGPDGKPDPKAAARDIRETFRRMGMNDEETVALIAGGHTFGKAHGAGPATHVGPEPEAAPIEAQGLGWISSYGKGKGSDTITSGIEGAWTPTPTQWDTSYFDMLFGYDWWLTKSPAGAWQWMAVDPDEKDLAPDAEDPSKKVPTMMMTTDLALRFDPEYEKIARRFHQNPEEFAEAFARAWFKLTHRDMGPKTRYLGPEVPKEDFIWQDPIPEVDYELTEAEIEEIKAKILNSGLTVSELVKTAWASASTFRNSDKRGGANGARIRLAPQKDWEVNEPERLAKVLSVYEDIQRELPKKVSIADLIVLGGSAAVEKAARDAGFDVKVPFFPGRGDATQEQTDVESFAVLEPFADGFRNYQKQEYSVPPEELLVDKAQLLGLTAPEMTVLVGGLRVLGANYRDLPHGVFTDRIGVLTNDFFVNLLDMNYEWVPTDSGIYEIRDRKTGEVRWTATRVDLIFGSNSILRSYAEFYAQDDNQEKFVRDFINAWVKVMNADRFDLVKKARESVTALQTPRYVRSRDGNELQ

SEQ ID NO: 20014 - protein, 753 aa, Geobacillus stearothermophilus
MENQNRQNAAQCPFHGSVTNQSSNRTTNKDWWPNQLNLSILHQHDRKTNPHDEEFNYAEEFQKLDYWALKEDLRKLMTESQDWWPADYGHYGPLFIRMAWHSAGTYRIGDGRGGASTGTQRFAPLNSWPDNANLDKARRLLWPIKKKYGNKISWADLFILAGNVAIESMGGKTIGFGGGRVDVWHPEEDVYWGSEKEWLASERYSGDRELENPLAAVQMGLIYVNPEGPDGKPDPKAAARDIRETFRRMGMNDEETVALIAGGHTFGKAHGAGPATHVGPEPEAAPIEAQGLGWISSYGKGKGSDTITSGIEGAWTPTPTQWDTSYFDMLFGYDWWLTKSPAGAWQWMAVDPDEKDLAPDAEDPSKKVPTMMMTTDLALRFDPEYEKIARRFHQNPEEFAEAFARAWFKLTHRDMGPKTRYLGPEVPKEDFIWQDPIPEVDYELTEAEIEEIKAKILNSGLTVSELVKTAWASASTFRNSDKRGGANGARIRLAPQKDWEVNEPERLAKVLSVYEDIQRELPKKVSIADLIVLGGSAAVEKAARDAGFDVKVPFFPGRGDATQEQTDVESFAVLEPFADGFRNYQKQEYSVPPEELLVDKAQLLGLTAPEMTVLVGGLRVLGANYRDLPHGVFTDRIGVLTNDFFVNLLDMNYEWVPTDSGIYEIRDRKTGEVRWTATRVDLIFGSNSILRSYAEFYAQDDNQEKFVRDFINAWVKVMNADRFDLVKKARESVTALQALDNTDLRGGCTAVSK

SEQ ID NO: 20015 - protein, 751 aa, Geobacillus stearothermophilus
MENQNRQNAAQCPFHGSVTNQSSNRTTNKDWWPNQLNLSILHQHDRKTNPHDEEFNYAEEFQKLDYWALKEDLRKLMTESQDWWPADYGHYGPLFIRMAWHSAGTYRIGDGRGGASTGTQRFAPLNSWPDNANLDKARRLLWPIKKKYGNKISWADLFILAGNVAIESMGGKTIGFGGGRVDVWHPEEDVYWGSEKEWLASERYSGDRELENPLAAVQMGLIYVNPEGPDGKPDPKAAARDIRETFRRMGMNDEETVALIAGGHTFGKAHGAGPATHVGPEPEAAPIEAQGLGWISSYGKGKGSDTITSGIEGAWTPTPTQWDTSYFDMLFGYDWWLTKSPAGAWQWMAVDPDEKDLAPDAEDPSKKVPTMMMTTDLALRFDPEYEKIARRFHQNPEEFAEAFARAWFKLTHRDMGPKTRYLGPEVPKEDFIWQDPIPEVDYELTEAEIEEIKAKILNSGLTVSELVKTAWASASTFRNSDKRGGANGARIRLAPQKDWEVNEPERLAKVLSVYEDIQRELPKKVSIADLIVLGGSAAVEKAARDAGFDVKVPFFPGRGDATQEQTDVESFAVLEPFADGFRNYQKQEYSVPPEELLVDKAQLLGLTAPEMTVLVGGLRVLGANYRDLPHGVFTDRIGVLTNDFFVNLLDMNYEWVPTDSGIYEIRDRKTGEVRWTATRVDLIFGSNSILRSYAEFYAQDDNQEKFVRDFINAWVKVMNADRFDLVKKARESVTALQTYCYPRSKSKENLQ

SEQ ID NO: 20016 - protein, 751 aa, Geobacillus stearothermophilus
MENQNRQNAAQCPFHGSVTNQSSNRTTNKDWWPNQLNLSILHQHDRKTNPHDEEFNYAEEFQKLDYWALKEDLRKLMTESQDWWPADYGHYGPLFIRMAWHSAGTYRTGDGRGGASTGTQRFAPLNSWPNNANLDKARRLLWPIKKKYGNKISWADLFILAGNVAIESMGGKTIGFGGGRVDVWHPEEDVYWGSEKEWLASERYSGDRELENPLAAVQMGLTYVNPEGPDGKPDPKAAARDIRETFRRMGMNDEETVALIAGGHTFGKAHGAGPATHVGPEPEAAPIEAQGLGWISSYGKGKGSDTITSGIEGAWTPTPTQWDTSYFDMLFGYDWWLTKSPAGAWQWMAVDPDEKDLAPDAEDPSKKVPTMMMTTDLALRFDPEYEKIARRFHQNPEEFAEAFARAWFKLTHRDMGPKTRYLGPEVPKEDFIWQDPIPEVDYELTEAEIEEIKAKILNSGLTVSELVKTAWASASTFRNSDKRGGANGARIRLAPQKDWEVNEPERLAKVLSVYEDIQRELPKKVSIADLIVLGGSAAVEKAARDAGFDVKVPFFPGRGDATQEQTDVESFAVLEPFADGFRNYQKQEYSVPPEELLVDKAQLLGLTAPEMTVLVGGLRVLGANYRDLPHGVFTDRIGVLTNDFFVNLLDMNYEWVPTDSGIYEIRDRKTGEVRWTATRVDLIFGSNSILRSYAEFYAQDDNQEKFVRDFINAWVKVMNADRFDLVKKARESVTALQDCYSVRSNDANTLQ

SEQ ID NO: 20017 - protein, 751 aa, Geobacillus stearothermophilus
MENQNRQNAAQCPFHGSVTNQSSNRTTNKDWWPNQLNLSILHQHDRKTNPHDEEFNYAEEFQKLDYWALKEDLRKLMTESQDWWPADYGHYGPLFIRMAWHSAGTYRTGDGRGGASTGTQRFAPLNSWPNNANLDKARRLLWPIKKKYGNKISWADLFILAGNVAIESMGGKTIGFGGGRVDVWHPEEDVYWGSEKEWLASERYSGDRELENPLAAVQMGLTYVNPEGPDGKPDPKAAARDIRETFRRMGMNDEETVALIAGGHTFGKAHGAGPATHVGPEPEAAPIEAQGLGWISSYGKGKGSDTITSGIEGAWTPTPTQWDTSYFDMLFGYDWWLTKSPAGAWQWMAVDPDEKDLAPDAEDPSKKVPTMMMTTDLALRFDPEYEKIARRFHQNPEEFAEAFARAWFKLTHRDMGPKTRYLGPEVPKEDFIWQDPIPEVDYELTEAEIEEIKAKILNSGLTVSELVKTAWASASTFRNSDKRGGANGARIRLAPQKDWEVNEPERLAKVLSVYEDIQRELPKKVSIADLIVLGGSAAVEKAARDAGFDVKVPFFPGRGDATQEQTDVESFAVLEPFADGFRNYQKQEYSVPPEELLVDKAQLLGLTAPEMTVLVGGLRVLGANYRDLPHGVFTDRIGVLTNDFFVNLLDMNYEWVPTDSGIYEIRDRKTGEVRWTATRVDLIFGSNSILRSYAEFYAQDDNQEKFVRDFINAWVKVMNADRFDLVKKARESVTALQNSFVCRSVGTIDLQ

SEQ ID NO: 20018 - protein, 751 aa, Geobacillus stearothermophilus
MENQNRQNAAQCPFHGSVTNQSSNRTTNKDWWPNQLNLSILHQHDRKTNPHDEEFNYAEEFQKLDYWALKEDLRKLMTESQDWWPADYGHYGPLFIRMAWHSAGTYRIGDGRGGASTGTQRFAPLNSWPDNANLDKARRLLWPIKKKYGNKISWADLFILAGNVAIESMGGKTIGFGGGRVDVWHPEEDVYWGSEKEWLASERYSGDRELENPLAAVQMGLIYVNPEGPDGKPDPKAAARDIRETFRRMGMNDEETVALIAGGHTFGKAHGAGPATHVGPEPEAAPIEAQGLGWISSYGKGKGSDTITSGIEGAWTPTPTQWDTSYFDMLFGYDWWLTKSPAGAWQWMAVDPDEKDLAPDAEDPSKKVPTMMMTTDLALRFDPEYEKIARRFHQNPEEFAEAFARAWFKLTHRDMGPKTRYLGPEVPKEDFIWQDPIPEVDYELTEAEIEEIKAKILNSGLTVSELVKTAWASASTFRNSDKRGGANGARIRLAPQKDWEVNEPERLAKVLSVYEDIQRELPKKVSIADLIVLGGSAAVEKAARDAGFDVKVPFFPGRGDATQEQTDVESFAVLEPFADGFRNYQKQEYSVPPEELLVDKAQLLGLTAPEMTVLVGGLRVLGANYRDLPHGVFTDRIGVLTNDFFVNLLDMNYEWVPTDSGIYEIRDRKTGEVRWTATRVDLIFGSNSILRSYAEFYAQDDNQEKFVRDFINAWVKVMNADRFDLVKKARESVTALQDCSIIRSDVTNKLQ

SEQ ID NO: 20019 - protein, 751 aa, Geobacillus stearothermophilus
MENQNRQNAAQCPFHGSVTNQSSNRTTNKDWWPNQLNLSILHQHDRKTNPHDEEFNYAEEFQKLDYWALKEDLRKLMTESQDWWPADYGHYGPLFIRMAWHSAGTYRTGDGRGGASTGTQRFAPLNSWPNNANLDKARRLLWPIKKKYGNKISWADLFILAGNVAIESMGGKTIGFGGGRVDVWHPEEDVYWGSEKEWLASERYSGDRELENPLAAVQMGLTYVNPEGPDGKPDPKAAARDIRETFRRMGMNDEETVALIAGGHTFGKAHGAGPATHVGPEPEAAPIEAQGLGWISSYGKGKGSDTITSGIEGAWTPTPTQWDTSYFDMLFGYDWWLTKSPAGAWQWMAVDPDEKDLAPDAEDPSKKVPTMMMTTDLALRFDPEYEKIARRFHQNPEEFAEAFARAWFKLTHRDMGPKTRYLGPEVPKEDFIWQDPIPEVDYELTEAEIEEIKAKILNSGLTVSELVKTAWASASTFRNSDKRGGANGARIRLAPQKDWEVNEPERLAKVLSVYEDIQRELPKKVSIADLIVLGGSAAVEKAARDAGFDVKVPFFPGRGDATQEQTDVESFAVLEPFADGFRNYQKQEYSVPPEELLVDKAQLLGLTAPEMTVLVGGLRVLGANYRDLPHGVFTDRIGVLTNDFFVNLLDMNYEWVPTDSGIYEIRDRKTGEVRWTATRVDLIFGSNSILRSYAEFYAQDDNQEKFVRDFINAWVKVMNADRFDLVKKARESVTALQTGFYHRSSTKVSLQ

SEQ ID NO: 20020 - protein, 751 aa, Geobacillus stearothermophilus
MENQNRQNAAQCPFHGSVTNQSSNRTTNKDWWPNQLNLSILHQHDRKTNPHDEEFNYAEEFQKLDYWALKEDLRKLMTESQDWWPADYGHYGPLFIRMAWHSAGTYRIGDGRGGASTGTQRFAPLNSWPDNANLDKARRLLWPIKKKYGNKISWADLFILAGNVAIESMGGKTIGFGGGRVDVWHPEEDVYWGSEKEWLASERYSGDRELENPLAAVQMGLIYVNPEGPDGKPDPKAAARDIRETFRRMGMNDEETVALIAGGHTFGKAHGAGPATHVGPEPEAAPIEAQGLGWISSYGKGKGSDTITSGIEGAWTPTPTQWDTSYFDMLFGYDWWLTKSPAGAWQWMAVDPDEKDLAPDAEDPSKKVPTMMMTTDLALRFDPEYEKIARRFHQNPEEFAEAFARAWFKLTHRDMGPKTRYLGPEVPKEDFIWQDPIPEVDYELTEAEIEEIKAKILNSGLTVSELVKTAWASASTFRNSDKRGGANGARIRLAPQKDWEVNEPERLAKVLSVYEDIQRELPKKVSIADLIVLGGSAAVEKAARDAGFDVKVPFFPGRGDATQEQTDVESFAVLEPFADGFRNYQKQEYSVPPEELLVDKAQLLGLTAPEMTVLVGGLRVLGANYRDLPHGVFTDRIGVLTNDFFVNLLDMNYEWVPTDSGIYEIRDRKTGEVRWTATRVDLIFGSNSILRSYAEFYAQDDNQEKFVRDFINAWVKVMNADRFDLVKKARESVTALQFNSSIRSIITKALQ

SEQ ID NO: 20021 - protein, 751 aa, Geobacillus stearothermophilus
MENQNRQNAAQCPFHGSVTNQSSNRTTNKDWWPNQLNLSILHQHDRKTNPHDEEFNYAEEFQKLDYWALKEDLRKLMTESQDWWPADYGHYGPLFIRMAWHSAGTYRIGDGRGGASTGTQRFAPLNSWPDNANLDKARRLLWPIKKKYGNKISWADLFILAGNVAIESMGGKTIGFGGGRVDVWHPEEDVYWGSEKEWLASERYSGDRELENPLAAVQMGLIYVNPEGPDGKPDPKAAARDIRETFRRMGMNDEETVALIAGGHTFGKAHGAGPATHVGPEPEAAPIEAQGLGWISSYGKGKGSDTITSGIEGAWTPTPTQWDTSYFDMLFGYDWWLTKSPAGAWQWMAVDPDEKDLAPDAEDPSKKVPTMMMTTDLALRFDPEYEKIARRFHQNPEEFAEAFARAWFKLTHRDMGPKTRYLGPEVPKEDFIWQDPIPEVDYELTEAEIEEIKAKILNSGLTVSELVKTAWASASTFRNSDKRGGANGARIRLAPQKDWEVNEPERLAKVLSVYEDIQRELPKKVSIADLIVLGGSAAVEKAARDAGFDVKVPFFPGRGDATQEQTDVESFAVLEPFADGFRNYQKQEYSVPPEELLVDKAQLLGLTAPEMTVLVGGLRVLGANYRDLPHGVFTDRIGVLTNDFFVNLLDMNYEWVPTDSGIYEIRDRKTGEVRWTATRVDLIFGSNSILRSYAEFYAQDDNQEKFVRDFINAWVKVMNADRFDLVKKARESVTALQFNISSRSVSSGNLQ

SEQ ID NO: 20022 - protein, 751 aa, Geobacillus stearothermophilus
MENQNRQNAAQCPFHGSVTNQSSNRTTNKDWWPNQLNLSILHQHDRKTNPHDEEFNYAEEFQKLDYWALKEDLRKLMTESQDWWPADYGHYGPLFIRMAWHSAGTYRTGDGRGGASTGTQRFAPLNSWPNNANLDKARRLLWPIKKKYGNKISWADLFILAGNVAIESMGGKTIGFGGGRVDVWHPEEDVYWGSEKEWLASERYSGDRELENPLAAVQMGLTYVNPEGPDGKPDPKAAARDIRETFRRMGMNDEETVALIAGGHTFGKAHGAGPATHVGPEPEAAPIEAQGLGWISSYGKGKGSDTITSGIEGAWTPTPTQWDTSYFDMLFGYDWWLTKSPAGAWQWMAVDPDEKDLAPDAEDPSKKVPTMMMTTDLALRFDPEYEKIARRFHQNPEEFAEAFARAWFKLTHRDMGPKTRYLGPEVPKEDFIWQDPIPEVDYELTEAEIEEIKAKILNSGLTVSELVKTAWASASTFRNSDKRGGANGARIRLAPQKDWEVNEPERLAKVLSVYEDIQRELPKKVSIADLIVLGGSAAVEKAARDAGFDVKVPFFPGRGDATQEQTDVESFAVLEPFADGFRNYQKQEYSVPPEELLVDKAQLLGLTAPEMTVLVGGLRVLGANYRDLPHGVFTDRIGVLTNDFFVNLLDMNYEWVPTDSGIYEIRDRKTGEVRWTATRVDLIFGSNSILRSYAEFYAQDDNQEKFVRDFINAWVKVMNADRFDLVKKARESVTALQSSNRIRSVVGESLQ

SEQ ID NO: 20023 - protein, 748 aa, Geobacillus stearothermophilus
MENQNRQNAAQCPFHGSVTNQSSNRTTNKDWWPNQLNLSILHQHDRKTNPHDEEFNYAEEFQKLDYWALKEDLRKLMTESQDWWPADYGHYGPLFIRMAWHSAGTYRIGDGRGGASTGTQRFAPLNSWPDNANLDKARRLLWPIKKKYGNKISWADLFILAGNVAIESMGGKTIGFGGGRVDVWHPEEDVYWGSEKEWLASERYSGDRELENPLAAVQMGLIYVNPEGPDGKPDPKAAARDIRETFRRMGMNDEETVALIAGGHTFGKAHGAGPATHVGPEPEAAPIEAQGLGWISSYGKGKGSDTITSGIEGAWTPTPTQWDTSYFDMLFGYDWWLTKSPAGAWQWMAVDPDEKDLAPDAEDPSKKVPTMMMTTDLALRFDPEYEKIARRFHQNPEEFAEAFARAWFKLTHRDMGPKTRYLGPEVPKEDFIWQDPIPEVDYELTEAEIEEIKAKILNSGLTVSELVKTAWASASTFRNSDKRGGANGARIRLAPQKDWEVNEPERLAKVLSVYEDIQRELPKKVSIADLIVLGGSAAVEKAARDAGFDVKVPFFPGRGDATQEQTDVESFAVLEPFADGFRNYQKQEYSVPPEELLVDKAQLLGLTAPEMTVLVGGLRVLGANYRDLPHGVFTDRIGVLTNDFFVNLLDMNYEWVPTDSGIYEIRDRKTGEVRWTATRVDLIFGSNSILRSYAEFYAQDDNQEKFVRDFINAWVKVMNADRFDLVKKARESVTALQYFISIRSKIAG

SEQ ID NO: 20024 - protein, 751 aa, Geobacillus stearothermophilus
MENQNRQNAAQCPFHGSVTNQSSNRTTNKDWWPNQLNLSILHQHDRKTNPHDEEFNYAEEFQKLDYWALKEDLRKLMTESQDWWPADYGHYGPLFIRMAWHSAGTYRIGDGRGGASTGTQRFAPLNSWPDNANLDKARRLLWPIKKKYGNKISWADLFILAGNVAIESMGGKTIGFGGGRVDVWHPEEDVYWGSEKEWLASERYSGDRELENPLAAVQMGLIYVNPEGPDGKPDPKAAARDIRETFRRMGMNDEETVALIAGGHTFGKAHGAGPATHVGPEPEAAPIEAQGLGWISSYGKGKGSDTITSGIEGAWTPTPTQWDTSYFDMLFGYDWWLTKSPAGAWQWMAVDPDEKDLAPDAEDPSKKVPTMMMTTDLALRFDPEYEKIARRFHQNPEEFAEAFARAWFKLTHRDMGPKTRYLGPEVPKEDFIWQDPIPEVDYELTEAEIEEIKAKILNSGLTVSELVKTAWASASTFRNSDKRGGANGARIRLAPQKDWEVNEPERLAKVLSVYEDIQRELPKKVSIADLIVLGGSAAVEKAARDAGFDVKVPFFPGRGDATQEQTDVESFAVLEPFADGFRNYQKQEYSVPPEELLVDKAQLLGLTAPEMTVLVGGLRVLGANYRDLPHGVFTDRIGVLTNDFFVNLLDMNYEWVPTDSGIYEIRDRKTGEVRWTATRVDLIFGSNSILRSYAEFYAQDDNQEKFVRDFINAWVKVMNADRFDLVKKARESVTALQSFNLRRSAGTTRLQ

SEQ ID NO: 20025 - protein, 752 aa, Geobacillus stearothermophilus
MENQNRQNAAQCPFHGSVTNQSSNRTTNKDWWPNQLNLSILHQHDRKTNPHDEEFNYAEEFQKLDYWALKEDLRKLMTESQDWWPADYGHYGPLFIRMAWHSAGTYRTGDGRGGASTGTQRFAPLNSWPNNANLDKARRLLWPIKKKYGNKISWADLFILAGNVAIESMGGKTIGFGGGRVDVWHPEEDVYWGSEKEWLASERYSGDRELENPLAAVQMGLTYVNPEGPDGKPDPKAAARDIRETFRRMGMNDEETVALIAGGHTFGKAHGAGPATHVGPEPEAAPIEAQGLGWISSYGKGKGSDTITSGIEGAWTPTPTQWDTSYFDMLFGYDWWLTKSPAGAWQWMAVDPDEKDLAPDAEDPSKKVPTMMMTTDLALRFDPEYEKIARRFHQNPEEFAEAFARAWFKLTHRDMGPKTRYLGPEVPKEDFIWQDPIPEVDYELTEAEIEEIKAKILNSGLTVSELVKTAWASASTFRNSDKRGGANGARIRLAPQKDWEVNEPERLAKVLSVYEDIQRELPKKVSIADLIVLGGSAAVEKAARDAGFDVKVPFFPGRGDATQEQTDVESFAVLEPFADGFRNYQKQEYSVPPEELLVDKAQLLGLTAPEMTVLVGGLRVLGANYRDLPHGVFTDRIGVLTNDFFVNLLDMNYEWVPTDSGIYEIRDRKTGEVRWTATRVDLIFGSNSILRSYAEFYAQDDNQEKFVRDFINAWVKVMNADRFDLVKKARESVTALQCSPISRSTVGRVCSK

SEQ ID NO: 20026 - protein, 751 aa, Geobacillus stearothermophilus
MENQNRQNAAQCPFHGSVTNQSSNRTTNKDWWPNQLNLSILHQHDRKTNPHDEEFNYAEEFQKLDYWALKEDLRKLMTESQDWWPADYGHYGPLFIRMAWHSAGTYRIGDGRGGASTGTQRFAPLNSWPDNANLDKARRLLWPIKKKYGNKISWADLFILAGNVAIESMGGKTIGFGGGRVDVWHPEEDVYWGSEKEWLASERYSGDRELENPLAAVQMGLIYVNPEGPDGKPDPKAAARDIRETFRRMGMNDEETVALIAGGHTFGKAHGAGPATHVGPEPEAAPIEAQGLGWISSYGKGKGSDTITSGIEGAWTPTPTQWDTSYFDMLFGYDWWLTKSPAGAWQWMAVDPDEKDLAPDAEDPSKKVPTMMMTTDLALRFDPEYEKIARRFHQNPEEFAEAFARAWFKLTHRDMGPKTRYLGPEVPKEDFIWQDPIPEVDYELTEAEIEEIKAKILNSGLTVSELVKTAWASASTFRNSDKRGGANGARIRLAPQKDWEVNEPERLAKVLSVYEDIQRELPKKVSIADLIVLGGSAAVEKAARDAGFDVKVPFFPGRGDATQEQTDVESFAVLEPFADGFRNYQKQEYSVPPEELLVDKAQLLGLTAPEMTVLVGGLRVLGANYRDLPHGVFTDRIGVLTNDFFVNLLDMNYEWVPTDSGIYEIRDRKTGEVRWTATRVDLIFGSNSILRSYAEFYAQDDNQEKFVRDFINAWVKVMNADRFDLVKKARESVTALQTGDVDRSGESDIRK

SEQ ID NO: 20027 - protein, 751 aa, Geobacillus stearothermophilus
MENQNRQNAAQCPFHGSVTNQSSNRTTNKDWWPNQLNLSILHQHDRKTNPHDEEFNYAEEFQKLDYWALKEDLRKLMTESQDWWPADYGHYGPLFIRMAWHSAGTYRIGDGRGGASTGTQRFAPLNSWPDNANLDKARRLLWPIKKKYGNKISWADLFILAGNVAIESMGGKTIGFGGGRVDVWHPEEDVYWGSEKEWLASERYSGDRELENPLAAVQMGLIYVNPEGPDGKPDPKAAARDIRETFRRMGMNDEETVALIAGGHTFGKAHGAGPATHVGPEPEAAPIEAQGLGWISSYGKGKGSDTITSGIEGAWTPTPTQWDTSYFDMLFGYDWWLTKSPAGAWQWMAVDPDEKDLAPDAEDPSKKVPTMMMTTDLALRFDPEYEKIARRFHQNPEEFAEAFARAWFKLTHRDMGPKTRYLGPEVPKEDFIWQDPIPEVDYELTEAEIEEIKAKILNSGLTVSELVKTAWASASTFRNSDKRGGANGARIRLAPQKDWEVNEPERLAKVLSVYEDIQRELPKKVSIADLIVLGGSAAVEKAARDAGFDVKVPFFPGRGDATQEQTDVESFAVLEPFADGFRNYQKQEYSVPPEELLVDKAQLLGLTAPEMTVLVGGLRVLGANYRDLPHGVFTDRIGVLTNDFFVNLLDMNYEWVPTDSGIYEIRDRKTGEVRWTATRVDLIFGSNSILRSYAEFYAQDDNQEKFVRDFINAWVKVMNADRFDLVKKARESVTALQCPHARRSAVEAGLQ

SEQ ID NO: 20028 - protein, 751 aa, Geobacillus stearothermophilus
MENQNRQNAAQCPFHGSVTNQSSNRTTNKDWWPNQLNLSILHQHDRKTNPHDEEFNYAEEFQKLDYWALKEDLRKLMTESQDWWPADYGHYGPLFIRMAWHSAGTYRTGDGRGGASTGTQRFAPLNSWPNNANLDKARRLLWPIKKKYGNKISWADLFILAGNVAIESMGGKTIGFGGGRVDVWHPEEDVYWGSEKEWLASERYSGDRELENPLAAVQMGLTYVNPEGPDGKPDPKAAARDIRETFRRMGMNDEETVALIAGGHTFGKAHGAGPATHVGPEPEAAPIEAQGLGWISSYGKGKGSDTITSGIEGAWTPTPTQWDTSYFDMLFGYDWWLTKSPAGAWQWMAVDPDEKDLAPDAEDPSKKVPTMMMTTDLALRFDPEYEKIARRFHQNPEEFAEAFARAWFKLTHRDMGPKTRYLGPEVPKEDFIWQDPIPEVDYELTEAEIEEIKAKILNSGLTVSELVKTAWASASTFRNSDKRGGANGARIRLAPQKDWEVNEPERLAKVLSVYEDIQRELPKKVSIADLIVLGGSAAVEKAARDAGFDVKVPFFPGRGDATQEQTDVESFAVLEPFADGFRNYQKQEYSVPPEELLVDKAQLLGLTAPEMTVLVGGLRVLGANYRDLPHGVFTDRIGVLTNDFFVNLLDMNYEWVPTDSGIYEIRDRKTGEVRWTATRVDLIFGSNSILRSYAEFYAQDDNQEKFVRDFINAWVKVMNADRFDLVKKARESVTALQHFVAARSKTAEELQ

SEQ ID NO: 20029 - protein, 735 aa, Geobacillus stearothermophilus
MENQNRQNAAQCPFHGSVTNQSSNRTTNKDWWPNQLNLSILHQHDRKTNPHDEEFNYAEEFQKLDYWALKEDLRKLMTESQDWWPADYGHYGPLFIRMAWHSAGTYRIGDGRGGASTGTQRFAPLNSWPDNANLDKARRLLWPIKKKYGNKISWADLFILAGNVAIESMGGKTIGFGGGRVDVWHPEEDVYWGSEKEWLASERYSGDRELENPLAAVQMGLIYVNPEGPDGKPDPKAAARDIRETFRRMGMNDEETVALIAGGHTFGKAHGAGPATHVGPEPEAAPIEAQGLGWISSYGKGKGSDTITSGIEGAWTPTPTQWDTSYFDMLFGYDWWLTKSPAGAWQWMAVDPDEKDLAPDAEDPSKKVPTMMMTTDLALRFDPEYEKIARRFHQNPEEFAEAFARAWFKLTHRDMGPKTRYLGPEVPKEDFIWQDPIPEVDYELTEAEIEEIKAKILNSGLTVSELVKTAWASASTFRNSDKRGGANGARIRLAPQKDWEVNEPERLAKVLSVYEDIQRELPKKVSIADLIVLGGSAAVEKAARDAGFDVKVPFFPGRGDATQEQTDVESFAVLEPFADGFRNYQKQEYSVPPEELLVDKAQLLGLTAPEMTVLVGGLRVLGANYRDLPHGVFTDRIGVLTNDFFVNLLDMNYEWVPTDSGIYEIRDRKTGEVRWTATRVDLIFGSNSILRSYAEFYAQDDNQEKFVRDFINAWVKVMNADRFDLVKKARESVTA

SEQ ID NO: 20030 - protein, 751 aa, Geobacillus stearothermophilus
MENQNRQNAAQCPFHGSVTNQSSNRTTNKDWWPNQLNLSILHQHDRKTNPHDEEFNYAEEFQKLDYWALKEDLRKLMTESQDWWPADYGHYGPLFIRMAWHSAGTYRIGDGRGGASTGTQRFAPLNSWPDNANLDKARRLLWPIKKKYGNKISWADLFILAGNVAIESMGGKTIGFGGGRVDVWHPEEDVYWGSEKEWLASERYSGDRELENPLAAVQMGLIYVNPEGPDGKPDPKAAARDIRETFRRMGMNDEETVALIAGGHTFGKAHGAGPATHVGPEPEAAPIEAQGLGWISSYGKGKGSDTITSGIEGAWTPTPTQWDTSYFDMLFGYDWWLTKSPAGAWQWMAVDPDEKDLAPDAEDPSKKVPTMMMTTDLALRFDPEYEKIARRFHQNPEEFAEAFARAWFKLTHRDMGPKTRYLGPEVPKEDFIWQDPIPEVDYELTEAEIEEIKAKILNSGLTVSELVKTAWASASTFRNSDKRGGANGARIRLAPQKDWEVNEPERLAKVLSVYEDIQRELPKKVSIADLIVLGGSAAVEKAARDAGFDVKVPFFPGRGDATQEQTDVESFAVLEPFADGFRNYQKQEYSVPPEELLVDKAQLLGLTAPEMTVLVGGLRVLGANYRDLPHGVFTDRIGVLTNDFFVNLLDMNYEWVPTDSGIYEIRDRKTGEVRWTATRVDLIFGSNSILRSYAEFYAQDDNQEKFVRDFINAWVKVMNADRFDLVKKARESVTALQSSRCFRSTDNAVLQ

SEQ ID NO: 20031 - protein, 752 aa, Geobacillus stearothermophilus
MENQNRQNAAQCPFHGSVTNQSSNRTTNKDWWPNQLNLSILHQHDRKTNPHDEEFNYAEEFQKLDYWALKEDLRKLMTESQDWWPADYGHYGPLFIRMAWHSAGTYRIGDGRGGASTGTQRFAPLNSWPDNANLDKARRLLWPIKKKYGNKISWADLFILAGNVAIESMGGKTIGFGGGRVDVWHPEEDVYWGSEKEWLASERYSGDRELENPLAAVQMGLIYVNPEGPDGKPDPKAAARDIRETFRRMGMNDEETVALIAGGHTFGKAHGAGPATHVGPEPEAAPIEAQGLGWISSYGKGKGSDTITSGIEGAWTPTPTQWDTSYFDMLFGYDWWLTKSPAGAWQWMAVDPDEKDLAPDAEDPSKKVPTMMMTTDLALRFDPEYEKIARRFHQNPEEFAEAFARAWFKLTHRDMGPKTRYLGPEVPKEDFIWQDPIPEVDYELTEAEIEEIKAKILNSGLTVSELVKTAWASASTFRNSDKRGGANGARIRLAPQKDWEVNEPERLAKVLSVYEDIQRELPKKVSIADLIVLGGSAAVEKAARDAGFDVKVPFFPGRGDATQEQTDVESFAVLEPFADGFRNYQKQEYSVPPEELLVDKAQLLGLTAPEMTVLVGGLRVLGANYRDLPHGVFTDRIGVLTNDFFVNLLDMNYEWVPTDSGIYEIRDRKTGEVRWTATRVDLIFGSNSILRSYAEFYAQDDNQEKFVRDFINAWVKVMNADRFDLVKKARESVTALQTNRINRSNNGTVLSK

SEQ ID NO: 20032 - protein, 751 aa, Geobacillus stearothermophilus
MENQNRQNAAQCPFHGSVTNQSSNRTTNKDWWPNQLNLSILHQHDRKTNPHDEEFNYAEEFQKLDYWALKEDLRKLMTESQDWWPADYGHYGPLFIRMAWHSAGTYRIGDGRGGASTGTQRFAPLNSWPDNANLDKARRLLWPIKKKYGNKISWADLFILAGNVAIESMGGKTIGFGGGRVDVWHPEEDVYWGSEKEWLASERYSGDRELENPLAAVQMGLIYVNPEGPDGKPDPKAAARDIRETFRRMGMNDEETVALIAGGHTFGKAHGAGPATHVGPEPEAAPIEAQGLGWISSYGKGKGSDTITSGIEGAWTPTPTQWDTSYFDMLFGYDWWLTKSPAGAWQWMAVDPDEKDLAPDAEDPSKKVPTMMMTTDLALRFDPEYEKIARRFHQNPEEFAEAFARAWFKLTHRDMGPKTRYLGPEVPKEDFIWQDPIPEVDYELTEAEIEEIKAKILNSGLTVSELVKTAWASASTFRNSDKRGGANGARIRLAPQKDWEVNEPERLAKVLSVYEDIQRELPKKVSIADLIVLGGSAAVEKAARDAGFDVKVPFFPGRGDATQEQTDVESFAVLEPFADGFRNYQKQEYSVPPEELLVDKAQLLGLTAPEMTVLVGGLRVLGANYRDLPHGVFTDRIGVLTNDFFVNLLDMNYEWVPTDSGIYEIRDRKTGEVRWTATRVDLIFGSNSILRSYAEFYAQDDNQEKFVRDFINAWVKVMNADRFDLVKKARESVTALQCFNDARSVRTGTLQ

SEQ ID NO: 20033 - protein, 751 aa, Geobacillus stearothermophilus
MENQNRQNAAQCPFHGSVTNQSSNRTTNKDWWPNQLNLSILHQHDRKTNPHDEEFNYAEEFQKLDYWALKEDLRKLMTESQDWWPADYGHYGPLFIRMAWHSAGTYRTGDGRGGASTGTQRFAPLNSWPNNANLDKARRLLWPIKKKYGNKISWADLFILAGNVAIESMGGKTIGFGGGRVDVWHPEEDVYWGSEKEWLASERYSGDRELENPLAAVQMGLTYVNPEGPDGKPDPKAAARDIRETFRRMGMNDEETVALIAGGHTFGKAHGAGPATHVGPEPEAAPIEAQGLGWISSYGKGKGSDTITSGIEGAWTPTPTQWDTSYFDMLFGYDWWLTKSPAGAWQWMAVDPDEKDLAPDAEDPSKKVPTMMMTTDLALRFDPEYEKIARRFHQNPEEFAEAFARAWFKLTHRDMGPKTRYLGPEVPKEDFIWQDPIPEVDYELTEAEIEEIKAKILNSGLTVSELVKTAWASASTFRNSDKRGGANGARIRLAPQKDWEVNEPERLAKVLSVYEDIQRELPKKVSIADLIVLGGSAAVEKAARDAGFDVKVPFFPGRGDATQEQTDVESFAVLEPFADGFRNYQKQEYSVPPEELLVDKAQLLGLTAPEMTVLVGGLRVLGANYRDLPHGVFTDRIGVLTNDFFVNLLDMNYEWVPTDSGIYEIRDRKTGEVRWTATRVDLIFGSNSILRSYAEFYAQDDNQEKFVRDFINAWVKVMNADRFDLVKKARESVTALQYDSSDRSSAAIDLQ

SEQ ID NO: 20034 - protein, 751 aa, Geobacillus stearothermophilus
MENQNRQNAAQCPFHGSVTNQSSNRTTNKDWWPNQLNLSILHQHDRKTNPHDEEFNYAEEFQKLDYWALKEDLRKLMTESQDWWPADYGHYGPLFIRMAWHSAGTYRIGDGRGGASTGTQRFAPLNSWPDNANLDKARRLLWPIKKKYGNKISWADLFILAGNVAIESMGGKTIGFGGGRVDVWHPEEDVYWGSEKEWLASERYSGDRELENPLAAVQMGLIYVNPEGPDGKPDPKAAARDIRETFRRMGMNDEETVALIAGGHTFGKAHGAGPATHVGPEPEAAPIEAQGLGWISSYGKGKGSDTITSGIEGAWTPTPTQWDTSYFDMLFGYDWWLTKSPAGAWQWMAVDPDEKDLAPDAEDPSKKVPTMMMTTDLALRFDPEYEKIARRFHQNPEEFAEAFARAWFKLTHRDMGPKTRYLGPEVPKEDFIWQDPIPEVDYELTEAEIEEIKAKILNSGLTVSELVKTAWASASTFRNSDKRGGANGARIRLAPQKDWEVNEPERLAKVLSVYEDIQRELPKKVSIADLIVLGGSAAVEKAARDAGFDVKVPFFPGRGDATQEQTDVESFAVLEPFADGFRNYQKQEYSVPPEELLVDKAQLLGLTAPEMTVLVGGLRVLGANYRDLPHGVFTDRIGVLTNDFFVNLLDMNYEWVPTDSGIYEIRDRKTGEVRWTATRVDLIFGSNSILRSYAEFYAQDDNQEKFVRDFINAWVKVMNADRFDLVKKARESVTALQDDCLGRSIIEIMLQ

SEQ ID NO: 20035 - protein, 751 aa, Geobacillus stearothermophilus
MENQNRQNAAQCPFHGSVTNQSSNRTTNKDWWPNQLNLSILHQHDRKTNPHDEEFNYAEEFQKLDYWALKEDLRKLMTESQDWWPADYGHYGPLFIRMAWHSAGTYRIGDGRGGASTGTQRFAPLNSWPDNANLDKARRLLWPIKKKYGNKISWADLFILAGNVAIESMGGKTIGFGGGRVDVWHPEEDVYWGSEKEWLASERYSGDRELENPLAAVQMGLIYVNPEGPDGKPDPKAAARDIRETFRRMGMNDEETVALIAGGHTFGKAHGAGPATHVGPEPEAAPIEAQGLGWISSYGKGKGSDTITSGIEGAWTPTPTQWDTSYFDMLFGYDWWLTKSPAGAWQWMAVDPDEKDLAPDAEDPSKKVPTMMMTTDLALRFDPEYEKIARRFHQNPEEFAEAFARAWFKLTHRDMGPKTRYLGPEVPKEDFIWQDPIPEVDYELTEAEIEEIKAKILNSGLTVSELVKTAWASASTFRNSDKRGGANGARIRLAPQKDWEVNEPERLAKVLSVYEDIQRELPKKVSIADLIVLGGSAAVEKAARDAGFDVKVPFFPGRGDATQEQTDVESFAVLEPFADGFRNYQKQEYSVPPEELLVDKAQLLGLTAPEMTVLVGGLRVLGANYRDLPHGVFTDRIGVLTNDFFVNLLDMNYEWVPTDSGIYEIRDRKTGEVRWTATRVDLIFGSNSILRSYAEFYAQDDNQEKFVRDFINAWVKVMNADRFDLVKKARESVTALQHCCHLRSSAETVLQ

SEQ ID NO: 20036 - protein, 745 aa, Geobacillus stearothermophilus
MENQNRQNAAQCPFHGSVTNQSSNRTTNKDWWPNQLNLSILHQHDRKTNPHDEEFNYAEEFQKLDYWALKEDLRKLMTESQDWWPADYGHYGPLFIRMAWHSAGTYRTGDGRGGASTGTQRFAPLNSWPNNANLDKARRLLWPIKKKYGNKISWADLFILAGNVAIESMGGKTIGFGGGRVDVWHPEEDVYWGSEKEWLASERYSGDRELENPLAAVQMGLTYVNPEGPDGKPDPKAAARDIRETFRRMGMNDEETVALIAGGHTFGKAHGAGPATHVGPEPEAAPIEAQGLGWISSYGKGKGSDTITSGIEGAWTPTPTQWDTSYFDMLFGYDWWLTKSPAGAWQWMAVDPDEKDLAPDAEDPSKKVPTMMMTTDLALRFDPEYEKIARRFHQNPEEFAEAFARAWFKLTHRDMGPKTRYLGPEVPKEDFIWQDPIPEVDYELTEAEIEEIKAKILNSGLTVSELVKTAWASASTFRNSDKRGGANGARIRLAPQKDWEVNEPERLAKVLSVYEDIQRELPKKVSIADLIVLGGSAAVEKAARDAGFDVKVPFFPGRGDATQEQTDVESFAVLEPFADGFRNYQKQEYSVPPEELLVDKAQLLGLTAPEMTVLVGGLRVLGANYRDLPHGVFTDRIGVLTNDFFVNLLDMNYEWVPTDSGIYEIRDRKTGEVRWTATRVDLIFGSNSILRSYAEFYAQDDNQEKFVRDFINAWVKVMNADRFDLVKKARESVTALQHTSPVDLS

SEQ ID NO: 20037 - protein, 751 aa, Geobacillus stearothermophilus
MENQNRQNAAQCPFHGSVTNQSSNRTTNKDWWPNQLNLSILHQHDRKTNPHDEEFNYAEEFQKLDYWALKEDLRKLMTESQDWWPADYGHYGPLFIRMAWHSAGTYRIGDGRGGASTGTQRFAPLNSWPDNANLDKARRLLWPIKKKYGNKISWADLFILAGNVAIESMGGKTIGFGGGRVDVWHPEEDVYWGSEKEWLASERYSGDRELENPLAAVQMGLIYVNPEGPDGKPDPKAAARDIRETFRRMGMNDEETVALIAGGHTFGKAHGAGPATHVGPEPEAAPIEAQGLGWISSYGKGKGSDTITSGIEGAWTPTPTQWDTSYFDMLFGYDWWLTKSPAGAWQWMAVDPDEKDLAPDAEDPSKKVPTMMMTTDLALRFDPEYEKIARRFHQNPEEFAEAFARAWFKLTHRDMGPKTRYLGPEVPKEDFIWQDPIPEVDYELTEAEIEEIKAKILNSGLTVSELVKTAWASASTFRNSDKRGGANGARIRLAPQKDWEVNEPERLAKVLSVYEDIQRELPKKVSIADLIVLGGSAAVEKAARDAGFDVKVPFFPGRGDATQEQTDVESFAVLEPFADGFRNYQKQEYSVPPEELLVDKAQLLGLTAPEMTVLVGGLRVLGANYRDLPHGVFTDRIGVLTNDFFVNLLDMNYEWVPTDSGIYEIRDRKTGEVRWTATRVDLIFGSNSILRSYAEFYAQDDNQEKFVRDFINAWVKVMNADRFDLVKKARESVTALQGNYFYRSGGIIRLQ

SEQ ID NO: 20038 - protein, 751 aa, Geobacillus stearothermophilus
MENQNRQNAAQCPFHGSVTNQSSNRTTNKDWWPNQLNLSILHQHDRKTNPHDEEFNYAEEFQKLDYWALKEDLRKLMTESQDWWPADYGHYGPLFIRMAWHSAGTYRTGDGRGGASTGTQRFAPLNSWPNNANLDKARRLLWPIKKKYGNKISWADLFILAGNVAIESMGGKTIGFGGGRVDVWHPEEDVYWGSEKEWLASERYSGDRELENPLAAVQMGLTYVNPEGPDGKPDPKAAARDIRETFRRMGMNDEETVALIAGGHTFGKAHGAGPATHVGPEPEAAPIEAQGLGWISSYGKGKGSDTITSGIEGAWTPTPTQWDTSYFDMLFGYDWWLTKSPAGAWQWMAVDPDEKDLAPDAEDPSKKVPTMMMTTDLALRFDPEYEKIARRFHQNPEEFAEAFARAWFKLTHRDMGPKTRYLGPEVPKEDFIWQDPIPEVDYELTEAEIEEIKAKILNSGLTVSELVKTAWASASTFRNSDKRGGANGARIRLAPQKDWEVNEPERLAKVLSVYEDIQRELPKKVSIADLIVLGGSAAVEKAARDAGFDVKVPFFPGRGDATQEQTDVESFAVLEPFADGFRNYQKQEYSVPPEELLVDKAQLLGLTAPEMTVLVGGLRVLGANYRDLPHGVFTDRIGVLTNDFFVNLLDMNYEWVPTDSGIYEIRDRKTGEVRWTATRVDLIFGSNSILRSYAEFYAQDDNQEKFVRDFINAWVKVMNADRFDLVKKARESVTALQDIVLARSAAIASLQ

SEQ ID NO: 20039 - protein, 751 aa, Geobacillus stearothermophilus
MENQNRQNAAQCPFHGSVTNQSSNRTTNKDWWPNQLNLSILHQHDRKTNPHDEEFNYAEEFQKLDYWALKEDLRKLMTESQDWWPADYGHYGPLFIRMAWHSAGTYRIGDGRGGASTGTQRFAPLNSWPDNANLDKARRLLWPIKKKYGNKISWADLFILAGNVAIESMGGKTIGFGGGRVDVWHPEEDVYWGSEKEWLASERYSGDRELENPLAAVQMGLIYVNPEGPDGKPDPKAAARDIRETFRRMGMNDEETVALIAGGHTFGKAHGAGPATHVGPEPEAAPIEAQGLGWISSYGKGKGSDTITSGIEGAWTPTPTQWDTSYFDMLFGYDWWLTKSPAGAWQWMAVDPDEKDLAPDAEDPSKKVPTMMMTTDLALRFDPEYEKIARRFHQNPEEFAEAFARAWFKLTHRDMGPKTRYLGPEVPKEDFIWQDPIPEVDYELTEAEIEEIKAKILNSGLTVSELVKTAWASASTFRNSDKRGGANGARIRLAPQKDWEVNEPERLAKVLSVYEDIQRELPKKVSIADLIVLGGSAAVEKAARDAGFDVKVPFFPGRGDATQEQTDVESFAVLEPFADGFRNYQKQEYSVPPEELLVDKAQLLGLTAPEMTVLVGGLRVLGANYRDLPHGVFTDRIGVLTNDFFVNLLDMNYEWVPTDSGIYEIRDRKTGEVRWTATRVDLIFGSNSILRSYAEFYAQDDNQEKFVRDFINAWVKVMNADRFDLVKKARESVTALQCCHTPRSDMIGGLQ

SEQ ID NO: 20040 - protein, 750 aa, Geobacillus stearothermophilus
MENQNRQNAAQCPFHGSVTNQSSNRTTNKDWWPNQLNLSILHQHDRKTNPHDEEFNYAEEFQKLDYWALKEDLRKLMTESQDWWPADYGHYGPLFIRMAWHSAGTYRIGDGRGGASTGTQRFAPLNSWPDNANLDKARRLLWPIKKKYGNKISWADLFILAGNVAIESMGGKTIGFGGGRVDVWHPEEDVYWGSEKEWLASERYSGDRELENPLAAVQMGLIYVNPEGPDGKPDPKAAARDIRETFRRMGMNDEETVALIAGGHTFGKAHGAGPATHVGPEPEAAPIEAQGLGWISSYGKGKGSDTITSGIEGAWTPTPTQWDTSYFDMLFGYDWWLTKSPAGAWQWMAVDPDEKDLAPDAEDPSKKVPTMMMTTDLALRFDPEYEKIARRFHQNPEEFAEAFARAWFKLTHRDMGPKTRYLGPEVPKEDFIWQDPIPEVDYELTEAEIEEIKAKILNSGLTVSELVKTAWASASTFRNSDKRGGANGARIRLAPQKDWEVNEPERLAKVLSVYEDIQRELPKKVSIADLIVLGGSAAVEKAARDAGFDVKVPFFPGRGDATQEQTDVESFAVLEPFADGFRNYQKQEYSVPPEELLVDKAQLLGLTAPEMTVLVGGLRVLGANYRDLPHGVFTDRIGVLTNDFFVNLLDMNYEWVPTDSGIYEIRDRKTGEVRWTATRVDLIFGSNSILRSYAEFYAQDDNQEKFVRDFINAWVKVMNADRFDLVKKARESVTALQFFLNRSKSIAVLQ

SEQ ID NO: 20041 - protein, 751 aa, Geobacillus stearothermophilus
MENQNRQNAAQCPFHGSVTNQSSNRTTNKDWWPNQLNLSILHQHDRKTNPHDEEFNYAEEFQKLDYWALKEDLRKLMTESQDWWPADYGHYGPLFIRMAWHSAGTYRIGDGRGGASTGTQRFAPLNSWPDNANLDKARRLLWPIKKKYGNKISWADLFILAGNVAIESMGGKTIGFGGGRVDVWHPEEDVYWGSEKEWLASERYSGDRELENPLAAVQMGLIYVNPEGPDGKPDPKAAARDIRETFRRMGMNDEETVALIAGGHTFGKAHGAGPATHVGPEPEAAPIEAQGLGWISSYGKGKGSDTITSGIEGAWTPTPTQWDTSYFDMLFGYDWWLTKSPAGAWQWMAVDPDEKDLAPDAEDPSKKVPTMMMTTDLALRFDPEYEKIARRFHQNPEEFAEAFARAWFKLTHRDMGPKTRYLGPEVPKEDFIWQDPIPEVDYELTEAEIEEIKAKILNSGLTVSELVKTAWASASTFRNSDKRGGANGARIRLAPQKDWEVNEPERLAKVLSVYEDIQRELPKKVSIADLIVLGGSAAVEKAARDAGFDVKVPFFPGRGDATQEQTDVESFAVLEPFADGFRNYQKQEYSVPPEELLVDKAQLLGLTAPEMTVLVGGLRVLGANYRDLPHGVFTDRIGVLTNDFFVNLLDMNYEWVPTDSGIYEIRDRKTGEVRWTATRVDLIFGSNSILRSYAEFYAQDDNQEKFVRDFINAWVKVMNADRFDLVKKARESVTALQHFCHPRSVNGIELQ

SEQ ID NO: 20042 - protein, 751 aa, Geobacillus stearothermophilus
MENQNRQNAAQCPFHGSVTNQSSNRTTNKDWWPNQLNLSILHQHDRKTNPHDEEFNYAEEFQKLDYWALKEDLRKLMTESQDWWPADYGHYGPLFIRMAWHSAGTYRTGDGRGGASTGTQRFAPLNSWPNNANLDKARRLLWPIKKKYGNKISWADLFILAGNVAIESMGGKTIGFGGGRVDVWHPEEDVYWGSEKEWLASERYSGDRELENPLAAVQMGLTYVNPEGPDGKPDPKAAARDIRETFRRMGMNDEETVALIAGGHTFGKAHGAGPATHVGPEPEAAPIEAQGLGWISSYGKGKGSDTITSGIEGAWTPTPTQWDTSYFDMLFGYDWWLTKSPAGAWQWMAVDPDEKDLAPDAEDPSKKVPTMMMTTDLALRFDPEYEKIARRFHQNPEEFAEAFARAWFKLTHRDMGPKTRYLGPEVPKEDFIWQDPIPEVDYELTEAEIEEIKAKILNSGLTVSELVKTAWASASTFRNSDKRGGANGARIRLAPQKDWEVNEPERLAKVLSVYEDIQRELPKKVSIADLIVLGGSAAVEKAARDAGFDVKVPFFPGRGDATQEQTDVESFAVLEPFADGFRNYQKQEYSVPPEELLVDKAQLLGLTAPEMTVLVGGLRVLGANYRDLPHGVFTDRIGVLTNDFFVNLLDMNYEWVPTDSGIYEIRDRKTGEVRWTATRVDLIFGSNSILRSYAEFYAQDDNQEKFVRDFINAWVKVMNADRFDLVKKARESVTALQDSHHLRSGAGTDLQ

SEQ ID NO: 20043 - protein, 744 aa, Geobacillus stearothermophilus
MENQNRQNAAQCPFHGSVTNQSSNRTTNKDWWPNQLNLSILHQHDRKTNPHDEEFNYAEEFQKLDYWALKEDLRKLMTESQDWWPADYGHYGPLFIRMAWHSAGTYRIGDGRGGASTGTQRFAPLNSWPDNANLDKARRLLWPIKKKYGNKISWADLFILAGNVAIESMGGKTIGFGGGRVDVWHPEEDVYWGSEKEWLASERYSGDRELENPLAAVQMGLIYVNPEGPDGKPDPKAAARDIRETFRRMGMNDEETVALIAGGHTFGKAHGAGPATHVGPEPEAAPIEAQGLGWISSYGKGKGSDTITSGIEGAWTPTPTQWDTSYFDMLFGYDWWLTKSPAGAWQWMAVDPDEKDLAPDAEDPSKKVPTMMMTTDLALRFDPEYEKIARRFHQNPEEFAEAFARAWFKLTHRDMGPKTRYLGPEVPKEDFIWQDPIPEVDYELTEAEIEEIKAKILNSGLTVSELVKTAWASASTFRNSDKRGGANGARIRLAPQKDWEVNEPERLAKVLSVYEDIQRELPKKVSIADLIVLGGSAAVEKAARDAGFDVKVPFFPGRGDATQEQTDVESFAVLEPFADGFRNYQKQEYSVPPEELLVDKAQLLGLTAPEMTVLVGGLRVLGANYRDLPHGVFTDRIGVLTNDFFVNLLDMNYEWVPTDSGIYEIRDRKTGEVRWTATRVDLIFGSNSILRSYAEFYAQDDNQEKFVRDFINAWVKVMNADRFDLVKKARESVTALQCVLATDL

SEQ ID NO: 20044 - protein, 751 aa, Geobacillus stearothermophilus
MENQNRQNAAQCPFHGSVTNQSSNRTTNKDWWPNQLNLSILHQHDRKTNPHDEEFNYAEEFQKLDYWALKEDLRKLMTESQDWWPADYGHYGPLFIRMAWHSAGTYRTGDGRGGASTGTQRFAPLNSWPNNANLDKARRLLWPIKKKYGNKISWADLFILAGNVAIESMGGKTIGFGGGRVDVWHPEEDVYWGSEKEWLASERYSGDRELENPLAAVQMGLTYVNPEGPDGKPDPKAAARDIRETFRRMGMNDEETVALIAGGHTFGKAHGAGPATHVGPEPEAAPIEAQGLGWISSYGKGKGSDTITSGIEGAWTPTPTQWDTSYFDMLFGYDWWLTKSPAGAWQWMAVDPDEKDLAPDAEDPSKKVPTMMMTTDLALRFDPEYEKIARRFHQNPEEFAEAFARAWFKLTHRDMGPKTRYLGPEVPKEDFIWQDPIPEVDYELTEAEIEEIKAKILNSGLTVSELVKTAWASASTFRNSDKRGGANGARIRLAPQKDWEVNEPERLAKVLSVYEDIQRELPKKVSIADLIVLGGSAAVEKAARDAGFDVKVPFFPGRGDATQEQTDVESFAVLEPFADGFRNYQKQEYSVPPEELLVDKAQLLGLTAPEMTVLVGGLRVLGANYRDLPHGVFTDRIGVLTNDFFVNLLDMNYEWVPTDSGIYEIRDRKTGEVRWTATRVDLIFGSNSILRSYAEFYAQDDNQEKFVRDFINAWVKVMNADRFDLVKKARESVTALQGYLTVRSMTRSNLQ

SEQ ID NO: 20045 - protein, 751 aa, Geobacillus stearothermophilus
MENQNRQNAAQCPFHGSVTNQSSNRTTNKDWWPNQLNLSILHQHDRKTNPHDEEFNYAEEFQKLDYWALKEDLRKLMTESQDWWPADYGHYGPLFIRMAWHSAGTYRTGDGRGGASTGTQRFAPLNSWPNNANLDKARRLLWPIKKKYGNKISWADLFILAGNVAIESMGGKTIGFGGGRVDVWHPEEDVYWGSEKEWLASERYSGDRELENPLAAVQMGLTYVNPEGPDGKPDPKAAARDIRETFRRMGMNDEETVALIAGGHTFGKAHGAGPATHVGPEPEAAPIEAQGLGWISSYGKGKGSDTITSGIEGAWTPTPTQWDTSYFDMLFGYDWWLTKSPAGAWQWMAVDPDEKDLAPDAEDPSKKVPTMMMTTDLALRFDPEYEKIARRFHQNPEEFAEAFARAWFKLTHRDMGPKTRYLGPEVPKEDFIWQDPIPEVDYELTEAEIEEIKAKILNSGLTVSELVKTAWASASTFRNSDKRGGANGARIRLAPQKDWEVNEPERLAKVLSVYEDIQRELPKKVSIADLIVLGGSAAVEKAARDAGFDVKVPFFPGRGDATQEQTDVESFAVLEPFADGFRNYQKQEYSVPPEELLVDKAQLLGLTAPEMTVLVGGLRVLGANYRDLPHGVFTDRIGVLTNDFFVNLLDMNYEWVPTDSGIYEIRDRKTGEVRWTATRVDLIFGSNSILRSYAEFYAQDDNQEKFVRDFINAWVKVMNADRFDLVKKARESVTALQYRSLDRSGDVENLQ

SEQ ID NO: 20046 - protein, 751 aa, Geobacillus stearothermophilus
MENQNRQNAAQCPFHGSVTNQSSNRTTNKDWWPNQLNLSILHQHDRKTNPHDEEFNYAEEFQKLDYWALKEDLRKLMTESQDWWPADYGHYGPLFIRMAWHSAGTYRTGDGRGGASTGTQRFAPLNSWPNNANLDKARRLLWPIKKKYGNKISWADLFILAGNVAIESMGGKTIGFGGGRVDVWHPEEDVYWGSEKEWLASERYSGDRELENPLAAVQMGLTYVNPEGPDGKPDPKAAARDIRETFRRMGMNDEETVALIAGGHTFGKAHGAGPATHVGPEPEAAPIEAQGLGWISSYGKGKGSDTITSGIEGAWTPTPTQWDTSYFDMLFGYDWWLTKSPAGAWQWMAVDPDEKDLAPDAEDPSKKVPTMMMTTDLALRFDPEYEKIARRFHQNPEEFAEAFARAWFKLTHRDMGPKTRYLGPEVPKEDFIWQDPIPEVDYELTEAEIEEIKAKILNSGLTVSELVKTAWASASTFRNSDKRGGANGARIRLAPQKDWEVNEPERLAKVLSVYEDIQRELPKKVSIADLIVLGGSAAVEKAARDAGFDVKVPFFPGRGDATQEQTDVESFAVLEPFADGFRNYQKQEYSVPPEELLVDKAQLLGLTAPEMTVLVGGLRVLGANYRDLPHGVFTDRIGVLTNDFFVNLLDMNYEWVPTDSGIYEIRDRKTGEVRWTATRVDLIFGSNSILRSYAEFYAQDDNQEKFVRDFINAWVKVMNADRFDLVKKARESVTALQIHSGIRSMTGANLQ

SEQ ID NO: 20047 - protein, 747 aa, Geobacillus stearothermophilus
MENQNRQNAAQCPFHGSVTNQSSNRTTNKDWWPNQLNLSILHQHDRKTNPHDEEFNYAEEFQKLDYWALKEDLRKLMTESQDWWPADYGHYGPLFIRMAWHSAGTYRTGDGRGGASTGTQRFAPLNSWPNNANLDKARRLLWPIKKKYGNKISWADLFILAGNVAIESMGGKTIGFGGGRVDVWHPEEDVYWGSEKEWLASERYSGDRELENPLAAVQMGLTYVNPEGPDGKPDPKAAARDIRETFRRMGMNDEETVALIAGGHTFGKAHGAGPATHVGPEPEAAPIEAQGLGWISSYGKGKGSDTITSGIEGAWTPTPTQWDTSYFDMLFGYDWWLTKSPAGAWQWMAVDPDEKDLAPDAEDPSKKVPTMMMTTDLALRFDPEYEKIARRFHQNPEEFAEAFARAWFKLTHRDMGPKTRYLGPEVPKEDFIWQDPIPEVDYELTEAEIEEIKAKILNSGLTVSELVKTAWASASTFRNSDKRGGANGARIRLAPQKDWEVNEPERLAKVLSVYEDIQRELPKKVSIADLIVLGGSAAVEKAARDAGFDVKVPFFPGRGDATQEQTDVESFAVLEPFADGFRNYQKQEYSVPPEELLVDKAQLLGLTAPEMTVLVGGLRVLGANYRDLPHGVFTDRIGVLTNDFFVNLLDMNYEWVPTDSGIYEIRDRKTGEVRWTATRVDLIFGSNSILRSYAEFYAQDDNQEKFVRDFINAWVKVMNADRFDLVKKARESVTALQVNYITDLPLG

SEQ ID NO: 20048 - protein, 751 aa, Geobacillus stearothermophilus
MENQNRQNAAQCPFHGSVTNQSSNRTTNKDWWPNQLNLSILHQHDRKTNPHDEEFNYAEEFQKLDYWALKEDLRKLMTESQDWWPADYGHYGPLFIRMAWHSAGTYRTGDGRGGASTGTQRFAPLNSWPNNANLDKARRLLWPIKKKYGNKISWADLFILAGNVAIESMGGKTIGFGGGRVDVWHPEEDVYWGSEKEWLASERYSGDRELENPLAAVQMGLTYVNPEGPDGKPDPKAAARDIRETFRRMGMNDEETVALIAGGHTFGKAHGAGPATHVGPEPEAAPIEAQGLGWISSYGKGKGSDTITSGIEGAWTPTPTQWDTSYFDMLFGYDWWLTKSPAGAWQWMAVDPDEKDLAPDAEDPSKKVPTMMMTTDLALRFDPEYEKIARRFHQNPEEFAEAFARAWFKLTHRDMGPKTRYLGPEVPKEDFIWQDPIPEVDYELTEAEIEEIKAKILNSGLTVSELVKTAWASASTFRNSDKRGGANGARIRLAPQKDWEVNEPERLAKVLSVYEDIQRELPKKVSIADLIVLGGSAAVEKAARDAGFDVKVPFFPGRGDATQEQTDVESFAVLEPFADGFRNYQKQEYSVPPEELLVDKAQLLGLTAPEMTVLVGGLRVLGANYRDLPHGVFTDRIGVLTNDFFVNLLDMNYEWVPTDSGIYEIRDRKTGEVRWTATRVDLIFGSNSILRSYAEFYAQDDNQEKFVRDFINAWVKVMNADRFDLVKKARESVTALQLLPNTRSIGSDMLQ

SEQ ID NO: 20049 - protein, 752 aa, Geobacillus stearothermophilus
MENQNRQNAAQCPFHGSVTNQSSNRTTNKDWWPNQLNLSILHQHDRKTNPHDEEFNYAEEFQKLDYWALKEDLRKLMTESQDWWPADYGHYGPLFIRMAWHSAGTYRIGDGRGGASTGTQRFAPLNSWPDNANLDKARRLLWPIKKKYGNKISWADLFILAGNVAIESMGGKTIGFGGGRVDVWHPEEDVYWGSEKEWLASERYSGDRELENPLAAVQMGLIYVNPEGPDGKPDPKAAARDIRETFRRMGMNDEETVALIAGGHTFGKAHGAGPATHVGPEPEAAPIEAQGLGWISSYGKGKGSDTITSGIEGAWTPTPTQWDTSYFDMLFGYDWWLTKSPAGAWQWMAVDPDEKDLAPDAEDPSKKVPTMMMTTDLALRFDPEYEKIARRFHQNPEEFAEAFARAWFKLTHRDMGPKTRYLGPEVPKEDFIWQDPIPEVDYELTEAEIEEIKAKILNSGLTVSELVKTAWASASTFRNSDKRGGANGARIRLAPQKDWEVNEPERLAKVLSVYEDIQRELPKKVSIADLIVLGGSAAVEKAARDAGFDVKVPFFPGRGDATQEQTDVESFAVLEPFADGFRNYQKQEYSVPPEELLVDKAQLLGLTAPEMTVLVGGLRVLGANYRDLPHGVFTDRIGVLTNDFFVNLLDMNYEWVPTDSGIYEIRDRKTGEVRWTATRVDLIFGSNSILRSYAEFYAQDDNQEKFVRDFINAWVKVMNADRFDLVKKARESVTALQLLVFDRYEKGTAVSK

SEQ ID NO: 20050 - protein, 751 aa, Geobacillus stearothermophilus
MENQNRQNAAQCPFHGSVTNQSSNRTTNKDWWPNQLNLSILHQHDRKTNPHDEEFNYAEEFQKLDYWALKEDLRKLMTESQDWWPADYGHYGPLFIRMAWHSAGTYRTGDGRGGASTGTQRFAPLNSWPNNANLDKARRLLWPIKKKYGNKISWADLFILAGNVAIESMGGKTIGFGGGRVDVWHPEEDVYWGSEKEWLASERYSGDRELENPLAAVQMGLTYVNPEGPDGKPDPKAAARDIRETFRRMGMNDEETVALIAGGHTFGKAHGAGPATHVGPEPEAAPIEAQGLGWISSYGKGKGSDTITSGIEGAWTPTPTQWDTSYFDMLFGYDWWLTKSPAGAWQWMAVDPDEKDLAPDAEDPSKKVPTMMMTTDLALRFDPEYEKIARRFHQNPEEFAEAFARAWFKLTHRDMGPKTRYLGPEVPKEDFIWQDPIPEVDYELTEAEIEEIKAKILNSGLTVSELVKTAWASASTFRNSDKRGGANGARIRLAPQKDWEVNEPERLAKVLSVYEDIQRELPKKVSIADLIVLGGSAAVEKAARDAGFDVKVPFFPGRGDATQEQTDVESFAVLEPFADGFRNYQKQEYSVPPEELLVDKAQLLGLTAPEMTVLVGGLRVLGANYRDLPHGVFTDRIGVLTNDFFVNLLDMNYEWVPTDSGIYEIRDRKTGEVRWTATRVDLIFGSNSILRSYAEFYAQDDNQEKFVRDFINAWVKVMNADRFDLVKKARESVTALQCICTDRSATIIKLQ

SEQ ID NO: 20051 - protein, 751 aa, Geobacillus stearothermophilus
MENQNRQNAAQCPFHGSVTNQSSNRTTNKDWWPNQLNLSILHQHDRKTNPHDEEFNYAEEFQKLDYWALKEDLRKLMTESQDWWPADYGHYGPLFIRMAWHSAGTYRIGDGRGGASTGTQRFAPLNSWPDNANLDKARRLLWPIKKKYGNKISWADLFILAGNVAIESMGGKTIGFGGGRVDVWHPEEDVYWGSEKEWLASERYSGDRELENPLAAVQMGLIYVNPEGPDGKPDPKAAARDIRETFRRMGMNDEETVALIAGGHTFGKAHGAGPATHVGPEPEAAPIEAQGLGWISSYGKGKGSDTITSGIEGAWTPTPTQWDTSYFDMLFGYDWWLTKSPAGAWQWMAVDPDEKDLAPDAEDPSKKVPTMMMTTDLALRFDPEYEKIARRFHQNPEEFAEAFARAWFKLTHRDMGPKTRYLGPEVPKEDFIWQDPIPEVDYELTEAEIEEIKAKILNSGLTVSELVKTAWASASTFRNSDKRGGANGARIRLAPQKDWEVNEPERLAKVLSVYEDIQRELPKKVSIADLIVLGGSAAVEKAARDAGFDVKVPFFPGRGDATQEQTDVESFAVLEPFADGFRNYQKQEYSVPPEELLVDKAQLLGLTAPEMTVLVGGLRVLGANYRDLPHGVFTDRIGVLTNDFFVNLLDMNYEWVPTDSGIYEIRDRKTGEVRWTATRVDLIFGSNSILRSYAEFYAQDDNQEKFVRDFINAWVKVMNADRFDLVKKARESVTALQHVDYVRSGRVSALQ

SEQ ID NO: 20052 - protein, 751 aa, Geobacillus stearothermophilus
MENQNRQNAAQCPFHGSVTNQSSNRTTNKDWWPNQLNLSILHQHDRKTNPHDEEFNYAEEFQKLDYWALKEDLRKLMTESQDWWPADYGHYGPLFIRMAWHSAGTYRIGDGRGGASTGTQRFAPLNSWPDNANLDKARRLLWPIKKKYGNKISWADLFILAGNVAIESMGGKTIGFGGGRVDVWHPEEDVYWGSEKEWLASERYSGDRELENPLAAVQMGLIYVNPEGPDGKPDPKAAARDIRETFRRMGMNDEETVALIAGGHTFGKAHGAGPATHVGPEPEAAPIEAQGLGWISSYGKGKGSDTITSGIEGAWTPTPTQWDTSYFDMLFGYDWWLTKSPAGAWQWMAVDPDEKDLAPDAEDPSKKVPTMMMTTDLALRFDPEYEKIARRFHQNPEEFAEAFARAWFKLTHRDMGPKTRYLGPEVPKEDFIWQDPIPEVDYELTEAEIEEIKAKILNSGLTVSELVKTAWASASTFRNSDKRGGANGARIRLAPQKDWEVNEPERLAKVLSVYEDIQRELPKKVSIADLIVLGGSAAVEKAARDAGFDVKVPFFPGRGDATQEQTDVESFAVLEPFADGFRNYQKQEYSVPPEELLVDKAQLLGLTAPEMTVLVGGLRVLGANYRDLPHGVFTDRIGVLTNDFFVNLLDMNYEWVPTDSGIYEIRDRKTGEVRWTATRVDLIFGSNSILRSYAEFYAQDDNQEKFVRDFINAWVKVMNADRFDLVKKARESVTALQNFGADRSMVEVALQ

SEQ ID NO: 20053 - protein, 751 aa, Geobacillus stearothermophilus
MENQNRQNAAQCPFHGSVTNQSSNRTTNKDWWPNQLNLSILHQHDRKTNPHDEEFNYAEEFQKLDYWALKEDLRKLMTESQDWWPADYGHYGPLFIRMAWHSAGTYRTGDGRGGASTGTQRFAPLNSWPNNANLDKARRLLWPIKKKYGNKISWADLFILAGNVAIESMGGKTIGFGGGRVDVWHPEEDVYWGSEKEWLASERYSGDRELENPLAAVQMGLTYVNPEGPDGKPDPKAAARDIRETFRRMGMNDEETVALIAGGHTFGKAHGAGPATHVGPEPEAAPIEAQGLGWISSYGKGKGSDTITSGIEGAWTPTPTQWDTSYFDMLFGYDWWLTKSPAGAWQWMAVDPDEKDLAPDAEDPSKKVPTMMMTTDLALRFDPEYEKIARRFHQNPEEFAEAFARAWFKLTHRDMGPKTRYLGPEVPKEDFIWQDPIPEVDYELTEAEIEEIKAKILNSGLTVSELVKTAWASASTFRNSDKRGGANGARIRLAPQKDWEVNEPERLAKVLSVYEDIQRELPKKVSIADLIVLGGSAAVEKAARDAGFDVKVPFFPGRGDATQEQTDVESFAVLEPFADGFRNYQKQEYSVPPEELLVDKAQLLGLTAPEMTVLVGGLRVLGANYRDLPHGVFTDRIGVLTNDFFVNLLDMNYEWVPTDSGIYEIRDRKTGEVRWTATRVDLIFGSNSILRSYAEFYAQDDNQEKFVRDFINAWVKVMNADRFDLVKKARESVTALQSRYRCRSNTVIGLQ

SEQ ID NO: 20054 - protein, 752 aa, Geobacillus stearothermophilus
MENQNRQNAAQCPFHGSVTNQSSNRTTNKDWWPNQLNLSILHQHDRKTNPHDEEFNYAEEFQKLDYWALKEDLRKLMTESQDWWPADYGHYGPLFIRMAWHSAGTYRIGDGRGGASTGTQRFAPLNSWPDNANLDKARRLLWPIKKKYGNKISWADLFILAGNVAIESMGGKTIGFGGGRVDVWHPEEDVYWGSEKEWLASERYSGDRELENPLAAVQMGLIYVNPEGPDGKPDPKAAARDIRETFRRMGMNDEETVALIAGGHTFGKAHGAGPATHVGPEPEAAPIEAQGLGWISSYGKGKGSDTITSGIEGAWTPTPTQWDTSYFDMLFGYDWWLTKSPAGAWQWMAVDPDEKDLAPDAEDPSKKVPTMMMTTDLALRFDPEYEKIARRFHQNPEEFAEAFARAWFKLTHRDMGPKTRYLGPEVPKEDFIWQDPIPEVDYELTEAEIEEIKAKILNSGLTVSELVKTAWASASTFRNSDKRGGANGARIRLAPQKDWEVNEPERLAKVLSVYEDIQRELPKKVSIADLIVLGGSAAVEKAARDAGFDVKVPFFPGRGDATQEQTDVESFAVLEPFADGFRNYQKQEYSVPPEELLVDKAQLLGLTAPEMTVLVGGLRVLGANYRDLPHGVFTDRIGVLTNDFFVNLLDMNYEWVPTDSGIYEIRDRKTGEVRWTATRVDLIFGSNSILRSYAEFYAQDDNQEKFVRDFINAWVKVMNADRFDLVKKARESVTALQLDSAPDLARLMICSK

SEQ ID NO: 20055 - protein, 753 aa, Geobacillus stearothermophilus
MENQNRQNAAQCPFHGSVTNQSSNRTTNKDWWPNQLNLSILHQHDRKTNPHDEEFNYAEEFQKLDYWALKEDLRKLMTESQDWWPADYGHYGPLFIRMAWHSAGTYRIGDGRGGASTGTQRFAPLNSWPDNANLDKARRLLWPIKKKYGNKISWADLFILAGNVAIESMGGKTIGFGGGRVDVWHPEEDVYWGSEKEWLASERYSGDRELENPLAAVQMGLIYVNPEGPDGKPDPKAAARDIRETFRRMGMNDEETVALIAGGHTFGKAHGAGPATHVGPEPEAAPIEAQGLGWISSYGKGKGSDTITSGIEGAWTPTPTQWDTSYFDMLFGYDWWLTKSPAGAWQWMAVDPDEKDLAPDAEDPSKKVPTMMMTTDLALRFDPEYEKIARRFHQNPEEFAEAFARAWFKLTHRDMGPKTRYLGPEVPKEDFIWQDPIPEVDYELTEAEIEEIKAKILNSGLTVSELVKTAWASASTFRNSDKRGGANGARIRLAPQKDWEVNEPERLAKVLSVYEDIQRELPKKVSIADLIVLGGSAAVEKAARDAGFDVKVPFFPGRGDATQEQTDVESFAVLEPFADGFRNYQKQEYSVPPEELLVDKAQLLGLTAPEMTVLVGGLRVLGANYRDLPHGVFTDRIGVLTNDFFVNLLDMNYEWVPTDSGIYEIRDRKTGEVRWTATRVDLIFGSNSILRSYAEFYAQDDNQEKFVRDFINAWVKVMNADRFDLVKKARESVTALQLSDESRSINEKTAVSK

SEQ ID NO: 20056 - protein, 752 aa, Geobacillus stearothermophilus
MENQNRQNAAQCPFHGSVTNQSSNRTTNKDWWPNQLNLSILHQHDRKTNPHDEEFNYAEEFQKLDYWALKEDLRKLMTESQDWWPADYGHYGPLFIRMAWHSAGTYRIGDGRGGASTGTQRFAPLNSWPDNANLDKARRLLWPIKKKYGNKISWADLFILAGNVAIESMGGKTIGFGGGRVDVWHPEEDVYWGSEKEWLASERYSGDRELENPLAAVQMGLIYVNPEGPDGKPDPKAAARDIRETFRRMGMNDEETVALIAGGHTFGKAHGAGPATHVGPEPEAAPIEAQGLGWISSYGKGKGSDTITSGIEGAWTPTPTQWDTSYFDMLFGYDWWLTKSPAGAWQWMAVDPDEKDLAPDAEDPSKKVPTMMMTTDLALRFDPEYEKIARRFHQNPEEFAEAFARAWFKLTHRDMGPKTRYLGPEVPKEDFIWQDPIPEVDYELTEAEIEEIKAKILNSGLTVSELVKTAWASASTFRNSDKRGGANGARIRLAPQKDWEVNEPERLAKVLSVYEDIQRELPKKVSIADLIVLGGSAAVEKAARDAGFDVKVPFFPGRGDATQEQTDVESFAVLEPFADGFRNYQKQEYSVPPEELLVDKAQLLGLTAPEMTVLVGGLRVLGANYRDLPHGVFTDRIGVLTNDFFVNLLDMNYEWVPTDSGIYEIRDRKTGEVRWTATRVDLIFGSNSILRSYAEFYAQDDNQEKFVRDFINAWVKVMNADRFDLVKKARESVTALQISRYPRSNTTIACSK

SEQ ID NO: 20057 - protein, 751 aa, Geobacillus stearothermophilus
MENQNRQNAAQCPFHGSVTNQSSNRTTNKDWWPNQLNLSILHQHDRKTNPHDEEFNYAEEFQKLDYWALKEDLRKLMTESQDWWPADYGHYGPLFIRMAWHSAGTYRTGDGRGGASTGTQRFAPLNSWPNNANLDKARRLLWPIKKKYGNKISWADLFILAGNVAIESMGGKTIGFGGGRVDVWHPEEDVYWGSEKEWLASERYSGDRELENPLAAVQMGLTYVNPEGPDGKPDPKAAARDIRETFRRMGMNDEETVALIAGGHTFGKAHGAGPATHVGPEPEAAPIEAQGLGWISSYGKGKGSDTITSGIEGAWTPTPTQWDTSYFDMLFGYDWWLTKSPAGAWQWMAVDPDEKDLAPDAEDPSKKVPTMMMTTDLALRFDPEYEKIARRFHQNPEEFAEAFARAWFKLTHRDMGPKTRYLGPEVPKEDFIWQDPIPEVDYELTEAEIEEIKAKILNSGLTVSELVKTAWASASTFRNSDKRGGANGARIRLAPQKDWEVNEPERLAKVLSVYEDIQRELPKKVSIADLIVLGGSAAVEKAARDAGFDVKVPFFPGRGDATQEQTDVESFAVLEPFADGFRNYQKQEYSVPPEELLVDKAQLLGLTAPEMTVLVGGLRVLGANYRDLPHGVFTDRIGVLTNDFFVNLLDMNYEWVPTDSGIYEIRDRKTGEVRWTATRVDLIFGSNSILRSYAEFYAQDDNQEKFVRDFINAWVKVMNADRFDLVKKARESVTALQYHSGSRSVITSGLQ

SEQ ID NO: 20058 - protein, 751 aa, Geobacillus stearothermophilus
MENQNRQNAAQCPFHGSVTNQSSNRTTNKDWWPNQLNLSILHQHDRKTNPHDEEFNYAEEFQKLDYWALKEDLRKLMTESQDWWPADYGHYGPLFIRMAWHSAGTYRTGDGRGGASTGTQRFAPLNSWPNNANLDKARRLLWPIKKKYGNKISWADLFILAGNVAIESMGGKTIGFGGGRVDVWHPEEDVYWGSEKEWLASERYSGDRELENPLAAVQMGLTYVNPEGPDGKPDPKAAARDIRETFRRMGMNDEETVALIAGGHTFGKAHGAGPATHVGPEPEAAPIEAQGLGWISSYGKGKGSDTITSGIEGAWTPTPTQWDTSYFDMLFGYDWWLTKSPAGAWQWMAVDPDEKDLAPDAEDPSKKVPTMMMTTDLALRFDPEYEKIARRFHQNPEEFAEAFARAWFKLTHRDMGPKTRYLGPEVPKEDFIWQDPIPEVDYELTEAEIEEIKAKILNSGLTVSELVKTAWASASTFRNSDKRGGANGARIRLAPQKDWEVNEPERLAKVLSVYEDIQRELPKKVSIADLIVLGGSAAVEKAARDAGFDVKVPFFPGRGDATQEQTDVESFAVLEPFADGFRNYQKQEYSVPPEELLVDKAQLLGLTAPEMTVLVGGLRVLGANYRDLPHGVFTDRIGVLTNDFFVNLLDMNYEWVPTDSGIYEIRDRKTGEVRWTATRVDLIFGSNSILRSYAEFYAQDDNQEKFVRDFINAWVKVMNADRFDLVKKARESVTALQTIISYRSAGDVTLQ

SEQ ID NO: 20059 - protein, 743 aa, Geobacillus stearothermophilus
MENQNRQNAAQCPFHGSVTNQSSNRTTNKDWWPNQLNLSILHQHDRKTNPHDEEFNYAEEFQKLDYWALKEDLRKLMTESQDWWPADYGHYGPLFIRMAWHSAGTYRIGDGRGGASTGTQRFAPLNSWPDNANLDKARRLLWPIKKKYGNKISWADLFILAGNVAIESMGGKTIGFGGGRVDVWHPEEDVYWGSEKEWLASERYSGDRELENPLAAVQMGLIYVNPEGPDGKPDPKAAARDIRETFRRMGMNDEETVALIAGGHTFGKAHGAGPATHVGPEPEAAPIEAQGLGWISSYGKGKGSDTITSGIEGAWTPTPTQWDTSYFDMLFGYDWWLTKSPAGAWQWMAVDPDEKDLAPDAEDPSKKVPTMMMTTDLALRFDPEYEKIARRFHQNPEEFAEAFARAWFKLTHRDMGPKTRYLGPEVPKEDFIWQDPIPEVDYELTEAEIEEIKAKILNSGLTVSELVKTAWASASTFRNSDKRGGANGARIRLAPQKDWEVNEPERLAKVLSVYEDIQRELPKKVSIADLIVLGGSAAVEKAARDAGFDVKVPFFPGRGDATQEQTDVESFAVLEPFADGFRNYQKQEYSVPPEELLVDKAQLLGLTAPEMTVLVGGLRVLGANYRDLPHGVFTDRIGVLTNDFFVNLLDMNYEWVPTDSGIYEIRDRKTGEVRWTATRVDLIFGSNSILRSYAEFYAQDDNQEKFVRDFINAWVKVMNADRFDLVKKARESVTALQDTTGNR

SEQ ID NO: 20060 - protein, 751 aa, Geobacillus stearothermophilus
MENQNRQNAAQCPFHGSVTNQSSNRTTNKDWWPNQLNLSILHQHDRKTNPHDEEFNYAEEFQKLDYWALKEDLRKLMTESQDWWPADYGHYGPLFIRMAWHSAGTYRTGDGRGGASTGTQRFAPLNSWPNNANLDKARRLLWPIKKKYGNKISWADLFILAGNVAIESMGGKTIGFGGGRVDVWHPEEDVYWGSEKEWLASERYSGDRELENPLAAVQMGLTYVNPEGPDGKPDPKAAARDIRETFRRMGMNDEETVALIAGGHTFGKAHGAGPATHVGPEPEAAPIEAQGLGWISSYGKGKGSDTITSGIEGAWTPTPTQWDTSYFDMLFGYDWWLTKSPAGAWQWMAVDPDEKDLAPDAEDPSKKVPTMMMTTDLALRFDPEYEKIARRFHQNPEEFAEAFARAWFKLTHRDMGPKTRYLGPEVPKEDFIWQDPIPEVDYELTEAEIEEIKAKILNSGLTVSELVKTAWASASTFRNSDKRGGANGARIRLAPQKDWEVNEPERLAKVLSVYEDIQRELPKKVSIADLIVLGGSAAVEKAARDAGFDVKVPFFPGRGDATQEQTDVESFAVLEPFADGFRNYQKQEYSVPPEELLVDKAQLLGLTAPEMTVLVGGLRVLGANYRDLPHGVFTDRIGVLTNDFFVNLLDMNYEWVPTDSGIYEIRDRKTGEVRWTATRVDLIFGSNSILRSYAEFYAQDDNQEKFVRDFINAWVKVMNADRFDLVKKARESVTALQVLFNTRSGTVAKLQ

SEQ ID NO: 20061 - protein, 751 aa, Geobacillus stearothermophilus
MENQNRQNAAQCPFHGSVTNQSSNRTTNKDWWPNQLNLSILHQHDRKTNPHDEEFNYAEEFQKLDYWALKEDLRKLMTESQDWWPADYGHYGPLFIRMAWHSAGTYRIGDGRGGASTGTQRFAPLNSWPDNANLDKARRLLWPIKKKYGNKISWADLFILAGNVAIESMGGKTIGFGGGRVDVWHPEEDVYWGSEKEWLASERYSGDRELENPLAAVQMGLIYVNPEGPDGKPDPKAAARDIRETFRRMGMNDEETVALIAGGHTFGKAHGAGPATHVGPEPEAAPIEAQGLGWISSYGKGKGSDTITSGIEGAWTPTPTQWDTSYFDMLFGYDWWLTKSPAGAWQWMAVDPDEKDLAPDAEDPSKKVPTMMMTTDLALRFDPEYEKIARRFHQNPEEFAEAFARAWFKLTHRDMGPKTRYLGPEVPKEDFIWQDPIPEVDYELTEAEIEEIKAKILNSGLTVSELVKTAWASASTFRNSDKRGGANGARIRLAPQKDWEVNEPERLAKVLSVYEDIQRELPKKVSIADLIVLGGSAAVEKAARDAGFDVKVPFFPGRGDATQEQTDVESFAVLEPFADGFRNYQKQEYSVPPEELLVDKAQLLGLTAPEMTVLVGGLRVLGANYRDLPHGVFTDRIGVLTNDFFVNLLDMNYEWVPTDSGIYEIRDRKTGEVRWTATRVDLIFGSNSILRSYAEFYAQDDNQEKFVRDFINAWVKVMNADRFDLVKKARESVTALQGNGHNRSSIDEVLQ

SEQ ID NO: 20062 - protein, 751 aa, Geobacillus stearothermophilus
MENQNRQNAAQCPFHGSVTNQSSNRTTNKDWWPNQLNLSILHQHDRKTNPHDEEFNYAEEFQKLDYWALKEDLRKLMTESQDWWPADYGHYGPLFIRMAWHSAGTYRIGDGRGGASTGTQRFAPLNSWPDNANLDKARRLLWPIKKKYGNKISWADLFILAGNVAIESMGGKTIGFGGGRVDVWHPEEDVYWGSEKEWLASERYSGDRELENPLAAVQMGLIYVNPEGPDGKPDPKAAARDIRETFRRMGMNDEETVALIAGGHTFGKAHGAGPATHVGPEPEAAPIEAQGLGWISSYGKGKGSDTITSGIEGAWTPTPTQWDTSYFDMLFGYDWWLTKSPAGAWQWMAVDPDEKDLAPDAEDPSKKVPTMMMTTDLALRFDPEYEKIARRFHQNPEEFAEAFARAWFKLTHRDMGPKTRYLGPEVPKEDFIWQDPIPEVDYELTEAEIEEIKAKILNSGLTVSELVKTAWASASTFRNSDKRGGANGARIRLAPQKDWEVNEPERLAKVLSVYEDIQRELPKKVSIADLIVLGGSAAVEKAARDAGFDVKVPFFPGRGDATQEQTDVESFAVLEPFADGFRNYQKQEYSVPPEELLVDKAQLLGLTAPEMTVLVGGLRVLGANYRDLPHGVFTDRIGVLTNDFFVNLLDMNYEWVPTDSGIYEIRDRKTGEVRWTATRVDLIFGSNSILRSYAEFYAQDDNQEKFVRDFINAWVKVMNADRFDLVKKARESVTALQFSTPPRSIVNNGLQ

SEQ ID NO: 20063 - protein, 751 aa, Geobacillus stearothermophilus
MENQNRQNAAQCPFHGSVTNQSSNRTTNKDWWPNQLNLSILHQHDRKTNPHDEEFNYAEEFQKLDYWALKEDLRKLMTESQDWWPADYGHYGPLFIRMAWHSAGTYRTGDGRGGASTGTQRFAPLNSWPNNANLDKARRLLWPIKKKYGNKISWADLFILAGNVAIESMGGKTIGFGGGRVDVWHPEEDVYWGSEKEWLASERYSGDRELENPLAAVQMGLTYVNPEGPDGKPDPKAAARDIRETFRRMGMNDEETVALIAGGHTFGKAHGAGPATHVGPEPEAAPIEAQGLGWISSYGKGKGSDTITSGIEGAWTPTPTQWDTSYFDMLFGYDWWLTKSPAGAWQWMAVDPDEKDLAPDAEDPSKKVPTMMMTTDLALRFDPEYEKIARRFHQNPEEFAEAFARAWFKLTHRDMGPKTRYLGPEVPKEDFIWQDPIPEVDYELTEAEIEEIKAKILNSGLTVSELVKTAWASASTFRNSDKRGGANGARIRLAPQKDWEVNEPERLAKVLSVYEDIQRELPKKVSIADLIVLGGSAAVEKAARDAGFDVKVPFFPGRGDATQEQTDVESFAVLEPFADGFRNYQKQEYSVPPEELLVDKAQLLGLTAPEMTVLVGGLRVLGANYRDLPHGVFTDRIGVLTNDFFVNLLDMNYEWVPTDSGIYEIRDRKTGEVRWTATRVDLIFGSNSILRSYAEFYAQDDNQEKFVRDFINAWVKVMNADRFDLVKKARESVTALQTFVSHRSKKESRLQ

SEQ ID NO: 20064 - protein, 751 aa, Geobacillus stearothermophilus
MENQNRQNAAQCPFHGSVTNQSSNRTTNKDWWPNQLNLSILHQHDRKTNPHDEEFNYAEEFQKLDYWALKEDLRKLMTESQDWWPADYGHYGPLFIRMAWHSAGTYRIGDGRGGASTGTQRFAPLNSWPDNANLDKARRLLWPIKKKYGNKISWADLFILAGNVAIESMGGKTIGFGGGRVDVWHPEEDVYWGSEKEWLASERYSGDRELENPLAAVQMGLIYVNPEGPDGKPDPKAAARDIRETFRRMGMNDEETVALIAGGHTFGKAHGAGPATHVGPEPEAAPIEAQGLGWISSYGKGKGSDTITSGIEGAWTPTPTQWDTSYFDMLFGYDWWLTKSPAGAWQWMAVDPDEKDLAPDAEDPSKKVPTMMMTTDLALRFDPEYEKIARRFHQNPEEFAEAFARAWFKLTHRDMGPKTRYLGPEVPKEDFIWQDPIPEVDYELTEAEIEEIKAKILNSGLTVSELVKTAWASASTFRNSDKRGGANGARIRLAPQKDWEVNEPERLAKVLSVYEDIQRELPKKVSIADLIVLGGSAAVEKAARDAGFDVKVPFFPGRGDATQEQTDVESFAVLEPFADGFRNYQKQEYSVPPEELLVDKAQLLGLTAPEMTVLVGGLRVLGANYRDLPHGVFTDRIGVLTNDFFVNLLDMNYEWVPTDSGIYEIRDRKTGEVRWTATRVDLIFGSNSILRSYAEFYAQDDNQEKFVRDFINAWVKVMNADRFDLVKKARESVTALQVSDGIRSMGTANLQ

SEQ ID NO: 20065 - protein, 751 aa, Geobacillus stearothermophilus
MENQNRQNAAQCPFHGSVTNQSSNRTTNKDWWPNQLNLSILHQHDRKTNPHDEEFNYAEEFQKLDYWALKEDLRKLMTESQDWWPADYGHYGPLFIRMAWHSAGTYRIGDGRGGASTGTQRFAPLNSWPDNANLDKARRLLWPIKKKYGNKISWADLFILAGNVAIESMGGKTIGFGGGRVDVWHPEEDVYWGSEKEWLASERYSGDRELENPLAAVQMGLIYVNPEGPDGKPDPKAAARDIRETFRRMGMNDEETVALIAGGHTFGKAHGAGPATHVGPEPEAAPIEAQGLGWISSYGKGKGSDTITSGIEGAWTPTPTQWDTSYFDMLFGYDWWLTKSPAGAWQWMAVDPDEKDLAPDAEDPSKKVPTMMMTTDLALRFDPEYEKIARRFHQNPEEFAEAFARAWFKLTHRDMGPKTRYLGPEVPKEDFIWQDPIPEVDYELTEAEIEEIKAKILNSGLTVSELVKTAWASASTFRNSDKRGGANGARIRLAPQKDWEVNEPERLAKVLSVYEDIQRELPKKVSIADLIVLGGSAAVEKAARDAGFDVKVPFFPGRGDATQEQTDVESFAVLEPFADGFRNYQKQEYSVPPEELLVDKAQLLGLTAPEMTVLVGGLRVLGANYRDLPHGVFTDRIGVLTNDFFVNLLDMNYEWVPTDSGIYEIRDRKTGEVRWTATRVDLIFGSNSILRSYAEFYAQDDNQEKFVRDFINAWVKVMNADRFDLVKKARESVTALQLVSFNRSSIINRLQ

SEQ ID NO: 20066 - protein, 751 aa, Geobacillus stearothermophilus
MENQNRQNAAQCPFHGSVTNQSSNRTTNKDWWPNQLNLSILHQHDRKTNPHDEEFNYAEEFQKLDYWALKEDLRKLMTESQDWWPADYGHYGPLFIRMAWHSAGTYRIGDGRGGASTGTQRFAPLNSWPDNANLDKARRLLWPIKKKYGNKISWADLFILAGNVAIESMGGKTIGFGGGRVDVWHPEEDVYWGSEKEWLASERYSGDRELENPLAAVQMGLIYVNPEGPDGKPDPKAAARDIRETFRRMGMNDEETVALIAGGHTFGKAHGAGPATHVGPEPEAAPIEAQGLGWISSYGKGKGSDTITSGIEGAWTPTPTQWDTSYFDMLFGYDWWLTKSPAGAWQWMAVDPDEKDLAPDAEDPSKKVPTMMMTTDLALRFDPEYEKIARRFHQNPEEFAEAFARAWFKLTHRDMGPKTRYLGPEVPKEDFIWQDPIPEVDYELTEAEIEEIKAKILNSGLTVSELVKTAWASASTFRNSDKRGGANGARIRLAPQKDWEVNEPERLAKVLSVYEDIQRELPKKVSIADLIVLGGSAAVEKAARDAGFDVKVPFFPGRGDATQEQTDVESFAVLEPFADGFRNYQKQEYSVPPEELLVDKAQLLGLTAPEMTVLVGGLRVLGANYRDLPHGVFTDRIGVLTNDFFVNLLDMNYEWVPTDSGIYEIRDRKTGEVRWTATRVDLIFGSNSILRSYAEFYAQDDNQEKFVRDFINAWVKVMNADRFDLVKKARESVTALQGIASNRSINNKGLQ

SEQ ID NO: 20067 - protein, 751 aa, Geobacillus stearothermophilus
MENQNRQNAAQCPFHGSVTNQSSNRTTNKDWWPNQLNLSILHQHDRKTNPHDEEFNYAEEFQKLDYWALKEDLRKLMTESQDWWPADYGHYGPLFIRMAWHSAGTYRIGDGRGGASTGTQRFAPLNSWPDNANLDKARRLLWPIKKKYGNKISWADLFILAGNVAIESMGGKTIGFGGGRVDVWHPEEDVYWGSEKEWLASERYSGDRELENPLAAVQMGLIYVNPEGPDGKPDPKAAARDIRETFRRMGMNDEETVALIAGGHTFGKAHGAGPATHVGPEPEAAPIEAQGLGWISSYGKGKGSDTITSGIEGAWTPTPTQWDTSYFDMLFGYDWWLTKSPAGAWQWMAVDPDEKDLAPDAEDPSKKVPTMMMTTDLALRFDPEYEKIARRFHQNPEEFAEAFARAWFKLTHRDMGPKTRYLGPEVPKEDFIWQDPIPEVDYELTEAEIEEIKAKILNSGLTVSELVKTAWASASTFRNSDKRGGANGARIRLAPQKDWEVNEPERLAKVLSVYEDIQRELPKKVSIADLIVLGGSAAVEKAARDAGFDVKVPFFPGRGDATQEQTDVESFAVLEPFADGFRNYQKQEYSVPPEELLVDKAQLLGLTAPEMTVLVGGLRVLGANYRDLPHGVFTDRIGVLTNDFFVNLLDMNYEWVPTDSGIYEIRDRKTGEVRWTATRVDLIFGSNSILRSYAEFYAQDDNQEKFVRDFINAWVKVMNADRFDLVKKARESVTALQVSAATRSVGGRNLQ

SEQ ID NO: 20068 - protein, 744 aa, Geobacillus stearothermophilus
MENQNRQNAAQCPFHGSVTNQSSNRTTNKDWWPNQLNLSILHQHDRKTNPHDEEFNYAEEFQKLDYWALKEDLRKLMTESQDWWPADYGHYGPLFIRMAWHSAGTYRIGDGRGGASTGTQRFAPLNSWPDNANLDKARRLLWPIKKKYGNKISWADLFILAGNVAIESMGGKTIGFGGGRVDVWHPEEDVYWGSEKEWLASERYSGDRELENPLAAVQMGLIYVNPEGPDGKPDPKAAARDIRETFRRMGMNDEETVALIAGGHTFGKAHGAGPATHVGPEPEAAPIEAQGLGWISSYGKGKGSDTITSGIEGAWTPTPTQWDTSYFDMLFGYDWWLTKSPAGAWQWMAVDPDEKDLAPDAEDPSKKVPTMMMTTDLALRFDPEYEKIARRFHQNPEEFAEAFARAWFKLTHRDMGPKTRYLGPEVPKEDFIWQDPIPEVDYELTEAEIEEIKAKILNSGLTVSELVKTAWASASTFRNSDKRGGANGARIRLAPQKDWEVNEPERLAKVLSVYEDIQRELPKKVSIADLIVLGGSAAVEKAARDAGFDVKVPFFPGRGDATQEQTDVESFAVLEPFADGFRNYQKQEYSVPPEELLVDKAQLLGLTAPEMTVLVGGLRVLGANYRDLPHGVFTDRIGVLTNDFFVNLLDMNYEWVPTDSGIYEIRDRKTGEVRWTATRVDLIFGSNSILRSYAEFYAQDDNQEKFVRDFINAWVKVMNADRFDLVKKARESVTALQTLILTPM

SEQ ID NO: 20069 - protein, 751 aa, Geobacillus stearothermophilus
MENQNRQNAAQCPFHGSVTNQSSNRTTNKDWWPNQLNLSILHQHDRKTNPHDEEFNYAEEFQKLDYWALKEDLRKLMTESQDWWPADYGHYGPLFIRMAWHSAGTYRIGDGRGGASTGTQRFAPLNSWPDNANLDKARRLLWPIKKKYGNKISWADLFILAGNVAIESMGGKTIGFGGGRVDVWHPEEDVYWGSEKEWLASERYSGDRELENPLAAVQMGLIYVNPEGPDGKPDPKAAARDIRETFRRMGMNDEETVALIAGGHTFGKAHGAGPATHVGPEPEAAPIEAQGLGWISSYGKGKGSDTITSGIEGAWTPTPTQWDTSYFDMLFGYDWWLTKSPAGAWQWMAVDPDEKDLAPDAEDPSKKVPTMMMTTDLALRFDPEYEKIARRFHQNPEEFAEAFARAWFKLTHRDMGPKTRYLGPEVPKEDFIWQDPIPEVDYELTEAEIEEIKAKILNSGLTVSELVKTAWASASTFRNSDKRGGANGARIRLAPQKDWEVNEPERLAKVLSVYEDIQRELPKKVSIADLIVLGGSAAVEKAARDAGFDVKVPFFPGRGDATQEQTDVESFAVLEPFADGFRNYQKQEYSVPPEELLVDKAQLLGLTAPEMTVLVGGLRVLGANYRDLPHGVFTDRIGVLTNDFFVNLLDMNYEWVPTDSGIYEIRDRKTGEVRWTATRVDLIFGSNSILRSYAEFYAQDDNQEKFVRDFINAWVKVMNADRFDLVKKARESVTALQYAYYSRSTTKNMLQ

SEQ ID NO: 20070 - protein, 749 aa, Geobacillus stearothermophilus
MENQNRQNAAQCPFHGSVTNQSSNRTTNKDWWPNQLNLSILHQHDRKTNPHDEEFNYAEEFQKLDYWALKEDLRKLMTESQDWWPADYGHYGPLFIRMAWHSAGTYRIGDGRGGASTGTQRFAPLNSWPDNANLDKARRLLWPIKKKYGNKISWADLFILAGNVAIESMGGKTIGFGGGRVDVWHPEEDVYWGSEKEWLASERYSGDRELENPLAAVQMGLIYVNPEGPDGKPDPKAAARDIRETFRRMGMNDEETVALIAGGHTFGKAHGAGPATHVGPEPEAAPIEAQGLGWISSYGKGKGSDTITSGIEGAWTPTPTQWDTSYFDMLFGYDWWLTKSPAGAWQWMAVDPDEKDLAPDAEDPSKKVPTMMMTTDLALRFDPEYEKIARRFHQNPEEFAEAFARAWFKLTHRDMGPKTRYLGPEVPKEDFIWQDPIPEVDYELTEAEIEEIKAKILNSGLTVSELVKTAWASASTFRNSDKRGGANGARIRLAPQKDWEVNEPERLAKVLSVYEDIQRELPKKVSIADLIVLGGSAAVEKAARDAGFDVKVPFFPGRGDATQEQTDVESFAVLEPFADGFRNYQKQEYSVPPEELLVDKAQLLGLTAPEMTVLVGGLRVLGANYRDLPHGVFTDRIGVLTNDFFVNLLDMNYEWVPTDSGIYEIRDRKTGEVRWTATRVDLIFGSNSILRSYAEFYAQDDNQEKFVRDFINAWVKVMNADRFDLVKKARESVTALQRFDRSMNTATLQ

SEQ ID NO: 20071 - protein, 750 aa, Geobacillus stearothermophilus
MENQNRQNAAQCPFHGSVTNQSSNRTTNKDWWPNQLNLSILHQHDRKTNPHDEEFNYAEEFQKLDYWALKEDLRKLMTESQDWWPADYGHYGPLFIRMAWHSAGTYRIGDGRGGASTGTQRFAPLNSWPDNANLDKARRLLWPIKKKYGNKISWADLFILAGNVAIESMGGKTIGFGGGRVDVWHPEEDVYWGSEKEWLASERYSGDRELENPLAAVQMGLIYVNPEGPDGKPDPKAAARDIRETFRRMGMNDEETVALIAGGHTFGKAHGAGPATHVGPEPEAAPIEAQGLGWISSYGKGKGSDTITSGIEGAWTPTPTQWDTSYFDMLFGYDWWLTKSPAGAWQWMAVDPDEKDLAPDAEDPSKKVPTMMMTTDLALRFDPEYEKIARRFHQNPEEFAEAFARAWFKLTHRDMGPKTRYLGPEVPKEDFIWQDPIPEVDYELTEAEIEEIKAKILNSGLTVSELVKTAWASASTFRNSDKRGGANGARIRLAPQKDWEVNEPERLAKVLSVYEDIQRELPKKVSIADLIVLGGSAAVEKAARDAGFDVKVPFFPGRGDATQEQTDVESFAVLEPFADGFRNYQKQEYSVPPEELLVDKAQLLGLTAPEMTVLVGGLRVLGANYRDLPHGVFTDRIGVLTNDFFVNLLDMNYEWVPTDSGIYEIRDRKTGEVRWTATRVDLIFGSNSILRSYAEFYAQDDNQEKFVRDFINAWVKVMNADRFDLVKKARESVTALQSFTINRSTTNRLQ

SEQ ID NO: 20072 - protein, 745 aa, Geobacillus stearothermophilus
MENQNRQNAAQCPFHGSVTNQSSNRTTNKDWWPNQLNLSILHQHDRKTNPHDEEFNYAEEFQKLDYWALKEDLRKLMTESQDWWPADYGHYGPLFIRMAWHSAGTYRTGDGRGGASTGTQRFAPLNSWPNNANLDKARRLLWPIKKKYGNKISWADLFILAGNVAIESMGGKTIGFGGGRVDVWHPEEDVYWGSEKEWLASERYSGDRELENPLAAVQMGLTYVNPEGPDGKPDPKAAARDIRETFRRMGMNDEETVALIAGGHTFGKAHGAGPATHVGPEPEAAPIEAQGLGWISSYGKGKGSDTITSGIEGAWTPTPTQWDTSYFDMLFGYDWWLTKSPAGAWQWMAVDPDEKDLAPDAEDPSKKVPTMMMTTDLALRFDPEYEKIARRFHQNPEEFAEAFARAWFKLTHRDMGPKTRYLGPEVPKEDFIWQDPIPEVDYELTEAEIEEIKAKILNSGLTVSELVKTAWASASTFRNSDKRGGANGARIRLAPQKDWEVNEPERLAKVLSVYEDIQRELPKKVSIADLIVLGGSAAVEKAARDAGFDVKVPFFPGRGDATQEQTDVESFAVLEPFADGFRNYQKQEYSVPPEELLVDKAQLLGLTAPEMTVLVGGLRVLGANYRDLPHGVFTDRIGVLTNDFFVNLLDMNYEWVPTDSGIYEIRDRKTGEVRWTATRVDLIFGSNSILRSYAEFYAQDDNQEKFVRDFINAWVKVMNADRFDLVKKARESVTALQIVTSTDLE

SEQ ID NO: 20073 - protein, 751 aa, Geobacillus stearothermophilus
MENQNRQNAAQCPFHGSVTNQSSNRTTNKDWWPNQLNLSILHQHDRKTNPHDEEFNYAEEFQKLDYWALKEDLRKLMTESQDWWPADYGHYGPLFIRMAWHSAGTYRIGDGRGGASTGTQRFAPLNSWPDNANLDKARRLLWPIKKKYGNKISWADLFILAGNVAIESMGGKTIGFGGGRVDVWHPEEDVYWGSEKEWLASERYSGDRELENPLAAVQMGLIYVNPEGPDGKPDPKAAARDIRETFRRMGMNDEETVALIAGGHTFGKAHGAGPATHVGPEPEAAPIEAQGLGWISSYGKGKGSDTITSGIEGAWTPTPTQWDTSYFDMLFGYDWWLTKSPAGAWQWMAVDPDEKDLAPDAEDPSKKVPTMMMTTDLALRFDPEYEKIARRFHQNPEEFAEAFARAWFKLTHRDMGPKTRYLGPEVPKEDFIWQDPIPEVDYELTEAEIEEIKAKILNSGLTVSELVKTAWASASTFRNSDKRGGANGARIRLAPQKDWEVNEPERLAKVLSVYEDIQRELPKKVSIADLIVLGGSAAVEKAARDAGFDVKVPFFPGRGDATQEQTDVESFAVLEPFADGFRNYQKQEYSVPPEELLVDKAQLLGLTAPEMTVLVGGLRVLGANYRDLPHGVFTDRIGVLTNDFFVNLLDMNYEWVPTDSGIYEIRDRKTGEVRWTATRVDLIFGSNSILRSYAEFYAQDDNQEKFVRDFINAWVKVMNADRFDLVKKARESVTALQYTHFDRSVDAAVSK

SEQ ID NO: 20074 - protein, 751 aa, Geobacillus stearothermophilus
MENQNRQNAAQCPFHGSVTNQSSNRTTNKDWWPNQLNLSILHQHDRKTNPHDEEFNYAEEFQKLDYWALKEDLRKLMTESQDWWPADYGHYGPLFIRMAWHSAGTYRTGDGRGGASTGTQRFAPLNSWPNNANLDKARRLLWPIKKKYGNKISWADLFILAGNVAIESMGGKTIGFGGGRVDVWHPEEDVYWGSEKEWLASERYSGDRELENPLAAVQMGLTYVNPEGPDGKPDPKAAARDIRETFRRMGMNDEETVALIAGGHTFGKAHGAGPATHVGPEPEAAPIEAQGLGWISSYGKGKGSDTITSGIEGAWTPTPTQWDTSYFDMLFGYDWWLTKSPAGAWQWMAVDPDEKDLAPDAEDPSKKVPTMMMTTDLALRFDPEYEKIARRFHQNPEEFAEAFARAWFKLTHRDMGPKTRYLGPEVPKEDFIWQDPIPEVDYELTEAEIEEIKAKILNSGLTVSELVKTAWASASTFRNSDKRGGANGARIRLAPQKDWEVNEPERLAKVLSVYEDIQRELPKKVSIADLIVLGGSAAVEKAARDAGFDVKVPFFPGRGDATQEQTDVESFAVLEPFADGFRNYQKQEYSVPPEELLVDKAQLLGLTAPEMTVLVGGLRVLGANYRDLPHGVFTDRIGVLTNDFFVNLLDMNYEWVPTDSGIYEIRDRKTGEVRWTATRVDLIFGSNSILRSYAEFYAQDDNQEKFVRDFINAWVKVMNADRFDLVKKARESVTALQTNTPCRSGNNMNLQ

SEQ ID NO: 20075 - protein, 752 aa, Geobacillus stearothermophilus
MENQNRQNAAQCPFHGSVTNQSSNRTTNKDWWPNQLNLSILHQHDRKTNPHDEEFNYAEEFQKLDYWALKEDLRKLMTESQDWWPADYGHYGPLFIRMAWHSAGTYRIGDGRGGASTGTQRFAPLNSWPDNANLDKARRLLWPIKKKYGNKISWADLFILAGNVAIESMGGKTIGFGGGRVDVWHPEEDVYWGSEKEWLASERYSGDRELENPLAAVQMGLIYVNPEGPDGKPDPKAAARDIRETFRRMGMNDEETVALIAGGHTFGKAHGAGPATHVGPEPEAAPIEAQGLGWISSYGKGKGSDTITSGIEGAWTPTPTQWDTSYFDMLFGYDWWLTKSPAGAWQWMAVDPDEKDLAPDAEDPSKKVPTMMMTTDLALRFDPEYEKIARRFHQNPEEFAEAFARAWFKLTHRDMGPKTRYLGPEVPKEDFIWQDPIPEVDYELTEAEIEEIKAKILNSGLTVSELVKTAWASASTFRNSDKRGGANGARIRLAPQKDWEVNEPERLAKVLSVYEDIQRELPKKVSIADLIVLGGSAAVEKAARDAGFDVKVPFFPGRGDATQEQTDVESFAVLEPFADGFRNYQKQEYSVPPEELLVDKAQLLGLTAPEMTVLVGGLRVLGANYRDLPHGVFTDRIGVLTNDFFVNLLDMNYEWVPTDSGIYEIRDRKTGEVRWTATRVDLIFGSNSILRSYAEFYAQDDNQEKFVRDFINAWVKVMNADRFDLVKKARESVTALQLIFHIRSKMVTAVSK

SEQ ID NO: 20076 - protein, 751 aa, Geobacillus stearothermophilus
MENQNRQNAAQCPFHGSVTNQSSNRTTNKDWWPNQLNLSILHQHDRKTNPHDEEFNYAEEFQKLDYWALKEDLRKLMTESQDWWPADYGHYGPLFIRMAWHSAGTYRTGDGRGGASTGTQRFAPLNSWPNNANLDKARRLLWPIKKKYGNKISWADLFILAGNVAIESMGGKTIGFGGGRVDVWHPEEDVYWGSEKEWLASERYSGDRELENPLAAVQMGLTYVNPEGPDGKPDPKAAARDIRETFRRMGMNDEETVALIAGGHTFGKAHGAGPATHVGPEPEAAPIEAQGLGWISSYGKGKGSDTITSGIEGAWTPTPTQWDTSYFDMLFGYDWWLTKSPAGAWQWMAVDPDEKDLAPDAEDPSKKVPTMMMTTDLALRFDPEYEKIARRFHQNPEEFAEAFARAWFKLTHRDMGPKTRYLGPEVPKEDFIWQDPIPEVDYELTEAEIEEIKAKILNSGLTVSELVKTAWASASTFRNSDKRGGANGARIRLAPQKDWEVNEPERLAKVLSVYEDIQRELPKKVSIADLIVLGGSAAVEKAARDAGFDVKVPFFPGRGDATQEQTDVESFAVLEPFADGFRNYQKQEYSVPPEELLVDKAQLLGLTAPEMTVLVGGLRVLGANYRDLPHGVFTDRIGVLTNDFFVNLLDMNYEWVPTDSGIYEIRDRKTGEVRWTATRVDLIFGSNSILRSYAEFYAQDDNQEKFVRDFINAWVKVMNADRFDLVKKARESVTALQSVHSNRSDTARNLQ

SEQ ID NO: 20077 - protein, 751 aa, Geobacillus stearothermophilus
MENQNRQNAAQCPFHGSVTNQSSNRTTNKDWWPNQLNLSILHQHDRKTNPHDEEFNYAEEFQKLDYWALKEDLRKLMTESQDWWPADYGHYGPLFIRMAWHSAGTYRTGDGRGGASTGTQRFAPLNSWPNNANLDKARRLLWPIKKKYGNKISWADLFILAGNVAIESMGGKTIGFGGGRVDVWHPEEDVYWGSEKEWLASERYSGDRELENPLAAVQMGLTYVNPEGPDGKPDPKAAARDIRETFRRMGMNDEETVALIAGGHTFGKAHGAGPATHVGPEPEAAPIEAQGLGWISSYGKGKGSDTITSGIEGAWTPTPTQWDTSYFDMLFGYDWWLTKSPAGAWQWMAVDPDEKDLAPDAEDPSKKVPTMMMTTDLALRFDPEYEKIARRFHQNPEEFAEAFARAWFKLTHRDMGPKTRYLGPEVPKEDFIWQDPIPEVDYELTEAEIEEIKAKILNSGLTVSELVKTAWASASTFRNSDKRGGANGARIRLAPQKDWEVNEPERLAKVLSVYEDIQRELPKKVSIADLIVLGGSAAVEKAARDAGFDVKVPFFPGRGDATQEQTDVESFAVLEPFADGFRNYQKQEYSVPPEELLVDKAQLLGLTAPEMTVLVGGLRVLGANYRDLPHGVFTDRIGVLTNDFFVNLLDMNYEWVPTDSGIYEIRDRKTGEVRWTATRVDLIFGSNSILRSYAEFYAQDDNQEKFVRDFINAWVKVMNADRFDLVKKARESVTALQLNCHNRSMGSTTLQ

SEQ ID NO: 20078 - protein, 751 aa, Geobacillus stearothermophilus
MENQNRQNAAQCPFHGSVTNQSSNRTTNKDWWPNQLNLSILHQHDRKTNPHDEEFNYAEEFQKLDYWALKEDLRKLMTESQDWWPADYGHYGPLFIRMAWHSAGTYRTGDGRGGASTGTQRFAPLNSWPNNANLDKARRLLWPIKKKYGNKISWADLFILAGNVAIESMGGKTIGFGGGRVDVWHPEEDVYWGSEKEWLASERYSGDRELENPLAAVQMGLTYVNPEGPDGKPDPKAAARDIRETFRRMGMNDEETVALIAGGHTFGKAHGAGPATHVGPEPEAAPIEAQGLGWISSYGKGKGSDTITSGIEGAWTPTPTQWDTSYFDMLFGYDWWLTKSPAGAWQWMAVDPDEKDLAPDAEDPSKKVPTMMMTTDLALRFDPEYEKIARRFHQNPEEFAEAFARAWFKLTHRDMGPKTRYLGPEVPKEDFIWQDPIPEVDYELTEAEIEEIKAKILNSGLTVSELVKTAWASASTFRNSDKRGGANGARIRLAPQKDWEVNEPERLAKVLSVYEDIQRELPKKVSIADLIVLGGSAAVEKAARDAGFDVKVPFFPGRGDATQEQTDVESFAVLEPFADGFRNYQKQEYSVPPEELLVDKAQLLGLTAPEMTVLVGGLRVLGANYRDLPHGVFTDRIGVLTNDFFVNLLDMNYEWVPTDSGIYEIRDRKTGEVRWTATRVDLIFGSNSILRSYAEFYAQDDNQEKFVRDFINAWVKVMNADRFDLVKKARESVTALQTFGDPRSVAEDVLQ

SEQ ID NO: 20079 - protein, 751 aa, Geobacillus stearothermophilus
MENQNRQNAAQCPFHGSVTNQSSNRTTNKDWWPNQLNLSILHQHDRKTNPHDEEFNYAEEFQKLDYWALKEDLRKLMTESQDWWPADYGHYGPLFIRMAWHSAGTYRTGDGRGGASTGTQRFAPLNSWPNNANLDKARRLLWPIKKKYGNKISWADLFILAGNVAIESMGGKTIGFGGGRVDVWHPEEDVYWGSEKEWLASERYSGDRELENPLAAVQMGLTYVNPEGPDGKPDPKAAARDIRETFRRMGMNDEETVALIAGGHTFGKAHGAGPATHVGPEPEAAPIEAQGLGWISSYGKGKGSDTITSGIEGAWTPTPTQWDTSYFDMLFGYDWWLTKSPAGAWQWMAVDPDEKDLAPDAEDPSKKVPTMMMTTDLALRFDPEYEKIARRFHQNPEEFAEAFARAWFKLTHRDMGPKTRYLGPEVPKEDFIWQDPIPEVDYELTEAEIEEIKAKILNSGLTVSELVKTAWASASTFRNSDKRGGANGARIRLAPQKDWEVNEPERLAKVLSVYEDIQRELPKKVSIADLIVLGGSAAVEKAARDAGFDVKVPFFPGRGDATQEQTDVESFAVLEPFADGFRNYQKQEYSVPPEELLVDKAQLLGLTAPEMTVLVGGLRVLGANYRDLPHGVFTDRIGVLTNDFFVNLLDMNYEWVPTDSGIYEIRDRKTGEVRWTATRVDLIFGSNSILRSYAEFYAQDDNQEKFVRDFINAWVKVMNADRFDLVKKARESVTALQIIYDDRSEKTVDLQ

SEQ ID NO: 20080 - protein, 751 aa, Geobacillus stearothermophilus
MENQNRQNAAQCPFHGSVTNQSSNRTTNKDWWPNQLNLSILHQHDRKTNPHDEEFNYAEEFQKLDYWALKEDLRKLMTESQDWWPADYGHYGPLFIRMAWHSAGTYRIGDGRGGASTGTQRFAPLNSWPDNANLDKARRLLWPIKKKYGNKISWADLFILAGNVAIESMGGKTIGFGGGRVDVWHPEEDVYWGSEKEWLASERYSGDRELENPLAAVQMGLIYVNPEGPDGKPDPKAAARDIRETFRRMGMNDEETVALIAGGHTFGKAHGAGPATHVGPEPEAAPIEAQGLGWISSYGKGKGSDTITSGIEGAWTPTPTQWDTSYFDMLFGYDWWLTKSPAGAWQWMAVDPDEKDLAPDAEDPSKKVPTMMMTTDLALRFDPEYEKIARRFHQNPEEFAEAFARAWFKLTHRDMGPKTRYLGPEVPKEDFIWQDPIPEVDYELTEAEIEEIKAKILNSGLTVSELVKTAWASASTFRNSDKRGGANGARIRLAPQKDWEVNEPERLAKVLSVYEDIQRELPKKVSIADLIVLGGSAAVEKAARDAGFDVKVPFFPGRGDATQEQTDVESFAVLEPFADGFRNYQKQEYSVPPEELLVDKAQLLGLTAPEMTVLVGGLRVLGANYRDLPHGVFTDRIGVLTNDFFVNLLDMNYEWVPTDSGIYEIRDRKTGEVRWTATRVDLIFGSNSILRSYAEFYAQDDNQEKFVRDFINAWVKVMNADRFDLVKKARESVTALQVYPYTRSKGVGVLQ

SEQ ID NO: 20081 - protein, 751 aa, Geobacillus stearothermophilus
MENQNRQNAAQCPFHGSVTNQSSNRTTNKDWWPNQLNLSILHQHDRKTNPHDEEFNYAEEFQKLDYWALKEDLRKLMTESQDWWPADYGHYGPLFIRMAWHSAGTYRIGDGRGGASTGTQRFAPLNSWPDNANLDKARRLLWPIKKKYGNKISWADLFILAGNVAIESMGGKTIGFGGGRVDVWHPEEDVYWGSEKEWLASERYSGDRELENPLAAVQMGLIYVNPEGPDGKPDPKAAARDIRETFRRMGMNDEETVALIAGGHTFGKAHGAGPATHVGPEPEAAPIEAQGLGWISSYGKGKGSDTITSGIEGAWTPTPTQWDTSYFDMLFGYDWWLTKSPAGAWQWMAVDPDEKDLAPDAEDPSKKVPTMMMTTDLALRFDPEYEKIARRFHQNPEEFAEAFARAWFKLTHRDMGPKTRYLGPEVPKEDFIWQDPIPEVDYELTEAEIEEIKAKILNSGLTVSELVKTAWASASTFRNSDKRGGANGARIRLAPQKDWEVNEPERLAKVLSVYEDIQRELPKKVSIADLIVLGGSAAVEKAARDAGFDVKVPFFPGRGDATQEQTDVESFAVLEPFADGFRNYQKQEYSVPPEELLVDKAQLLGLTAPEMTVLVGGLRVLGANYRDLPHGVFTDRIGVLTNDFFVNLLDMNYEWVPTDSGIYEIRDRKTGEVRWTATRVDLIFGSNSILRSYAEFYAQDDNQEKFVRDFINAWVKVMNADRFDLVKKARESVTALQCFCNFRSVGINTLQ

SEQ ID NO: 20082 - protein, 751 aa, Geobacillus stearothermophilus
MENQNRQNAAQCPFHGSVTNQSSNRTTNKDWWPNQLNLSILHQHDRKTNPHDEEFNYAEEFQKLDYWALKEDLRKLMTESQDWWPADYGHYGPLFIRMAWHSAGTYRTGDGRGGASTGTQRFAPLNSWPNNANLDKARRLLWPIKKKYGNKISWADLFILAGNVAIESMGGKTIGFGGGRVDVWHPEEDVYWGSEKEWLASERYSGDRELENPLAAVQMGLTYVNPEGPDGKPDPKAAARDIRETFRRMGMNDEETVALIAGGHTFGKAHGAGPATHVGPEPEAAPIEAQGLGWISSYGKGKGSDTITSGIEGAWTPTPTQWDTSYFDMLFGYDWWLTKSPAGAWQWMAVDPDEKDLAPDAEDPSKKVPTMMMTTDLALRFDPEYEKIARRFHQNPEEFAEAFARAWFKLTHRDMGPKTRYLGPEVPKEDFIWQDPIPEVDYELTEAEIEEIKAKILNSGLTVSELVKTAWASASTFRNSDKRGGANGARIRLAPQKDWEVNEPERLAKVLSVYEDIQRELPKKVSIADLIVLGGSAAVEKAARDAGFDVKVPFFPGRGDATQEQTDVESFAVLEPFADGFRNYQKQEYSVPPEELLVDKAQLLGLTAPEMTVLVGGLRVLGANYRDLPHGVFTDRIGVLTNDFFVNLLDMNYEWVPTDSGIYEIRDRKTGEVRWTATRVDLIFGSNSILRSYAEFYAQDDNQEKFVRDFINAWVKVMNADRFDLVKKARESVTALQGCAALRSKIGKRLQ

SEQ ID NO: 20083 - protein, 751 aa, Geobacillus stearothermophilus
MENQNRQNAAQCPFHGSVTNQSSNRTTNKDWWPNQLNLSILHQHDRKTNPHDEEFNYAEEFQKLDYWALKEDLRKLMTESQDWWPADYGHYGPLFIRMAWHSAGTYRIGDGRGGASTGTQRFAPLNSWPDNANLDKARRLLWPIKKKYGNKISWADLFILAGNVAIESMGGKTIGFGGGRVDVWHPEEDVYWGSEKEWLASERYSGDRELENPLAAVQMGLIYVNPEGPDGKPDPKAAARDIRETFRRMGMNDEETVALIAGGHTFGKAHGAGPATHVGPEPEAAPIEAQGLGWISSYGKGKGSDTITSGIEGAWTPTPTQWDTSYFDMLFGYDWWLTKSPAGAWQWMAVDPDEKDLAPDAEDPSKKVPTMMMTTDLALRFDPEYEKIARRFHQNPEEFAEAFARAWFKLTHRDMGPKTRYLGPEVPKEDFIWQDPIPEVDYELTEAEIEEIKAKILNSGLTVSELVKTAWASASTFRNSDKRGGANGARIRLAPQKDWEVNEPERLAKVLSVYEDIQRELPKKVSIADLIVLGGSAAVEKAARDAGFDVKVPFFPGRGDATQEQTDVESFAVLEPFADGFRNYQKQEYSVPPEELLVDKAQLLGLTAPEMTVLVGGLRVLGANYRDLPHGVFTDRIGVLTNDFFVNLLDMNYEWVPTDSGIYEIRDRKTGEVRWTATRVDLIFGSNSILRSYAEFYAQDDNQEKFVRDFINAWVKVMNADRFDLVKKARESVTALQNNCDNRSDVVVTLQ

SEQ ID NO: 20084 - protein, 752 aa, Geobacillus stearothermophilus
MENQNRQNAAQCPFHGSVTNQSSNRTTNKDWWPNQLNLSILHQHDRKTNPHDEEFNYAEEFQKLDYWALKEDLRKLMTESQDWWPADYGHYGPLFIRMAWHSAGTYRIGDGRGGASTGTQRFAPLNSWPDNANLDKARRLLWPIKKKYGNKISWADLFILAGNVAIESMGGKTIGFGGGRVDVWHPEEDVYWGSEKEWLASERYSGDRELENPLAAVQMGLIYVNPEGPDGKPDPKAAARDIRETFRRMGMNDEETVALIAGGHTFGKAHGAGPATHVGPEPEAAPIEAQGLGWISSYGKGKGSDTITSGIEGAWTPTPTQWDTSYFDMLFGYDWWLTKSPAGAWQWMAVDPDEKDLAPDAEDPSKKVPTMMMTTDLALRFDPEYEKIARRFHQNPEEFAEAFARAWFKLTHRDMGPKTRYLGPEVPKEDFIWQDPIPEVDYELTEAEIEEIKAKILNSGLTVSELVKTAWASASTFRNSDKRGGANGARIRLAPQKDWEVNEPERLAKVLSVYEDIQRELPKKVSIADLIVLGGSAAVEKAARDAGFDVKVPFFPGRGDATQEQTDVESFAVLEPFADGFRNYQKQEYSVPPEELLVDKAQLLGLTAPEMTVLVGGLRVLGANYRDLPHGVFTDRIGVLTNDFFVNLLDMNYEWVPTDSGIYEIRDRKTGEVRWTATRVDLIFGSNSILRSYAEFYAQDDNQEKFVRDFINAWVKVMNADRFDLVKKARESVTALQTGALPDLLLIINCSK

SEQ ID NO: 20085 - protein, 751 aa, Geobacillus stearothermophilus
MENQNRQNAAQCPFHGSVTNQSSNRTTNKDWWPNQLNLSILHQHDRKTNPHDEEFNYAEEFQKLDYWALKEDLRKLMTESQDWWPADYGHYGPLFIRMAWHSAGTYRTGDGRGGASTGTQRFAPLNSWPNNANLDKARRLLWPIKKKYGNKISWADLFILAGNVAIESMGGKTIGFGGGRVDVWHPEEDVYWGSEKEWLASERYSGDRELENPLAAVQMGLTYVNPEGPDGKPDPKAAARDIRETFRRMGMNDEETVALIAGGHTFGKAHGAGPATHVGPEPEAAPIEAQGLGWISSYGKGKGSDTITSGIEGAWTPTPTQWDTSYFDMLFGYDWWLTKSPAGAWQWMAVDPDEKDLAPDAEDPSKKVPTMMMTTDLALRFDPEYEKIARRFHQNPEEFAEAFARAWFKLTHRDMGPKTRYLGPEVPKEDFIWQDPIPEVDYELTEAEIEEIKAKILNSGLTVSELVKTAWASASTFRNSDKRGGANGARIRLAPQKDWEVNEPERLAKVLSVYEDIQRELPKKVSIADLIVLGGSAAVEKAARDAGFDVKVPFFPGRGDATQEQTDVESFAVLEPFADGFRNYQKQEYSVPPEELLVDKAQLLGLTAPEMTVLVGGLRVLGANYRDLPHGVFTDRIGVLTNDFFVNLLDMNYEWVPTDSGIYEIRDRKTGEVRWTATRVDLIFGSNSILRSYAEFYAQDDNQEKFVRDFINAWVKVMNADRFDLVKKARESVTALQFRYNRRSGDVTVLQ

SEQ ID NO: 20086 - protein, 751 aa, Geobacillus stearothermophilus
MENQNRQNAAQCPFHGSVTNQSSNRTTNKDWWPNQLNLSILHQHDRKTNPHDEEFNYAEEFQKLDYWALKEDLRKLMTESQDWWPADYGHYGPLFIRMAWHSAGTYRTGDGRGGASTGTQRFAPLNSWPNNANLDKARRLLWPIKKKYGNKISWADLFILAGNVAIESMGGKTIGFGGGRVDVWHPEEDVYWGSEKEWLASERYSGDRELENPLAAVQMGLTYVNPEGPDGKPDPKAAARDIRETFRRMGMNDEETVALIAGGHTFGKAHGAGPATHVGPEPEAAPIEAQGLGWISSYGKGKGSDTITSGIEGAWTPTPTQWDTSYFDMLFGYDWWLTKSPAGAWQWMAVDPDEKDLAPDAEDPSKKVPTMMMTTDLALRFDPEYEKIARRFHQNPEEFAEAFARAWFKLTHRDMGPKTRYLGPEVPKEDFIWQDPIPEVDYELTEAEIEEIKAKILNSGLTVSELVKTAWASASTFRNSDKRGGANGARIRLAPQKDWEVNEPERLAKVLSVYEDIQRELPKKVSIADLIVLGGSAAVEKAARDAGFDVKVPFFPGRGDATQEQTDVESFAVLEPFADGFRNYQKQEYSVPPEELLVDKAQLLGLTAPEMTVLVGGLRVLGANYRDLPHGVFTDRIGVLTNDFFVNLLDMNYEWVPTDSGIYEIRDRKTGEVRWTATRVDLIFGSNSILRSYAEFYAQDDNQEKFVRDFINAWVKVMNADRFDLVKKARESVTALQFYSFVRSVTEEKLQ

SEQ ID NO: 20087 - protein, 751 aa, Geobacillus stearothermophilus
MENQNRQNAAQCPFHGSVTNQSSNRTTNKDWWPNQLNLSILHQHDRKTNPHDEEFNYAEEFQKLDYWALKEDLRKLMTESQDWWPADYGHYGPLFIRMAWHSAGTYRTGDGRGGASTGTQRFAPLNSWPNNANLDKARRLLWPIKKKYGNKISWADLFILAGNVAIESMGGKTIGFGGGRVDVWHPEEDVYWGSEKEWLASERYSGDRELENPLAAVQMGLTYVNPEGPDGKPDPKAAARDIRETFRRMGMNDEETVALIAGGHTFGKAHGAGPATHVGPEPEAAPIEAQGLGWISSYGKGKGSDTITSGIEGAWTPTPTQWDTSYFDMLFGYDWWLTKSPAGAWQWMAVDPDEKDLAPDAEDPSKKVPTMMMTTDLALRFDPEYEKIARRFHQNPEEFAEAFARAWFKLTHRDMGPKTRYLGPEVPKEDFIWQDPIPEVDYELTEAEIEEIKAKILNSGLTVSELVKTAWASASTFRNSDKRGGANGARIRLAPQKDWEVNEPERLAKVLSVYEDIQRELPKKVSIADLIVLGGSAAVEKAARDAGFDVKVPFFPGRGDATQEQTDVESFAVLEPFADGFRNYQKQEYSVPPEELLVDKAQLLGLTAPEMTVLVGGLRVLGANYRDLPHGVFTDRIGVLTNDFFVNLLDMNYEWVPTDSGIYEIRDRKTGEVRWTATRVDLIFGSNSILRSYAEFYAQDDNQEKFVRDFINAWVKVMNADRFDLVKKARESVTALQYPAPFRSVSVGSLQ

SEQ ID NO: 20088 - protein, 751 aa, Geobacillus stearothermophilus
MENQNRQNAAQCPFHGSVTNQSSNRTTNKDWWPNQLNLSILHQHDRKTNPHDEEFNYAEEFQKLDYWALKEDLRKLMTESQDWWPADYGHYGPLFIRMAWHSAGTYRTGDGRGGASTGTQRFAPLNSWPNNANLDKARRLLWPIKKKYGNKISWADLFILAGNVAIESMGGKTIGFGGGRVDVWHPEEDVYWGSEKEWLASERYSGDRELENPLAAVQMGLTYVNPEGPDGKPDPKAAARDIRETFRRMGMNDEETVALIAGGHTFGKAHGAGPATHVGPEPEAAPIEAQGLGWISSYGKGKGSDTITSGIEGAWTPTPTQWDTSYFDMLFGYDWWLTKSPAGAWQWMAVDPDEKDLAPDAEDPSKKVPTMMMTTDLALRFDPEYEKIARRFHQNPEEFAEAFARAWFKLTHRDMGPKTRYLGPEVPKEDFIWQDPIPEVDYELTEAEIEEIKAKILNSGLTVSELVKTAWASASTFRNSDKRGGANGARIRLAPQKDWEVNEPERLAKVLSVYEDIQRELPKKVSIADLIVLGGSAAVEKAARDAGFDVKVPFFPGRGDATQEQTDVESFAVLEPFADGFRNYQKQEYSVPPEELLVDKAQLLGLTAPEMTVLVGGLRVLGANYRDLPHGVFTDRIGVLTNDFFVNLLDMNYEWVPTDSGIYEIRDRKTGEVRWTATRVDLIFGSNSILRSYAEFYAQDDNQEKFVRDFINAWVKVMNADRFDLVKKARESVTALQSDLSFRSVGVDILQ

SEQ ID NO: 20089 - protein, 751 aa, Geobacillus stearothermophilus
MENQNRQNAAQCPFHGSVTNQSSNRTTNKDWWPNQLNLSILHQHDRKTNPHDEEFNYAEEFQKLDYWALKEDLRKLMTESQDWWPADYGHYGPLFIRMAWHSAGTYRTGDGRGGASTGTQRFAPLNSWPNNANLDKARRLLWPIKKKYGNKISWADLFILAGNVAIESMGGKTIGFGGGRVDVWHPEEDVYWGSEKEWLASERYSGDRELENPLAAVQMGLTYVNPEGPDGKPDPKAAARDIRETFRRMGMNDEETVALIAGGHTFGKAHGAGPATHVGPEPEAAPIEAQGLGWISSYGKGKGSDTITSGIEGAWTPTPTQWDTSYFDMLFGYDWWLTKSPAGAWQWMAVDPDEKDLAPDAEDPSKKVPTMMMTTDLALRFDPEYEKIARRFHQNPEEFAEAFARAWFKLTHRDMGPKTRYLGPEVPKEDFIWQDPIPEVDYELTEAEIEEIKAKILNSGLTVSELVKTAWASASTFRNSDKRGGANGARIRLAPQKDWEVNEPERLAKVLSVYEDIQRELPKKVSIADLIVLGGSAAVEKAARDAGFDVKVPFFPGRGDATQEQTDVESFAVLEPFADGFRNYQKQEYSVPPEELLVDKAQLLGLTAPEMTVLVGGLRVLGANYRDLPHGVFTDRIGVLTNDFFVNLLDMNYEWVPTDSGIYEIRDRKTGEVRWTATRVDLIFGSNSILRSYAEFYAQDDNQEKFVRDFINAWVKVMNADRFDLVKKARESVTALQGCLSCRSIVIVGLQ

SEQ ID NO: 20090 - protein, 751 aa, Geobacillus stearothermophilus
MENQNRQNAAQCPFHGSVTNQSSNRTTNKDWWPNQLNLSILHQHDRKTNPHDEEFNYAEEFQKLDYWALKEDLRKLMTESQDWWPADYGHYGPLFIRMAWHSAGTYRIGDGRGGASTGTQRFAPLNSWPDNANLDKARRLLWPIKKKYGNKISWADLFILAGNVAIESMGGKTIGFGGGRVDVWHPEEDVYWGSEKEWLASERYSGDRELENPLAAVQMGLIYVNPEGPDGKPDPKAAARDIRETFRRMGMNDEETVALIAGGHTFGKAHGAGPATHVGPEPEAAPIEAQGLGWISSYGKGKGSDTITSGIEGAWTPTPTQWDTSYFDMLFGYDWWLTKSPAGAWQWMAVDPDEKDLAPDAEDPSKKVPTMMMTTDLALRFDPEYEKIARRFHQNPEEFAEAFARAWFKLTHRDMGPKTRYLGPEVPKEDFIWQDPIPEVDYELTEAEIEEIKAKILNSGLTVSELVKTAWASASTFRNSDKRGGANGARIRLAPQKDWEVNEPERLAKVLSVYEDIQRELPKKVSIADLIVLGGSAAVEKAARDAGFDVKVPFFPGRGDATQEQTDVESFAVLEPFADGFRNYQKQEYSVPPEELLVDKAQLLGLTAPEMTVLVGGLRVLGANYRDLPHGVFTDRIGVLTNDFFVNLLDMNYEWVPTDSGIYEIRDRKTGEVRWTATRVDLIFGSNSILRSYAEFYAQDDNQEKFVRDFINAWVKVMNADRFDLVKKARESVTALQCIIFSRSDVAIALQ

SEQ ID NO: 20091 - protein, 751 aa, Geobacillus stearothermophilus
MENQNRQNAAQCPFHGSVTNQSSNRTTNKDWWPNQLNLSILHQHDRKTNPHDEEFNYAEEFQKLDYWALKEDLRKLMTESQDWWPADYGHYGPLFIRMAWHSAGTYRIGDGRGGASTGTQRFAPLNSWPDNANLDKARRLLWPIKKKYGNKISWADLFILAGNVAIESMGGKTIGFGGGRVDVWHPEEDVYWGSEKEWLASERYSGDRELENPLAAVQMGLIYVNPEGPDGKPDPKAAARDIRETFRRMGMNDEETVALIAGGHTFGKAHGAGPATHVGPEPEAAPIEAQGLGWISSYGKGKGSDTITSGIEGAWTPTPTQWDTSYFDMLFGYDWWLTKSPAGAWQWMAVDPDEKDLAPDAEDPSKKVPTMMMTTDLALRFDPEYEKIARRFHQNPEEFAEAFARAWFKLTHRDMGPKTRYLGPEVPKEDFIWQDPIPEVDYELTEAEIEEIKAKILNSGLTVSELVKTAWASASTFRNSDKRGGANGARIRLAPQKDWEVNEPERLAKVLSVYEDIQRELPKKVSIADLIVLGGSAAVEKAARDAGFDVKVPFFPGRGDATQEQTDVESFAVLEPFADGFRNYQKQEYSVPPEELLVDKAQLLGLTAPEMTVLVGGLRVLGANYRDLPHGVFTDRIGVLTNDFFVNLLDMNYEWVPTDSGIYEIRDRKTGEVRWTATRVDLIFGSNSILRSYAEFYAQDDNQEKFVRDFINAWVKVMNADRFDLVKKARESVTALQGSNYPRSRITKDLQ

SEQ ID NO: 20092 - protein, 743 aa, Geobacillus stearothermophilus
MENQNRQNAAQCPFHGSVTNQSSNRTTNKDWWPNQLNLSILHQHDRKTNPHDEEFNYAEEFQKLDYWALKEDLRKLMTESQDWWPADYGHYGPLFIRMAWHSAGTYRIGDGRGGASTGTQRFAPLNSWPDNANLDKARRLLWPIKKKYGNKISWADLFILAGNVAIESMGGKTIGFGGGRVDVWHPEEDVYWGSEKEWLASERYSGDRELENPLAAVQMGLIYVNPEGPDGKPDPKAAARDIRETFRRMGMNDEETVALIAGGHTFGKAHGAGPATHVGPEPEAAPIEAQGLGWISSYGKGKGSDTITSGIEGAWTPTPTQWDTSYFDMLFGYDWWLTKSPAGAWQWMAVDPDEKDLAPDAEDPSKKVPTMMMTTDLALRFDPEYEKIARRFHQNPEEFAEAFARAWFKLTHRDMGPKTRYLGPEVPKEDFIWQDPIPEVDYELTEAEIEEIKAKILNSGLTVSELVKTAWASASTFRNSDKRGGANGARIRLAPQKDWEVNEPERLAKVLSVYEDIQRELPKKVSIADLIVLGGSAAVEKAARDAGFDVKVPFFPGRGDATQEQTDVESFAVLEPFADGFRNYQKQEYSVPPEELLVDKAQLLGLTAPEMTVLVGGLRVLGANYRDLPHGVFTDRIGVLTNDFFVNLLDMNYEWVPTDSGIYEIRDRKTGEVRWTATRVDLIFGSNSILRSYAEFYAQDDNQEKFVRDFINAWVKVMNADRFDLVKKARESVTALQYFLNFY

SEQ ID NO: 20093 - protein, 751 aa, Geobacillus stearothermophilus
MENQNRQNAAQCPFHGSVTNQSSNRTTNKDWWPNQLNLSILHQHDRKTNPHDEEFNYAEEFQKLDYWALKEDLRKLMTESQDWWPADYGHYGPLFIRMAWHSAGTYRIGDGRGGASTGTQRFAPLNSWPDNANLDKARRLLWPIKKKYGNKISWADLFILAGNVAIESMGGKTIGFGGGRVDVWHPEEDVYWGSEKEWLASERYSGDRELENPLAAVQMGLIYVNPEGPDGKPDPKAAARDIRETFRRMGMNDEETVALIAGGHTFGKAHGAGPATHVGPEPEAAPIEAQGLGWISSYGKGKGSDTITSGIEGAWTPTPTQWDTSYFDMLFGYDWWLTKSPAGAWQWMAVDPDEKDLAPDAEDPSKKVPTMMMTTDLALRFDPEYEKIARRFHQNPEEFAEAFARAWFKLTHRDMGPKTRYLGPEVPKEDFIWQDPIPEVDYELTEAEIEEIKAKILNSGLTVSELVKTAWASASTFRNSDKRGGANGARIRLAPQKDWEVNEPERLAKVLSVYEDIQRELPKKVSIADLIVLGGSAAVEKAARDAGFDVKVPFFPGRGDATQEQTDVESFAVLEPFADGFRNYQKQEYSVPPEELLVDKAQLLGLTAPEMTVLVGGLRVLGANYRDLPHGVFTDRIGVLTNDFFVNLLDMNYEWVPTDSGIYEIRDRKTGEVRWTATRVDLIFGSNSILRSYAEFYAQDDNQEKFVRDFINAWVKVMNADRFDLVKKARESVTALQINLLHRSERGNELQ

SEQ ID NO: 20094 - protein, 751 aa, Yersinia pestis KIM
MLKNSCLLVKGDLYMLKKILPVLITLAIVHNTPTAWAAEAPKTDSFYLPKSLDLSPLRLHNIESNPYGKDFNYAQQFKTLDLEAVKKDIKTVLTTSQDWWPADYGNYGPFFIRMAWHGAGTYRIYDGRGGADGGQQRFEPLNSWPDNANLDKARRLLWPIKKKYGAKISWGDLMVLTGNVALESMGFKTLGFAGGREDDWQSDLVYWGAGNKMLSDNRDKNGKLPKPLAATQMGLIYVNPEGPNGKPDPVAAAKDIREAFARMAMNDEETVALIAGGHTFGKAHGAASPEKCLGAAPGEAGLEQQGLGWANKCGSGNGKDTITSGLEGAWTTDPTHFTMQYLSNLYKHEWVLTKSPAGAWQWKPKNAANVVPDATDPTKFHPLMMFTTDIALKVDPEYKKITTRFLENPEEFKMAFARAWFKLTHRDMGPAARYLGDEVPKETFIWQDPLPAANYKMIDSADISELKDKILKTGLSDTKLIKTAWASASTFRGTDFRGGDNGARIRLAPQKDWPVNDPAELHSVLAALMEVQNNFNKDRSDGKKVSLSDLIVLGGNAAIEDAAKKAGYSISIPFTPGRTDASQEETDVSSFAVLEPTADGFRNYYDAKRNTLSPIASLIDRANKLELTVPEMTVLIGGLRVLDVNSGGSKAGVLTNTPGQLNNNFFVNLLDMSTKWTKSPKAEGYFDGYDRKTGKLKWTASSVDLVFGSNPELRAVAEVYASDDAKEKFVHDFTKVWEKVMNLDRFDIKNN

SEQ ID NO: 20095 - protein, 530 aa, Leptospira interrogans serovar lai str. 56601
MILVNFENEKEISLSKPQNLLEISLNNGIPHTHACGGNARCSTCRVLVLENPSHLSPPEQKEKELSQKKGFPKSVRLACQTTVLGDVRVRRIVLDEEDYNLTIPGSATISGEEKEIAILFSDIRDFTLFSESHLPYDVIHILNRYFYKMGDVILKHGGKIDKYIGDGLMALFGVNGGSPQEICISALRAAKEMELELYSLNEYLKSHLHTSFRIGVGVHYGNCILGQLGHPANMSYTAIGDSVNIASRIESKTKKSGASVLISESLYKQVKEKVVKGRVFSAQLKGKTGNYKLYEIQEILEKVDANLWEEAKNSLRRIILVREVGSWLKLVYHLSCLFDENQNWIGLSAANSFQKFSKLPENGDLVQNFYQIKDTFNEQFQNSFSFADLLALAGAVAIEKSGGPKIPIQPGRKDRLLSEVFQILPLSMQTQKDQLPYLQKMKLGIRDIVLISGARTIGWLGGESFTSNPYNFDNSYFHVLLKAGLEGPLLIPNDRELLKNDESRAFVLDYALDPSKFFEDFTSTYLKLTS

SEQ ID NO: 20096 - protein, 737 aa, Yersinia pestis CO92
MLKKILPVLITLAIVHNTPTAWAAEAPKTDSFYLPKSLDLSPLRLHNIESNPYGKDFNYAQQFKTLDLEAVKKDIKTVLTTSQDWWPADYGNYGPFFIRMAWHGAGTYRIYDGRGGADGGQQRFEPLNSWPDNANLDKARRLLWPIKKKYGAKISWGDLMVLTGNVALESMGFKTLGFAGGREDDWQSDLVYWGAGNKMLSDNRDKNGKLPKPLAATQMGLIYVNPEGPNGKPDPVAAAKDIREAFARMAMNDEETVALIAGGHTFGKAHGAASPEKCLGAAPGEAGLEQQGLGWANKCGSGNGKDTITSGLEGAWTTDPTHFTMQYLSNLYKHEWVLTKSPAGAWQWKPKNAANVVPDATDPTKFHPLMMFTTDIALKVDPEYKKITTRFLENPEEFKMAFARAWFKLTHRDMGPAARYLGDEVPKETFIWQDPLPAANYKMIDSADISELKDKILKTGLSDTKLIKTAWASASTFRGTDFRGGDNGARIRLAPQKDWPVNDPAELHSVLAALMEVQNNFNKDRSDGKKVSLSDLIVLGGNAAIEDAAKKAGYSISIPFTPGRTDASQEETDVSSFAVLEPTADGFRNYYDAKRNTLSPIASLIDRANKLELTVPEMTVLIGGLRVLDVNSGGSKAGVLTNTPGQLNNNFFVNLLDMSTKWTKSPKAEGYFDGYDRKTGKLKWTASSVDLVFGSNPELRAVAEVYASDDAKEKFVHDFTKVWEKVMNLDRFDIKNN

SEQ ID NO: 20097 - protein, 741 aa, Archaeoglobus fulgidus DSM 4304
MMRQGGVMVGARKRWITDWWPNRLNLKILRQNLQNPYGEDYDYVEEVENLDIDAVIRDLKELMRSSQDWWPADFGHYGPLFIRLAWHSAGSYRIFDGRGGARDGSIRFPPRINWPDNINLDKAIRLLWPIKKKYGRKLSWADLIILAGTVAMEDMGVKLFGFALGREDIFEPDESPDWGPEEEMLTAKRGEKEELERPFAATEMGLIYVNPEGPGGNPDPLGSAQEIRVAFRRMGMNDEETVALIAGGHAFGKCHGAGPADYLGPDPSSSPIEMQGLGWKYNYGKGKGSDTFTSGLEVTWSPTPTKFGINYLRILFTYEWELEKSPAGKNQWVAKDAPEIIPDAHDPNKKHRPRMLTADLALRFDPEFSKIARRFLENPEEFEKAFAIAWYKLTHRDMGPKDCYIGKYVPEETFVWQDPLPRRDYELVDEKDVEELKRRILASGLSLSQLVYFAWASASTYRNSDRRGGANGARIRLKPMSVWEVNHPEELKKVIAAYEKIQQEFNEGAKGSEKRISIADLIVLGGIAAVEEAARRAGFSVKVPFIPGRVDAQQEHVDEEFYRVIEPFADGFRNYFRYPERINERDVYTTPEYFLVDKANLLTLTVPEMVVLIGGMRALGANYSHSDYGVLTERPGVLSNDFFVNLLDMSVEWRAADDYRYTFEGYDRKSGELRWRATRVDLILGHHDELRAVAEVYGCDDAKEKFVKDFAAVCAKVMHLDRFDLWRSNRKLYKEITAGLR

SEQ ID NO: 20098 - protein, 296 aa, Euglena gracilis
RSYMEKYAKDEVAYFRDFATAYQRLAELGVPELPVPWDEIRADVAALVAEKGCAPILIRLAWHDAGTYDQQSNTGGPRAVMRFPGGEAEHGSNNGLDIARGLLQPIVDKYSWVSTADLWAFASVVATEVSGGPKIPFRPGRRDAVTAKEAVERGRLPDATQTTNHLRDVFYRMGMTDEEIVALSGAHTMGRCHAERSGFEGPWTDNPLVFDNSYFKLLLERKWTAVTNSVGNLQFQDETGTLMMLTSDLALLMDPSFRKHVERFAADQDAFFRVYAGAYQKLTEGGCPFSKGAVPL

SEQ ID NO: 20099 - protein, 327 aa, Chlamydomonas reinhardtii
MQSARVSRTARHTRPSCRPQRAVAVRVSAKVNVEQLKALKAELYNYINSRGCNPISVRLGWHDSGTYDKNIAEFPARGGANGSIRFKPEIDHGANKGLAIALAILNPIKKKYPDVSYADLFQMASATAIEASGGPKIPMRYGRKDAKGPEECSPDGRLPGAAHPFADGSGSPAEHLRRVFYRMGLNDQDIVVLSGGHTLGRARPERSGFGAEKTKYTDVGPGTSTASPSGATDRPVTPKPVGQQGTSWTVNWLEFDNSYFKEIKAKRDSDLLVLPTDACIFEDDQFRPYAEKYAADQAAFFADYCVSHQKLSELGVEWEEGAPVTLD

SEQ ID NO: 20100 - protein, 250 aa, Physcomitrella patens
MAKSYPNVSEKYAALIEKARRKIRGMVAEKNCAPIILRLAWHGSGTYDQESKTGGPLGTIRFGQELAHGANAGLDIAVNLLQPIKEQFPELSYADFYTLAGVVAVEVTGGPTIPFHPGRKDHETCPVEGRLPDATKGLDHLRCVFTKQMGLTDKDIVVLSGAHTLGRCHKDRSGFEGAWTPNPLRFDNSYFQVLLEGEKDGLIMLPSDKALLDEPKTRELVELYAKDEDKFFEDYAESHMKLSELGFAEA

SEQ ID NO: 20101 - protein, 189 aa, Pinus strobus
AWHSAGTYDVKSKTGGPFGTIKHPDELAHGANNGLDIAIRLLEPIKEQFPTISYADFYQLAGVVAVEITGGPDIPFHPGRPDKTEPPEEGRLPDATKGIDHLRDVFGHMGLSDKEIVALSGAHTLGRCHKERSGFEGAWTSNPLIFDNSYFKELLSGEKEGLLQLPSDKALLEDPIFRSYVEKYAADDD

SEQ ID NO: 20102 - protein, 788 aa, Blumeria graminis
MSVMTRHLLTKSTHKLGVLKHPPAFPLKLRPTIPLSCPIALKFQPKTLSLIQFTQIRNMGDSKCPYRDANVAGGGTHNKDWWPETLKLDALRQHTAESNPLGKDFDYASAFKTLDYEGLKKDLKDLMTDSQDWWPADFGHYGGFFVRMAWHSAGTYRSIDGRGGGGQGQHRFAPLNSWPDNGNLDKARRLLWPIKQKYGNKISWADLYLLTGNVAIESMGGKTFGFACGRPDTWEADDATFWGNETKWLGNDARYKNGSKDPKDIYTRQLEKPLSAVHMGLIYVNPEGPDGIPDPVASARDIRTTFRRMAMNDEETVALIAGGHTFGKTHGAAPATHLGKEPEGAPIEAQGLGWANSYRSGKGPDTITSGLEVIWTKTPINWSNHYLEYLFKYDWELTKSPGGANQWTAKNAEAFIPDAFDPNKKHPPRMLTTDLALRHDKEYEKISLRFLENPDQFADAFARAWFKLLHRDMGPRSRWLGPEIPKEELIWEDPIPEIDHPIISQEDINNLKKEILSSGVGHNKLIQTAWASASTFRGGDKRGGANGARIRLAPQKDWKVNNPPQLTCVLETLGKIQSSFNSSQTGGKIVSLADLIILAGCAALEKAAGVPVPFSPGRADASQEQTDIKSFSNLEPVADGFRNFGRSTPRARAEHMLVDRAQLLTLTPPELTALVGGLRVLDTNFDGSSCGVFTKRPGQLTNDFFVNLLDPAISWKGIDEDEFFEGIDRKTDEKKWIGSRADLVFGSQAELRAIAEVYGSADGNEKLIKDFIAAWNKVMNLDLFNLAH

SEQ ID NO: 20103 - protein, 96 aa, Betula pendula
CDHLRVVFGQQMGLSDQDIVALSGAHTLGRCHKERSGFEGPWTSNPLIFGNTYFTELLSGEKEGLLQLPSDKAPLSDAAFRPLVDKYAADEDAFFV

SEQ ID NO: 20104 - protein, 287 aa, Mesembryanthemum crystallinum
MAMPPVVDSVYLKEIDKARRDLRALISNRSCAPIMLRLAWHDAGTYCAKTKTGGANGSIRNEEEYAHGANNGLKKAIDWCEEVKAKYPKITYADLYQLAGVVAVEVTGGPTIEFVPGRKDSKVSTNEGRLPDAKKGPPHLRDIFYRMGLTDKDIVALSGAHTLGRAHPERSGFDGPWTQEPLKFDNSYFVELLKGESEGLLQLPTDKALVEDPAFRPYVELYAKDEDAFFRDYAVSHKKLSELGFTPSGSKSGPKDSTILAQGAVGVAVAAAVVILSYIFEVRKRLK

SEQ ID NO: 20105 - protein, 245 aa, Mesembryanthemum crystallinum
MAAPKVDADYLKHIEGARKELRTIISTKQCAPLMLRLSFHDAGTYDAKTKKGGPNGTVRFELNNPANNGIKTAVDLVEQVKVKHPKVTYADLYQLAGVVAVEVTGGPVINFVPGRPDVQQVDSGSLPLPSGDANHLREVFHRMGLSDRDIVVLSGAHTLGRANRDRSGVDGPFTKNPLKFDNSYYVELLKGDTPELVKFNTDKVLLQDPTFRKYVQLYAKDEKAFLTHYAESHKKMSELGKPKHM

SEQ ID NO: 20106 - protein, 260 aa, Mesembryanthemum crystallinum
MVDQQYMEAIEGARRDLVALVQSKNCAPIFLRLAFHDAANFNAADKTGGVNGSLRLQEELGQPPNGGIKVGIDLIEEVKKKHPTVSYADLYQLAGVVAVGASGGPAIFFVPGRKDTDVADTLNIPNPNGGADHLRTVFHQMGLVDKDIVTLSGAHTLGRAHSNISGFDGPFTREPLKFDNSYYVELLKGDTEGLVKFPTDKVLLQDDVFRPLVEIYAKHQDAFFRDYAESHKKMSELGFTPKFPNPTTGGGCHSHARHCC

SEQ ID NO: 20107 - protein, 254 aa, Mesembryanthemum crystallinum
MACGPVVDQRYLKDLEGARRDLASIIQRKNAAPVLLRLAFHDAANYNVTNNTGGVNGSVRLRQELSQPPNKGIEDGVKFCEEVKKKHPRVTYADIIQLAGVLAVELSGGPCIDFVPGRMDTNVADKLNIPNPRGGADHLRRTFYQMGLSDKDIVVLSGAHTLGRARKENSGFNGPFTRNTLKFDNSYFVELMRGETPGLVKFPTDKALVQDPVFRPLVELYARHEGAFFRDYAESHKKLSELGFTPSLHVWRWM

SEQ ID NO: 20108 - protein, 250 aa, Spinacia oleracea
MGKSYPTVSENYQKSIEKARRKLRGLIAEKQCAPLMLRLAWHSAGTFDCTSKTGGPFGTMKHQAELAHGANNGLVIAVRLLEPIKEQFPEITYADFYQLAEFVAVEVTGGPEVPFHPGREDKPEPPQEGRLPDATKGCDHLRDVFIKQMGLTDQDIVALSGGHTLGRCHKDRSGFEGAWTTNPLVFDNTYFKELLSGEKEGLLQLPSDKALLSDPVFRPLVEKYAADEDAFFADYAEAHLKLSELGFADA

SEQ ID NO: 20109 - protein, 309 aa, Spinacia oleracea
MGRVPIVNENYRRVIEAARRDLHRSLVQDNNNSAPILLRLSFHDAVDYDAATKRGGANGSVRLAQELNRTPNKGIETAVRFCEPIKRRHPDITYADLYQLAGIVAVEVTGGPAIDADVADQDNIPNPRRGADHLRTVFYRMGLNDKDIVVLSGAHALGGAHKDRSGFDGDFTRNPLTFDNSYFVELLRGDTPGLVKFPTDKALLTDPRFRPFVDLYARDQRAFFRDYAESHKKMSLLGLNHPESNLYESNSCSTRLSVVLNPTLSKTEAVQCNTDMLDPMQLEMVAAQAATDTYNMPIYTAVNCNSLRD

SEQ ID NO: 20110 - protein, 288 aa, Gossypium hirsutum
MAFPVVDTEYLKEIDKARRDLRALIALKNCAPIMLRLAWHDAGTYDVSTKTGGPNGSIRNEEEFTHGANSGLKIAIDFCEEVKAKHPKITYADLYQLAGVVAVEVTGGPTIDFVPGRKDSNICPREGRLPDAKRGAPHLRDIFYRMGLSDKDIVALSGGHTLGRAHPERSGFDGPWTNEPLKFDNSYFLELLKGESEGLLKLPTDKALLDDPEFRKYVELYAKDEDAFFRDYAESHKKLSELGFTPTSARSKVMVKDSTVLAQGAVGVAVAAAVVILSYFYEVRKRMK

SEQ ID NO: 20111 - protein, 249 aa, Cucumis sativus
MGKCYPVVSEEYQKAIEKAKRKLRGFIAEKNCAPLMLRLAWHSAGTFCKDSKTGGPFGTMRFKSELAHGANNGLDIAVRLLEPIKEQFPILSYADFYQLAGVVAVEVTGGPDVPFHPGREDKPEPPPEGRLPDATKGSDHLRDVFYTMGLSDQDIVALSGGHTLGRAHKERSGFEGPWTTNPLIFDKSYFTELLTGEKEGLLQLASDKALLSDPVFRPLVEKYAADEDAFFADYAEAHQKLSELGFADA

SEQ ID NO: 20112 - protein, 286 aa, Cucurbita cv. Kurokawa Amakuri
MALPVVDTEYLKEIEKARRDLRALIANRNCAPIMLRLAWHDAGTYDVSTKTGGPNGSIRNQEEYSHGSNNGLKKAIDFCEEVKSKHPKITYADLYQLAGVVAVEVTGGPTIDFVSGRKDSRISPREGRLPDAKKGAPHLRDIFYRMGLSDKDIVALSGGHTLGRAHPERSGFDGPWTEDPLKFDNSYFVELLKGESEGLLKLPTDKALLEDPEFRPYVELYAKDEDAFFKDYAESHKKLSELGFTPGSARAIANDSTVLAQGAVGVAVAAAVVILSYFYEIRKNLK

SEQ ID NO: 20113 - protein, 287 aa, Arabidopsis thaliana
MAAPIVDAEYLKEITKARRELRSLIANKNCAPIMLRLAWHDAGTYDAQSKTGGPNGSIRNEEEHTHGANSGLKIALDLCEGVKAKHPKITYADLYQLAGVVAVEVTGGPDIVFVPGRKDSNVCPKEGRLPDAKQGFQHLRDVFYRMGLSDKDIVALSGGHTLGRAHPERSGFDGPWTQEPLKFDNSYFVELLKGESEGLLKLPTDKTLLEDPEFRRLVELYAKDEDAFFRDYAESHKKLSELGFNPNSSAGKAVADSTILAQSAFGVAVAAAVVAFGYFYEIRKRMK

SEQ ID NO: 20114 - protein, 287 aa, Arabidopsis thaliana
MAAPIVDAEYLKEITKARRELRSLIANKNCAPIMLRLAWHDAGTYDAQSKTGGPNGSIRNEEEHTHGANSGLKIALDLCEGVKAKHPKITYADLYQLAGVVAVEVTGGPDIVFVPGRKDSNVCPKEGRLPDAKQGFQHLRDVFYRMGLSDKDIVALSGGHTLGRAHPERSGFDGPWTQEPLNFDNSYFVRELLKGESEGLLKLPTDKTLLEDPEFRRLVELYADEDAFFRDYAESHKKLSELGFNPNSSAGKAVADSTILAQSAFGVAVAAAVVAFGYFYEIRKRMK

SEQ ID NO: 20115 - protein, 250 aa, Brassica juncea
MTKSYPTVSEDYQKAIEKCKRKLRGLIAEKNCAPIMVRLAWHSAGTFDCASKTGGPFGTMRFDAEQGHGANSGIHIALRLLDPIREQFPTISFADFHQLAGVVAVEVTGGPEIPFHPGREDKPQPPPEGRLPDATKGCDHLRQVFTKQMGLSDKDIVALSGAHTLGRCHKDRSGFEGAWTSNPLIFDNSYFKELLTGEKEGLLQLVSDKALLDDPVFRPLVEKYAADEEAFFADYAEAHLKLSELGFADA

SEQ ID NO: 20116 - protein, 250 aa, Brassica juncea
MTKSYPTVSEDYQKAIEKCKRKLRGLIAEKNCAPIMVRLAWHSAGTFDCASKTGGPFGTMRFDAEQGHGANSGIHIALRLLDPIREQFPAISFADFHQLAGVVAVEVTGGPEIPFHPGREDKPQPPPEGRLPDATKGCDHLRQVFTKQMGLSDKDIVALSGAHTLGRCHKDRSGFEGAWTSNPLIFDNSYFKELLTGEKEGLLQLVSDKALLDDPVFRPLVEKYAADEEAFFADYAEAHLKLSELGFADA

SEQ ID NO: 20117 - protein, 250 aa, Brassica juncea
MTKNYPTVSEVYQKVYEKCKRKLRGLIAEKNCAPIMVRLAWHSAGTFDCASRTGVPFGTMRFDGELAHGANSGLHIALRLLEPIREQFPTISFADFHQLAGVVAVEVTGGPDIPFHPGREDKPQPPPEGRLPDATKGCDHLRQVLLKQMVLTDQDIVALSGAHTLGRYRAAPSGFEGAWTSNPLIFDNSYFKELLTGEKEGLLQLVSDKALLDDPVFRPLVEKYAADEEAFFADYAEAHLKLSELGFADA

SEQ ID NO: 20118 - protein, 250 aa, Brassica napus
MTKNYPAVSEEYQKAIEKCKRKLRGLIAEKNCAPIMVRLAWHSAGTFDCASRTGVPFGTMRFDGELAHGANSGLHIALRLLEPIREQFPTISHADFHQLAGVVAVEVTGGPEIPFHPGREDKPQPPPEGRLPDATKACDHLRQVFLKQMVLTDQDIVALSGAHTLGRCHKDRSGFEGAWTSNPLIFDNSYFKELLSGEKEGLLQLPSDKALLDEPVFRPLVEKYAADEEAFFADYAEAHLKLSELGFADA

SEQ ID NO: 20119 - protein, 250 aa, Brassica oleracea
MTKNYPAVSEEYQKAIEKCKRKLRGLIAEKNCAPIMVRLAWHSAGTFDCASRTGGPFGTMRFDDELAHGANNGLHIALRLLEPIREQFPTISHADFHQLAGVVAVEVTGGPEIPFHPGREDKPQPPPEGRLPDATKGCDHLRQVFLKQMGLTDQDIVALSGAHTLGRCHKDRSGFEGAWTSNPLIFDNSYFKELLSGEKEGLFQLPSDKALLDDPVFRPLVEKYAADEEAFFTDYAEAHLKLSELGFADA

SEQ ID NO: 20120 - protein, 250 aa, Brassica oleracea
MTKSYPTVTEDYQNAIEKCKRKLRGLIAEKNCAPIMVRLAWHSAGTFDCASRTGGPFGTMRFDAEQGHGANSGIHIALRLLEPIREQFPTISFADFHQLAGVVAVEVTGGPEIPFHPGREDKPQPPPEGRLPDATKGCDHLRQVFTKQMGLSDKDIVALSGAHTLGRCHKDRSGFEGAWTSNPLIFDNSYFKELLSGEKEGLLQLVSDKALLDDPVFRPLVEKYADDEEAFFADYAEAHLKLSELGFADA

SEQ ID NO: 20121 - protein, 250 aa, Raphanus sativus
MTKNYPAVSEEYQKEIEKCKRKLRGLIAEKNCAPIMVRLAWHSAGTFDCASRTGGPFGTMRFDDELAHGANNGLHIALRLLEPIREQFPTISHADFHQLAGVVAVEVTGGPEIPFHPGREDKPQPPPEGRLPDATKACDHLRQVFLKQMGLTDQDIVALSGAHTLGRCHKDRSGFEGAWTSNPLIFDNSYFKELLSGEKEGLLQLPSDKALLDDPVFRPLVEKYAADEEAFFADYAEAHLKLSELGFADA

SEQ ID NO: 20122 - protein, 250 aa, Fragaria x ananassa
MGKCYPTVSEEYKKAIDKAKRKLRGLIAEKNCAPLMLRLAWHSAGTYDVKTKTGGPFGTMKQSAELAHGANNGLDIAVRLLEPIKEQFPILSYADFYQLAGVVAVEVTGGPDVPFHPGREDKPEPPPEGRLPDAGKGSDHLREVFGKTMGLSDQDIVALSGGHTLGRAHKERSGFEGPWTPNPLIFDNSYFTVLLSGEKEGLLQLPTDKALLSDPVFRPLVEKYAADEDAFFSDYALAHQRLSELGFAEA

SEQ ID NO: 20123 - protein, 250 aa, Fragaria x ananassa
MGKCYPTVTEEYKKAIDKAKRKLRGLIAEKNCAPLMLRLAWHSAGTYDVKTKTGGPFGTMKQSAELAHGANNGLDIAVRLLEPIKEQFPILSYADFYQLAGVVAVEVTGGPDVPFHPGREDKPEPPPEGRLPDAGKGSDHLREVFGKTMGLSDQDIVALSGGHTLGRAHKERSGFEGPWTPNPLIFDNSYFTVLLSGEKEGLLQLPTDKALLSDPVFRPLVEKYAADEDAFFSDYALAHQRLSELGFAEA

SEQ ID NO: 20124 - protein, 250 aa, Fragaria x ananassa
MGKCYPTVSEEYKKAIDKAKRKLRGLIAEKNCAPLMLRLAWHSAGTYDVKTKTGGPFGTMKQSAELAHGANNGLDIAVRLLEPIKEQFPILSYADFYQLAGVVAVEVTGGPDVPFHPGREDKPEPPPEGRLPDAGKGSDHLREVFGKTMGLSDQDIVALSGGHTLGRAHKERSGFEGPWTPNPLIFDNSYFTVLLSGEKEGLLQLPTDKALLSDPVFRPLVEKYAADEDAFFADYALAHQRLSELGFAEA

SEQ ID NO: 20125 - protein, 250 aa, Fragaria x ananassa
MGKCYPTVTEEYKKAIDKAKRKLRGLIAEKNCAPLMLRLAWHSAGTYDVKTKTGGPFGTMKQSAELAHGANNGLDIAVRLLEPIKEQFPILSYADFYQLAGVVAVEVTGGPDVPFHPGREDKPEPPPEGRLPDAGKGSDHLREVFGKTMGLSDQDIVALSGGHTLGRAHKERSGFEGPWTPNPLIFDNSYFTVLLSGEKEGLLQLPTDKALLSDPVFRPLVEKYAADEDAFFADYALAHQRLSELGFAEA

SEQ ID NO: 20126 - protein, 250 aa, Fragaria x ananassa
MGKCYPTVSEEYKKAIDKAKRKLRGLIAEKNCAPLMLRLAWHSAGTYDVKTKTGGPFGTMKQPAELAHGANNGLDIAVRLLEPIKEQFPILSYADFYQLAGVVAVEVTGGPDVPFHPGREDKPEPPPEGRLPDAGKGSDHLREVFGKTMGLSDQDIVALSGGHTLGRAHKERSGFEGPWTPNPLIFDNSYFTVLLSGEKEGLLQLPTDKALLSDPVFRPLVEKYAADEDAFFADYALAHQRLSELGFAEA

SEQ ID NO: 20127 - protein, 177 aa, Cicer arietinum
LDIAVRLLEPLKEQFPIISYADFYQLGGVVAVEVTGGPEVPFHPGREDKPEPPPEGRLPDATKGSDHLRDVFGKAMGLSDQDIVALSGGHTIGAAHKERSGFEGPWTSNPLIFDNSYFTELLNGEKEGLLKLPSDKALLSDPVFRPLVEKYAADEDAFFADYAEAHLKLSELGFAEA

SEQ ID NO: 20128 - protein, 287 aa, Glycine max
MALPVVVDAEYLKEVDKARRDLRALIANRNCAPLMLRLAWHDAGTYDAKTKTGGPNGSIRNEEEYSHGANNGLKKAIDFCQEVKAKYPKITYADLFQLAGVVAVEVTGGPTIDFVPGRRDSKVSPNEGRLPDAKKGVPHLRDIFYRMGLTDRDIVALSGGHTLGRAHPERSGFDGPWTEDPLKFDNSYFVELLKEDSAGLLKLPTDKALLEDAEFRCYVELYAKDEDAFFRDYAESHKKLSELGFVPSSKPISIKEGTILAQGAVGVVVATAVVILSYLYEVRKRGK

SEQ ID NO: 20129 - protein, 280 aa, Glycine max
MAKPRVDAEYLKEIEKARRDLRALISNRNCAPLMLRLAWHDAGTYDAKTNTGGPNGSIRNRQELNHAANKGLETALAFCEEVKAKHPKISYADLYQLAGVVAVEVTGGPTINFVPGRKDSLESPAEGRLPDAKQGASHLRDIFYRMGLGDKDIVALSGGHTLGKAHKDRSDFHGQWTKDPLKFDNSYFVELLRGESKDLLKLPTDKALVEDPNFRKYVELYAKDEDAFFSDYATSHKKLSELGFIFKNHRSILAKGVIGIAIVLTAVILGYLRELNKKTN

SEQ ID NO: 20130 - protein, 188 aa, Medicago sativa
AWHSAGTFDSKTKTGGPFGTIKHQAELAHGANNGLDIAVRLLEPLKEQFPIISYADFYQLAGVVAVEITGGPEVPFHPGREDKPEPPPEGRLPDATKGSDHLRDVFGKAMGLSDQDIVALSGGHTIGAAHKERSGFEGPWTSNPLIFDNSYFKELLGGEKEGLLQLPSDKALLSDPVFRPLVEKYAAG

SEQ ID NO: 20131 - protein, 249 aa, Pisum sativum
GKSYPTVSPDYQKAIEKAKRKLRGFIAEKKCAPLILRLAWHSAGTFDSKTKTGGPFGTIKHQAELAHGANNGLDIAVRLLEPIKEQFPIVSYADFYQLAGVVAVEITGGPEVPFHPGREDKPEPPPEGRLPDATKGSDHLRDVFGKAMGLSDQDIVALSGGHTIGAAHKERSGFEGPWTSNPLIFDNSYFTELLTGEKDGLLQLPSDKALLTDSVFRPLVEKYAADEDVFFADYAEAHLKLSELGFAEA

SEQ ID NO: 20132 - protein, 250 aa, Pisum sativum
MGKSYPTVSPDYQKAIEKAKRKLRGFIAEKKCAPLILRLAWHSAGTFDSKTKTGGPFGTIKHQAELAHGANNGLDIAVRLLEPIKEQFPIVSYADFYQLAGVVAVEITGGPEVPFHPGREDKPEPPPEGRLPDATKGSDHLRDVFGKAMGLSDQDIVALSGGHTIGAAHKERSGFEGPWTSNPLIFDNSYFTELLTGEKDGLLQLPSDKALLTDSVFRPLVEKYAADEDVFFADYAEAHLKLSELGFAEA

SEQ ID NO: 20133 - protein, 250 aa, Vigna unguiculata
MGKSYPTVSADYQKAIEKAKKKLRGFIAEKRCAPLMLRLAWHSAGTFDVSTKTGGPFGTIKHPAELAHGANNGLDIAVRLLEPIKAEFPILSYADFYQLAGVVAVEVTGGPEVPFHPGREDKPEPPPEGRLPDATKGSDHLRDVFGKAMGLSDQDIVALSGGHTIGAAHKERSGFEGPWTSNPLIFDNSYFKELLSGEKEGLLQLPSDKALLSDPVFRPLVEKYAADEDAFFADYAVAHQKLSELGFADA

SEQ ID NO: 20134 - protein, 250 aa, Hevea brasiliensis
MTKNYPKVSEEYQKAIDKAKRKLRGFIAEKGCAPLMLRIAWHSAGTYDANTKTGGPFGTMRHAAEQAHAANNGLDIAVRLLEPIKQQFPILSYADFYQLAGVVAVEITGGPEIPFHPGREDKPEPPPEGRLPNATKGADHLREVFGKTMGLSDKDIVVLSGGHTLGRCHKERSGFDGPWTANPLIFDNSFFTELLAGQKEGLLQLPTDTVLVTDPVFRPYVEKYAADEDAFFADYAEAHVKLSELGFAEA

SEQ ID NO: 20135 - protein, 247 aa, Oryza sativa (indica cultivar-group)
MGDGGILDVVTTMGCDASVMIEGSGTERTDPANLSLGGFNVIDAAKRLLEAVCPATVSCSDILVLAARDAVTFTGGPSVPVSLGRLDGLVSLASNVRANIIDTGFSVDAMARSFSAKGLTLDDLVTLSEHTAAVDRRRGACAGGHTIGSAHCTTFGERFRVDANGSTGSASRFDNAYFANLLAGRGLLRTDAVLVQNATTRATVEAFARSEGSFFAGWAASFARLTSLGVKTGADGEVRRTCSRVNG

SEQ ID NO: 20136 - protein, 287 aa, Capsicum annuum
MAKPIVDTEYIKEIEKARRDLRALISNKNCAPIMLRLAWHDAGTYDAKSKTGGPNGSIRNEEEFTHGANNGLKIALDFCEAVKSKHPKITYADLYQLARVVAVEVTGGPTIDFVPGRKDSSISPKEGRLPDAKQGVPHLKDVFYRMGLSDKDIVALSGGHTLGRAHPERSGFDGPWTKEPLKFDNSYFVELLKGESEGLLKLPTDIALLDDPEFRHYVELYAKDEDAFFRDYAISHKKLSELGFTPSSGSKATVRDGTILAQSAVGVVVAAAVVALSYWYEVRKKMK

SEQ ID NO: 20137 - protein, 250 aa, Lycopersicon esculentum
MGKCYPTVSEEYLKAVDKCKRKLRGLIAEKNCAPIMLRLAWHSAGTYDVCSKTGGPFGTMRFKAELQHGANNGLDIALRLLEPIREQFPTLSHADFHQLAGVVAVEVTGGPDVPFHPGREDKPEPPVEGRLPDATKGCDHLRDVFKKQMGLSDQDIVALSGAHTLGRAHKERSGFEGPWTANPLIFDNSYFTELLSGEKQGLLQLPSDKALLCDPAFRPLVEKYAADEDAFFADYAEAHLKLSELGFAEA

SEQ ID NO: 20138 - protein, 250 aa, Solanum tuberosum
MGKSYPTVSEEYLKAVDKCKRKLRALIAEKNCAPIMLRLAWHSAGTYDVCSKTGGPFGTMRFKAEQAHGANNGLDIALRLLEPIREQFPTLSHADFHQLAGVVAVEVTGGPDVPFHPGREDKPEPPVEGRLPDATKGCDHLRDVFVKQMGLSDKDIVALSGAHTLGRCHKERSGFEGPWTANPLIFDNSYFTELLSGEKEGLLQLPSDKALLCDPAFRLLVEKYAADEDAFFADYAKAHLTLSELGFAEA

SEQ ID NO: 20139 - protein, 387 aa, Ceriporiopsis subvermispora
MAFTSLLALVALAAITRAAPTTICPDGTRVSNHVCCDFIPLAQALQSTLYMGDCGEDAHETIRLTFHDAIAISQSQGPSAGGGADGSMFIFPTVEPFFHANAGIDDSVNNLIPFLSKFPTITAGDLIQFAGTVALSNCPGAPQLEFLAGRPNATAPAVDGLIPEPQDNVTHILERFADAGGFTPFEVVSLLASHTVARADKVDLTIDAAPFDSTPFTFDTQIFLEVLLKGVGFPGTDNNTGEVESPLPLGNNKQGGNDTGEMRLQSDFALARDDRTACFWQGFVNEQEYMMSSFKAAMSKLAILGHNRNDLIDCSEVVPTPKPPVGKPATFPATTGPQDLQLTCKSERFPSLTIDHGARETLIPHCSNGGQDCPTVQFTGPAGEDDS

SEQ ID NO: 20140 - protein, 387 aa, Ceriporiopsis subvermispora
MAFTSLLALVALAAITRAAPTTICPDGTRVSNHVCCDFIPLAQALQSTLYMGDCGEDAHETIRLTFHDAIAISQSQGPSAGGGADGSMLIFPTVEPFFHANAGIDDSVNNLIPFLDKFPTITAGDLIQFAGTVALSNCPGAPQLEFLAGRPNATAPAVDGLIPEPQDNVTHILERFADAGGFTPFEVVSLLASHTVARADKVDLTIDAAPFDSTPFTFDTQIFLEVLLKGVGFPGTDNNTGEVESPLPLGNNKQGGNDTGEMRLQSDFALARDDRTACFWQGFVNEQEYMMSSFKAAMSKLAILGHNRNDLIDCSEVVPTPKPPVGKPASFPATTGPQDLQLTCKSERFPSLTIDHGAQETLIPHCSNGGQDCPTVQFTGPAGEDDS

SEQ ID NO: 20141 - protein, 387 aa, Ceriporiopsis subvermispora
MAFTSLLALVALAAITRAAPTTICPDGTRVSNHVCCDFIPLAQALQSTLYMGDCGEDAHETIRLTFHDAIAISQSQGPSAGGGADGSMLIFPTVEPFFHANAGIDDSVNNLIPFLDKFPTITAGDLIQFAGTVALSNCPGAPQLEFLAGRPNATAPAVDGLIPEPQDNVTHILERFADAGGFTPFEVVSLLASHTVARADKVDLTIDAAPFDSTPFTFDTQIFLEVLLKGVGFPGTDNNTGEVESPLPLGNNKQGGNETGEMRLQSDFALARDDRTACFWQGFVNEQEYMMSSFKAAMSKLAILGHNRNDLIDCSEVVPTPKPPVGKPASFPATTGPQDLQLTCKSERFPSLTIDHGAQETLIPHCSNGGQDCPTVQFTGPAGEDDS

SEQ ID NO: 20142 - protein, 377 aa, Ceriporiopsis subvermispora
MAFASLFTLVVLAAVSNAAPTAVCADGTRVSNAACCAFIPLAQDLHETLFMGDCGEDAHEVIRLTFHDAVAISSSMGPSAGGGADGSMLLFPTVEPNFSANNGIDDSVNNLIPFLSKHAVSAGDLVQFAGAVALTNCPGAPQLEFLAGRPNHTIAAIDGLIPEPQDDVTKILARFEDAGGFSPFEVVSLLASHTVARADKVDGTIDAAPFDSTPFTFDTQVFLEVLLKGTGFPGTNNNTGEVASPLPLTSGNDTGEMRLQSDFALARDERTACFWQSFVNEQEFMAQSFKAAMSKLAVLGHSRSSLVDCSDVVPAPKPAVNKPATFPATTGPDDLELTCTAERFPTLSVDPGAQQTLIPHCSDGDQVCATVQFTGPA

SEQ ID NO: 20143 - protein, 389 aa, Ceriporiopsis subvermispora
MAFTSLLAIVALAATVRGAPASSSVTCSDGTAVPDAMCCDFIPLAQDLQSMVLQNQCGEDAHEIIRLTFHDAIAISQSLGPSAGTGADGSMLLFPLVEPEFAASNGIDDSVNNLIPFLSSHPNISAGDLVQFAGAVALTNCPGAPRVNFLAGRKNAVAPAIDGLIPEPQDNVTSILARFADAGNFSPFEVVSLLASHSVARADKVDPTLDAAPFDSTPFTFDTQVFLEVLLKGVGFPGTDNNTGEVASPLPFGDTSTGVNDTGMMRLQSDFALARDERTACFWQSFVDQQDLMAQSFQAAFEKLAILGSSAADLVNCSAVVPLSVGPVTAPATFPATTGPQDLQLTCTTETFPSLSIDPGATETLIPHCPDGSEDCPTVQFSGPATDSP

SEQ ID NO: 20144 - protein, 749 aa, Legionella pneumophila
MFKRTIPLFAAFTLAISPSIFPNYAHAQEDKPKTNQYWWPKMLDLSPLRQPNATSNPMGEKFNYAEEFNSLDLNAVIEDLKKLMTTSQDWWPADYGNYGPLFIRMSWHAAGTYRIYDGRGGANGGFQRFAPQNSWPDNANLDKARRLLWPIKQKYGRKISWADLLVLAGNVAMESMGFKTIGFAGGREDAWEAININWGPEGKWLESKRQDKDGKLEKPLAATVMGLIYVNPEGPNGVPDPLAAAEKIRETFGRMAMNDEETVALIAGGHAFGKTHGAASGKYLGPAPEAAGIEEQGFGWKNSYGSGKGKDTITSGLEGAWTVTPTHWSHNYLQNLFNFNWVKTKSPGGAIQWVPENSNASSMVPDAFDPSKRHAPVMLTTDLALKFDPVYSKIAKRFLDNPKEFDDAFARAWFKLIHRDMGPRSRYLGSLVPKEAMIWQDPVPPVDYKLVDANDIANLKGKILNSGLTTSELVKTAWASASTFRGTDMRGGANGARIRLAPQKDWPANDPQELAKVLKTLESIQNNFNNAQADGKKISLADLIVLGGNAAIEQAAKQAGYDIIVPFTPGRTDATQGMTDVKSFEVLEPKADGFRNYFDKSNNMSPPEMLVEKASLLKLSVPEMTVLVGGMRVLNANTGQNQYGVFTDKPGTLNNDFFINLLSMSTEWKKSSETEGIYEGYERKTGKLKWKATSVDLIFGANSELRAVAEAYATDDAKEKFIQDFINAWVKVMTADRFDIKAANANINS

SEQ ID NO: 20145 - protein, 250 aa, Pimpinella brachycarpa
MGKCYPTVSEEYKVAVEKCRRKLRGFIAEKNCAPLMLRLAWHSAGTYDVKTKTGGPFGTMRQKLEQSHAANNGLDVAVRLLEPFKEQFPIISYGDLYQLAGVVAVEITGGPDVPFHPGRPDKDEPPQEGRLPNATLGNDHLRNVFVKTMGLSDKDIVTLSGGHTLGRAHKERSGFEGPWTSNPLIFDNSYFKELLTGEKEGLLQLPTDKSLLEDPVFRPLVDKYACDEDAFFADYAESHMKLSELGFAEA

SEQ ID NO: 20146 - protein, 291 aa, Oryza sativa
MAAPVVDAEYLRQVDRARRHLRALISSKGCAPIMLRLAWHDAGTYDVNTKTGGANGSIRYEEEYTHGSNAGLKIAIDLLEPIKAKSPKITYADLYQLAGVVAVEVTGGPTVEFIPGRRDSSVCPREGRLPDAKKGALHLRDIFYRMGLSDKDIVALSGGHTLGRAHPERSGFEGAWTQEPLKFDNSYFLELLKGESEGLLKLPTDKALLEDPSFRRYVDLYARDEDTFFKDYAESHKKLSELGFTPRSSGPASTKSDLSTGAVLAQSAVGVAVAAAVVIVSYLYEASKKSK

SEQ ID NO: 20147 - protein, 433 aa, Oryza sativa
  unsure (1)..(433): unsure at all Xaa locations
MAAPVVDAEYLRQVDRARRHLRALISSKGCAPIMLRLAWHDAGTYDVNTKTGGANGSIRYEEEYTHGSNAGLKIAIDLLEPIKAKSPKITYADLYQLAGVVAVEVTGGPTVEFIPGRRDSSVCPREGRLPDAKKGALHLRDIFYRMGLSDKDIVALSGGHTLGRAHPERSGFEGAWTQEPLXXELLKGESEGLLKLPTDKALLEDPSFRRYVDLYARDEDTFFKDYAESHKKLSELGFTPRSSGPASTKSDLSTGAVLAQSAVGVAVAAAVVIVSYLYEASKKSKSPPTRRPPSPGRRPADAAKSGCRRRLADACRRLVAARPTPPHPDAANAHRHLVAALASEQSPLSPRAVGGKPGGLVLACADLVHRGDLDGARRVAPTPCSTSPLHPAAYPSSHRRLAPQRRCLAPPPHRHLARRLAAALSPAAGRSGP

SEQ ID NO: 20148 - protein, 291 aa, Triticum aestivum
MAAPVVDAEYLRQVDRARRALRALIASKGCAPIMLRLAWHDAGTYDVNTRTGGANGSIRYEEEYTHGSNAGLKIAIDLLEPIKAKHPKITYADLYQLAGVVAVEVTGGPTVEFIPGRRDSSVCPREGRLPDAKKGAPHLRDIFYRMGLTDKDIVALSGGHSLGKAHPERSGFDGAWTRDPLKFDNSYFLELLKGESEGLLKLPTDKALLDDPEFRRYVELYAKDEDAFFKDYAESHKKLSELGFTPRISGAASTKSDVSTAVVLAQSAVGVAVAAAVVIAGYLYEASKRSK

SEQ ID NO: 20149 - protein, 293 aa, Triticum aestivum
  unsure (1)..(293): unsure at all Xaa locations
MAAPVVDAEYLRQVDRARXRALRALIASKGCAPIMLRLAWHDAGTYDVNTRTGGANGSIRYEEEYTHGSNAGLKIAIDLLEPIKAKHPKLTYADLYQLAGVVAVEVTGGPTVEFIPGRRDSSVCPREGRLPDAKKGAPHLRDIFYRMGLTDKDIVALSGGHSLGKXAHPERSGFDGAWTRDPLKFDNSYFLELLKGESEGLLKLPTDKALLDDAEFRRYVELYAKDEDAFFKDYAESHKKLSELGFTPRISGLASTKSDVSTAVVLAQRAVGVAVAASVVIAGYLYEASKRSK

SEQ ID NO: 20150 - protein, 180 aa, Musa acuminata
  unsure (1)..(180): unsure at all Xaa locations
MAKSYPTVSEEYQKAVEKAKRKLRGLIAXKNCAPLMLRLAWHSAGTYDVVSKTGGPFGTMRFPAELAHGANNGLNIAVRLLEPIKEQFPILTYADFYQLAGVVAVEVTGGPEIPFHPGREDKPEPPVXGRLPDATKGSDHLRDVFGHMGLSDRISLHYLVDTHWEGAXRXDLVSKGLGLP

SEQ ID NO: 20151 - protein, 115 aa, Musa acuminata
PGREDKTLPREEGRLPDATKGSDHLRDVFGHMGLSDQDIVALSGGHTVGRCHKERSGFEGAWTSNPLIFDNSYFKELLSSEKDDLIQLPSDKALLTDPVFRPLVEKYAADVNACS

SEQ ID NO: 20152 - protein, 301 aa, Asparagus officinalis
GSSSAHLSTNFYSSSCPKVFSTIKPVLQSAIAKEKRMGASILRLFFHDCFVNGCDGSILLADTANFRGEQHAGPNNGSVRGFKVIDKIKTAVENACPGVVSCADILAVAARDSVVILGGPDWKVKLGRRDARTASATLANNNIPPPTSSLSNLISKFAAQGLSTKDMVALSGAHTIGQARCTSFRGHIYNDADIDASFASLRQKICPRKSGSGDTNLAPLDLQTPTAFDNNYYKNLINKKGLLHSDQELFNNGATDSLVKSYSNSEGSFNSDFVKAMIKMGDISPLTGSKGEIRKICSKIN

SEQ ID NO: 20153 - protein, 381 aa, Phanerochaete sordida
MAFSTLVALVALAAIARAAPTTDSAVCSDGTTVNNAACCAFIPLAQDLQANLFQNDCGEDAHEVIRLTFHDAIAISQSQGPTAGGGADGSMLLFPTVEPNFGANNGIDDSVNNLIPFMQKHNTISAGDLVQFAGAVALANCPGAPRLEFLAGRPNKTTAAIDGLVPEPQDSVTKILQRFADAGNFSPFEVVSLLASHSIARADKVDETIDAAPFDSTPFTFDTQVFLEVLLKGVGFPGAANNTGEVTSPLPTGSGADTGEMRLQSDFALARDSRTACFWQGFVNEQAFMASSFRAAMSKLAVLGHSRSALIDCSDVVPQPKPAVNKPATFPASTGPQDLELACTTSKFPTLTTDPGASETLIPHCSDGSMSCPAIQFDGPA

SEQ ID NO: 20154 - protein, 377 aa, Phanerochaete sordida
MAFTTLFAFVALAAMTRAAPTAVCSDGTRVSNAACCAFVPLAQDLQQTLFMGDCGEDAHEVVRLTFHDAIAISQSQGPKAGGGADGSMLLFPTIEPNFGANNGIDDSVNNLIPFMQKHNTISAGDLVQFAGAVALANCPGAPRLEFLAGRPNKTIAAVDGLIPEPQDSVTKILQRFEDAGNFSPFEVVSLLASHSIARADKVDETIDAAPFDSTPFTFDTQVFLEVLLKGTGFPGQTNVTGEVASPIPVGSGEDTGEMRLQSDFALARDSRTACFWQGFVNEQAFMAASFRAAMAKLAVLGHNRNSLIDCSDVVPQPKPAVNKPATFPATKGPKDLELTCNARFPTLTTDPGAQETLIPHCSDGGMDCPAVQFDGPA

SEQ ID NO: 20155 - protein, 382 aa, Phanerochaete sordida
MAFASLLAIFALVAVASARPRPNPGAVCSDGTRVSNGACCAFIPLMQDLQQNVFQNECGEDAHEVIRLTFHDAIAISRSQGPKAGGGADGSMLLFPTVEPNFAANNGIDDSVNNLIPFMQKHNTISAGDLVQFAGAVALTNCPGAPRLEFLAGRPNKTIAAVDGLIPEPQDDVTKILKRFDDAGGFTPFEVVSLLASHSVARADKVDSTIDAAPFDSTPFTFDTQVFLEVLLKGTGFPGLSNNTGEVASPLPVGTGSDTGEMRLQSDFALARDERTACFWQSFVNEQEFMSASFKAAMSKLAVLGHNRNTLTDCSEIIPEPLPAVKKPATFPATTSAKDLQLTCRALRFPTLTTDQGAQQTLIAHCPNGSMNCTSVQFNGPA

SEQ ID NO: 20156 - protein, 294 aa, Saccharomyces cerevisiae
TTPLVHVASVEKGRSYEDFQKVYNAIALKLREDDEYDNYIGYGPVLVRLAWHTSGTWDKHDNTGGSYGGTYRFKKEFNDPSNAGLQNGFKFLEPIHKEFPWISSGDLFSLGGVTAVQEMQGPKIPWRCGRVDTPEDTTPDNGRLPDADKDADYVRTFFQRLNMNDREVVALMGAHTLGKTHLKNSGYEGPWTANPNVFDNSFYLNLLNEDWKLEKNDANNEQWDSKSGYMMLPTDYSLIQDPKYLSIVKEYANDQDKFFKDFSKAFEKLLENGITFPKDAPSPFIFKTLEEQGL

SEQ ID NO: 20157 - protein, 294 aa, Saccharomyces cerevisiae
TTPLVHVASVEKGRSYEDFQKVYNAIALKLREDDEYDNYIGYGPVLVRLAWHTSGTWDKHDNTGGSYGGTYRFKKEFNDPSNAGLQNGFKFLEPIHKEFPWISSGDLFSLGGVTAVQEMQGPKIPWRCGRVDTPEDTTPDNGRLPDADKDADYVRTFFQRLNMNDREVVALMGAHTLGKTHLKNSGYEGPWTANNNVFDNSFYLNLLNEDWKLEKNDANNEQWDSKSGYMMLPTDYSLIQDPKYLSIVKEYANDQDKFFKDFSKAFEKLLENGITFPKDAPSPFIFKTLEEQGL

SEQ ID NO: 20158 - protein, 294 aa, Saccharomyces cerevisiae
TTPLVHVASVEKGRSYEDFQKVYNAIALKLREDDEYDNYIGYGPVLVRLAWHTSGTWDKHDNTGGSYGGTYRFKKEFNDPSNAGLQNGFKFLEPIHKEFPWISSGDLFSLGGVTAVQEMQGPKIPWRCGRVDTPEDTTPDNGRLPDADKDADYVRTFFQRLNMNDREVVALMGAHTLGKTHLKNSGYEGPWDATNNVFDNSFYLNLLNEDWKLEKNDANNEQWDSKSGYMMLPTDYSLIQDPKYLSIVKEYANDQDKFFKDFSKAFEKLLENGITFPKDAPSPFIFKTLEEQGL

SEQ ID NO: 20159 - protein, 291 aa, Saccharomyces cerevisiae
  unsure (1)..(291): unsure at all Xaa locations
XVHVASVEKGRSYEDFQKVYNAIALKLREDDEYDNYIGYGPVLVRLAWHISGTWDKHDNTGGSYGGTYRFKKEFNDPSNAGLQNGFKFLEPIHKEFPWISSGDLFSLGGVTAVQEMQGPKIPWRCGRVDTPEDTTPDNGRLPDADKDAGYVRTFFQRLNMNDREVVALMGAHALGKTHLKNSGYEGPWGAANNVFTNEYYLNLLNEDWKLEKNDANNEQWDSKSGYMMLPTDYSLIQDPKYLSIVKEYANDQDKFFKDFSKAFEKLLENGITFPKDAPSPFIFKTLEEQGL

SEQ ID NO: 20160 - protein, 361 aa, Saccharomyces cerevisiae
MTTAVRLLPSLGRTAHKRSLYLFSAAAAAAAAATFAYSQSQKRSSSSPGGGSNHGWNNWGKAAALASTTPLVHVASVEKGRSYEDFQKVYNAIALKLREDDEYDNYIGYGPVLVRLAWHTSGTWDKHDNTGGSYGGTYRFKKEFNDPSNAGLQNGFKFLEPIHKEFPWISSGDLFSLGGVTAVQEMQGPKIPWRCGRVDTPEDTTPDNGRLPDADKDADYVRTFFQRLNMNDREVVALMGAHALGKTHLKNSGYEGPWGAANNVFTNEFYLNLLNEDWKLEKNDANNEQWDSKSGYMMLPTDYSLIQDPKYLSIVKEYANDQDKFFKDFSKAFEKLLENGITFPKDAPSPFIFKTLEEQGL

SEQ ID NO: 20161 - protein, 294 aa, Saccharomyces cerevisiae
TTPLVHVASVEKGRSYEDFQKVYNAIALKLREDDEYDNYIGYGPVLVRLAWHTSGTWDKHDNTGGSYGGTYRFKKEFNDPSNAGLQNGFKFLEPIHKEFPWISSGDLFSLGGVTAVQEMQGPKIPWRCGRVDTPEDTTPDNGRLPDADKDADYVRTFFQRLNMNDREVVALMGAHALGKTHLKNSGYEGPWGAANNVFTNEFYLNLLNEDWKLEKNDANNEQWDSKSGYMMLPTDYSLIQDPKYLSIVKEYANDQDKFFKDFSKAFEKLLENGITFPKDAPSPFIFKTLEEQGL

SEQ ID NO: 20162 - protein, 294 aa, Saccharomyces cerevisiae
TTPLVHVASVEKGRSYEDFQKVYNAIALKLREDDEYDNYIGYGPVLVRLAWHTSGTWDKHDNTGGSYGGTYRFKKEFNDPSNAGLQNGFKFLEPIHKEFPWISSGDLFSLGGVTAVQEMQGPKIPWRCGRVDTPEDTTPDNGRLPDADKDADYVRTFFQRLNMNDREVVALMGAHALGKTHLKNSGYEGPWGAANNVFTNEFYLNLLNEDWKLEKNDANNEQWDSKSGYMMLPTDYSLIQDPKYLSIVKEYANDQDKFFKDFSKAFEKLLEDGITFPKDAPSPFIFKTLEEQGL

SEQ ID NO: 20163 - protein, 291 aa, Saccharomyces cerevisiae
  unsure (1)..(291): unsure at all Xaa locations
XVHVASVEKGRSYEDFQKVYNAIALKLREDDEYDNYIGYGPVLVRLAWHISGTWDKHDNTGGSYGGTYRFKKEFNDPSNAGLQNGFKFLEPIHKEFPWISSGDLFSLGGVTAVQEMQGPKIPWRCGRVDTPEDTTPDNGRLPDADKDAGYVRTFFQRLNMNDREVVALKGAHALGKTHLKNSGYEGPWGAANNVFTNEFYLNLLNEDWKLEKNDANNEQWDSKSGYMMLPTDYSLIQDPKYLSIVKEYANDQDKFFKDFSKAFEKLLENGITFPKDAPSPFIFKTLEEQGL

SEQ ID NO: 20164 - protein, 296 aa, Saccharomyces cerevisiae
MITTPLVHVASVEKGRSYEDFQKVYNAIALKLREDDEYDNYIGYGPVLVRLAWHISGTWDKHDNTGGSYGGTYRFKKEFNDPSNAGLQNGFKFLEPIHKEFPWISSGDLFSLGGVTAVQEMQGPKIPWRAGRVDTPEDTTPDNGRLPDADKDAGYVRTFFQRLNMNDREVVALMGAHALGKTHLKNSGYEGPWGCANNVFTNEFYLNLLNEDWKLEKNDANNEQWDSKSGYMMLPTDYSLIQDPKYLSIVKEYANDQDKFFKDFSKAFEKLLENGITFPKDAPSPFIFKTLEEQGL

SEQ ID NO: 20165 - protein, 296 aa, Saccharomyces cerevisiae
MITTPLVHVASVEKGRSYEDFQKVYNAIALKLREDDEYDNYIGYGPVLVRLAWHISGTWDKHDNTGGSYGGTYRFKKEFNDPSNAGLQNGFKFLEPIHKEFPWISSGDLFSLGGVTAVQEMQGPKIPWRCGRVDTPEDTTPDNGRLPDADKDAGYVRTFFQRLNMNDREVVALMGAHALGKTHLKNSGYEGPWGAANNVFTNEFYLNLLNEDWKLEKNDANNEQWDSKSGYIMLPTDYSLIQDPKYLSIVKEYANDQDKFFKDFSKAFEKLLENGITFPKDAPSPFIFKTLEEQGL

SEQ ID NO: 20166 - protein, 362 aa, Saccharomyces cerevisiae
MTTAVRLLPSLGRTAHKRSLYLFSAAAAAAAAAATFAYSQSHKRSSSSPGGGSNHGWNNWGKPAALASTTPLVHVASVEKGRSYEDFQKVYNAIALKLREDDEYDNYIGYGPVLVRLAWHISGTWDKHDNTGGSYGGTYRFKKEFNDPSNAGLQNGFKFLEPIHKEFPWISSGDLFSLGGVTAVQEMQGPKIPWRCGRVDTPEDTTPDNGRLPDADKDAGYVRTFFQRLNMNDREVVALMGAHALGKTHLKNSGYEGPWGAANNVFTNEFYLNLLNEDWKLEKNDANNEQWDSKSGYMMLPTDYSLIQDPKYLSIVKEYANDQDKFFKDFSKAFEKLLENGITFPKDAPSPFIFKTLEEQGL

SEQ ID NO: 20167 - protein, 297 aa, Saccharomyces cerevisiae
MKTTTPLVHVASVEKGRSYEDFQKVYNAIALKLREDDEYDNYIGYGPVLVRLAWHISGTWDKHDNTGGSYGGTYRFKKEFNDPSNAGLQNGFKFLEPIHKEFPWISSGDLFSLGGVTAVQEMQGPKIPWRCGRVDTPEDTTPDNGRLPDADKDAGYVRTFFQRLNMNDREVVALMGAHALGKTHLKNSGYEGPWGAANNVFTNEFYLNLLNEDWKLEKNDANNEQWDSKSGYMMLPTDYSLIQDPKYLSIVKEYANDQDKFFKDFSKAFEKLLENGITFPKDAPSPFIFKTLEEQGL

SEQ ID NO: 20168 - protein, 291 aa, Saccharomyces cerevisiae
  unsure (1)..(291): unsure at all Xaa locations
XVHVASVEKGRSYEDFQKVYNAIALKLREDDEYDNYIGYGPVLVRLAWHISGTWDKHDNTGGSYGGTYRFKKEFNDPSNAGLQNGFKFLEPIHKEFPWISSGDLFSLGGVTAVQEMQGPKIPWRCGRVDTPEDTTPDNGRLPDADKDAGYVRTFFQRLNMNDREVVALMGAHALGKTHLKNSGYEGPWGAANNVFTNEFYLNLLNEDWKLEKNDANNEQWDSKSGYMHLPTDYSLIQDPKYLSIVKEYANDQDKFFKDFSKAFEKLLENGITFPKDAPSPFIFKTLEEQGL

SEQ ID NO: 20169 - protein, 296 aa, Saccharomyces cerevisiae
MITTPLVHVASVEKGRSYEDFQKVYNAIALKLREDDEYDNYIGYGPVLVRLAWHISGTWDKHDNTGGSYGGTYRFKKEFNDPSNAGLQNGFKFLEPIHKEFPWISSGDLFSLGGVTAVQEMQGPKIPWRCGRVDTPEDTTPDNGRLPDADKDAGYVRTFFQRLNMNDREVVALMGAHALGKTHLKNSGYEGPWGAANNVFTNEFYLNLLNEDWKLEKNDANNEQWDSKSGYMMLPTDYSLIQDPKYLSIVKEYANDQDKFFKDFSKAFEKLLENGITFPKDAPSPFIFKTLEEQGL

SEQ ID NO: 20170 - protein, 291 aa, Saccharomyces cerevisiae
LVHVASVEKGRSYEDFQKVYNAIALKLREDDEYDNAIGYGPVLVRLAWHISGTWDKHDNTGGSYGGTYRFKKEFNDPSNAGLQNGFKFLEPIHKEFPWISSGDLFSLGGVTAVQEMQGPKIPWRCGRVDTPEDTTPDNGRLPDADKDAGYVRTFFQRLNMNDREVVALMGAHALGKTHLKNSGYEGPWGAANNVFTNEFYLNLLNEDWKLEKNDANNEQWDSKSGYMMLPTDYSLIQDPKYLSIVKEYANDQDKFFKDFSKAFEKLLEDGITFPKDAPSPFIFKTLEEQGL

SEQ ID NO: 20171 - protein, 291 aa, Saccharomyces cerevisiae
LVHVASVEKGRSYEDFQKVYNAIALKLREDDEYDNYIGYGPVLVRLAWHISGTWDKHDNTGGSYGGTYRFKKEFNDPSNAGLQNGFKFLEPIHKEFPWISSGDLFSLGGVTAVQEMQGPKIPWRCGRVDTPEDTTPDNGRLPDADKDAGYVRTFFQRLNMNDREVVALMGAHALGKTHLKNSGYEGPWGAANNVFTNEFYLNLLNEDWKLEKNDANNEQWDSKSGYMMLPTDYSLIQDPKYLSIVKEYANDQDKFFKDFSKAFEKLLEDGITFPKDAPSPFIFKTLEEQGL

SEQ ID NO: 20172 - protein, 296 aa, Saccharomyces cerevisiae
MITTPLVHVASVEKGRSYEDFQKVYNAIALKLREDDEYDNYIGYGPVLVKLAWHISGTWDKHDNTGGSYGGTYRFKKEFNDPSNAGLQNGFKFLEPIHKEFPWISSGDLFSLGGVTAVQEMQGPKIPWRCGRVDTPEDTTPDNGRLPDADKDAGYVRTFFQRLNMNDREVVALMGAHALGKTHLKNSGYEGPWGAANNVFTNEFYLNLLNEDWKLEKNDANNEQWDSKSGYMMLPTDYSLIQDPKYLSIVKEYANDQDKFFKDFSKAFEKLLENGITFPKDAPSPFIFKTLEEQGL

SEQ ID NO: 20173 - protein, 297 aa, Saccharomyces cerevisiae
MKTTTPLVHVASVEKGRSYEDFQKVYNAIALKLREDDEYDNYIGYGPVLVRLAWHISGTWDKHDNTGGSYGGTYRFKKEFNDPSNAGLQNGFKFLEPIHKEFPWISSGDLFSLGGVTAVQEMQGPKIPWRCGRVDTPEDTTPDNGRLPDADKDAGYVRTFFQRLNMNDREVVALMGAHALGKTHLKNSGYEGPWGAANNVFTNEFYLNLLNEDWKLEKNDANNEQWDSKSGYMMLPTEYSLIQDPKYLSIVKEYANDQDKFFKDFSKAFEKLLENGITFPKDAPSPFIFKTLEEQGL

SEQ ID NO: 20174 - protein, 294 aa, Saccharomyces cerevisiae
MKTLVHVASVEKGRSYEDFQKVYNAIALKLREDDEYDNYIGYGPVLVRLAWHISGTWDKHDNTGGSYGGTYRFKKEFNDPSNAGLQNGFKFLEPIHKEFPWISSGDLFSLGGVTAVQEMQGPKIPWRCGRVDTPEDTTPDNGRLPDMDKDAGYVRTFFQRLNMNDREVVALMGAHALGKTHLKNSGYEGPWGAANNVFTNEFYLNLLNEDWKLEKNDANNEQWDSKSGYMMLPTDYSLIQDPKYLSIVKEYANDQDKFFKDFSKAFEKLLENGITFPKDAPSPFIFKTLEEQGL

SEQ ID NO: 20175 - protein, 296 aa, Saccharomyces cerevisiae
MITTPLVHVASVEKGRSYEDFQKVYNAIALKLREDDEYDNYIGYGPVLVRLAWHISGTWDKHDNTGGSYGGTYRFKKEFNDPSNAGLQNGFKFLEPIHKEFPWISSGDLFSLGGVTAVQEMQGPKIPWRCGRVDTPEDTTPDNGRLPDADKDAGYVRTFFQRLNMNDREVVALMGAHALGKTHLKNSGYEGPWGAANNVFTNEFYLNLLNEDWKLEKNDANNEQWDSKSGYMMLPTNYSLIQDPKYLSIVKEYANDQDKFFKDFSKAFEKLLENGITFPKDAPSPFIFKTLEEQGL

SEQ ID NO: 20176 - protein, 291 aa, Saccharomyces cerevisiae
  unsure (1)..(291): unsure at all Xaa locations
XVHVASVEKGRSYEDFQKVYNAIALKLREDDEYDNYIGYGPVLVRLAWHISGTWDKHDNTGGSYGGTYRFKKEFNDPSNAGLQNGFKFLEPIHKEFPWISSGDLFSLGGVTAVQEMQGPKIPWRCGRVDTPEDTTPDNGRLPDADKDAGYVRTFFQRLNMNDREVVALMGAHALGKTHLKNSGYEGPWGAANNVFTNEKYLNLLNEDWKLEKNDANNEQWDSKSGYMMLPTDYSLIQDPKYLSIVKEYANDQDKFFKDFSKAFEKLLENGITFPKDAPSPFIFKTLEEQGL

SEQ ID NO: 20177 - protein, 294 aa, Saccharomyces cerevisiae
MKTLVHVASVEKGRSYEDFQKVYNAIALKLREDDEYDNYIGYGPVLVRLAWHISGTWDKHDNTGGSYGGTYRFKKEFNDPSNAGLQNGFKFLEPIHKEFPWISSGDLFSLGGVTAVQEMQGPKIPWRCGRVDTPEDTTPDNGRLPDYDKDAGYVRTFFQRLNMNDREVVALMGAHALGKTHLKNSGYEGPWGAANNVFTNEFYLNLLNEDWKLEKNDANNEQWDSKSGYMMLPTDYSLIQDPKYLSIVKEYANDQDKFFKDFSKAFEKLLENGITFPKDAPSPFIFKTLEEQGL

SEQ ID NO: 20178 - protein, 294 aa, Saccharomyces cerevisiae
MKTLVHVASVEKGRSYEDFQKVYNAIALKLREDDEYDNYIGYGPVLVRLAWHISGTWDKHDNTGGSYGGTYRFKKEFNDPSNAGLQNGFKFLEPIHKEFPWISSGDLFSLGGVTAVQEMQGPKIPWRCGRVDTPEDTTPDNGRLPDADKDAGYVRTFFQRLNMNDREVVALMGAHALGKTHLKNSGYEGPWGAANNVFTNEGYLNLLNEDWKLEKNDANNEQWDSKSGYMMLPTDYSLIQDPKYLSIVKEYANDQDKFFKDFSKAFEKLLENGITFPKDAPSPFIFKTLEEQGL

SEQ ID NO: 20179 - protein, 291 aa, Saccharomyces cerevisiae
LVHVASVEKGRSYEDFQKVYNAIALKLREDDEYDNYIGYGPVLVALAWHISGTWDKHDNTGGSYGGTYRFKKEFNDPSNAGLQNGFKFLEPIHKEFPWISSGDLFSLGGVTAVQEMQGPKIPWRCGRVDTPEDTTPDNGRLPDADKDAGYVRTFFQRLNMNDREVVALMGAHALGKTHLKNSGYEGPWGAANNVFTNEFYLNLLNEDWKLEKNDANNEQWDSKSGYMMLPTDYSLIQDPKYLSIVKEYANDQDKFFKDFSKAFEKLLENGITFPKDAPSPFIFKTLEEQGL

SEQ ID NO: 20180 - protein, 296 aa, Saccharomyces cerevisiae
MITTPLVHVASVEKGRSYEDFQKVYNAIALKLREDDEYDNYIGYGPVLVLLAWHISGTWDKHDNTGGSYGGTYRFKKEFNDPSNAGLQNGFKFLEPIHKEFPWISSGDLFSLGGVTAVQEMQGPKIPWRCGRVDTPEDTTPDNGRLPDADKDAGYVRTFFQRLNMNDREVVALMGAHALGKTHLKNSGYEGPWGAANNVFTNEFYLNLLNEDWKLEKNDANNEQWDSKSGYMMLPTDYSLIQDPKYLSIVKEYANDQDKFFKDFSKAFEKLLENGITFPKDAPSPFIFKTLEEQGL

SEQ ID NO: 20181 - protein, 297 aa, Saccharomyces cerevisiae
MKTTTPLVHVASVEKGRSYEDFQKVYNAIALKLREDDEYDNYIGYGPVLVRLAWHISGTWDKHDNTGGSYGGTYRFKKEFNDPSNAGLQNGFKFLEPIHKEFPWISSGDLFSLGGVTAVQEMQGPKIPWRCGRVDTPEDTTPDNGRLPDADKDAGYVRTFFQRLNMNDREVVALMGAHALGKTHLKNSGYEGPWGAANNVFTNEFYLNLLNEDWKLEKNDANNEQWDSKSGYMMLPTAYSLIQDPKYLSIVKEYANDQDKFFKDFSKAFEKLLENGITFPKDAPSPFIFKTLEEQGL

SEQ ID NO: 20182 - protein, 291 aa, Saccharomyces cerevisiae
  unsure (1)..(291): unsure at all Xaa locations
XVHVASVEKGRSYEDFQKVYNAIALKLREDDEYDNYIGYGPVLVRLAWHISGTWDKHDNTGGSYGGTYRFKKEFNDPSNAGLQNGFKFLEPIHKEFPWISSGDLFSLGGVTAVQEMQGPKIPWRCGRVDTPEDTTPDNGRLPDADKDAGYVRTFFQRLNMNDREVVALMGAGALGKTHLKNSGYEGPWGAANNVFTNEFYLNLLNEDWKLEKNDANNEQWDSKSGYMMLPTDYSLIQDPKYLSIVKEYANDQDKFFKDFSKAFEKLLENGITFPKDAPSPFIFKTLEEQGL

SEQ ID NO: 20183 - protein, 292 aa, Saccharomyces cerevisiae
TLVHVASVEKGRSYEDFQKVYNAIALKLREDDEYDNYIGYGPVLVRLAWHISGTWDKHDNTGGSYGGTYRFKKEFNDPSNAGLQNGFKFLEPIHKEFPWISSGDLFSLGGVTAVQEMQGPKIPWRCGRVDTPEDTTPDNGRLPDADKDAGYVRTFFQRLNMNDREVVALMGAGALGKTHLKNSGYEGPWGAANNVFTNEFYLNLLNEDWKLEKNDANNEQWDSKSGYMMLPTDYSLIQDPKYLSIVKEYANDQDKFFKDFSKAFEKLLENGITFPKDAPSPFIFKTLEEQGL

SEQ ID NO: 20184 - protein, 293 aa, Saccharomyces cerevisiae
TPLVHVASVEKGRSYEDFQKVYNAIALKLREDDEYDNYIGYGPVLVRLAFHISGTWDKHDNTGGSYGGTYRFKKEFNDPSNAGLQNGFKFLEPIHKEFPWISSGDLFSLGGVTAVQEMQGPKIPWRCGRVDTPEDTTPDNGRLPDADKDAGYVRTFFQRLNMNDREVVALMGAHALGKTHLKNSGYEGPWGAANNVFTNEFYLNLLNEDWKLEKNDANNEQWDSKSGYMMLPTDYSLIQDPKYLSIVKEYANDQDKFFKDFSKAFEKLLENGITFPKDAPSPFIFKTLEEQGL

SEQ ID NO: 20185 - protein, 296 aa, Saccharomyces cerevisiae
MITTPLVHVASVEKGRSYEDFQKVYNAIALKLREDDEYDNYIGYGPVLVRLAWHISGTWDKHDNTGGSYGGTYRFKKEFNDPSNAGLQNGFKFLEPIHKEFPWISSGDLFSLGGVTAVQEMQGPKIPWRCGRVDTPEDTTPDNGRLPDADKDAGYVRTFFQRLNMNDREVVALMGAHALGKTHLKNSGYEGPFGAANNVFTNEFYLNLLNEDWKLEKNDANNEQWDSKSGYMMLPTDYSLIQDPKYLSIVKEYANDQDKFFKDFSKAFEKLLENGITFPKDAPSPFIFKTLEEQGL

SEQ ID NO: 20186 - protein, 291 aa, Saccharomyces cerevisiae
LVHVASVEKGRSYEDFQKVYNAIALKLREDDEYDNYIGYGPVLVRLAWHISGTWDKHDNTGGSYGGTYRFKKEFNDPSNAGLQNGFKFLEPIHKEFPWISSGDLFSLGGVTAVQEMQGPKIPWRCGRVDTPEDTTPDNGRLPDADKDAGYVRTFFQRLNMNDREVVALMGAHALGKTHLKNSGYEGPYGAANNVFTNEFYLNLLNEDWKLEKNDANNEQWDSKSGYMMLPTDYSLIQDPKYLSIVKEYANDQDKFFKDFSKAFEKLLEDGITFPKDAPSPFIFKTLEEQGL

SEQ ID NO: 20187 - protein, 296 aa, Saccharomyces cerevisiae
MITTPLVHVASVEKGRSYEDFQKVYNAIALKLREDDEYDNYIGYGPVLVRLAWLISGTWDKHDNTGGSYGGTYRFKKEFNDPSNAGLQNGFKFLEPIHKEFPWISSGDLFSLGGVTAVQEMQGPKIPWRCGRVDTPEDTTPDNGRLPDADKDAGYVRTFFQRLNMNDREVVALMGAHALGKTHLKNSGYEGPWGAANNVFTNEFYLNLLNEDWKLEKNDANNEQWDSKSGYMMLPTDYSLIQDPKYLSIVKEYANDQDKFFKDFSKAFEKLLENGITFPKDAPSPFIFKTLEEQGL

SEQ ID NO: 20188 - protein, 294 aa, Saccharomyces cerevisiae
MKTLVHVASVEKGRSYEDFQKVYNAIALKLREDDEYDNYIGYGPVLVRLAWHISGTWDKHDNTGGSYGGTYRFKKEFNDPSNAGLQNGFKFLEPIHKEFPWISSGDLFSLGGVTAVQEMQGPKIPWRCGRVDTPEDTTPDNGRLPDADKDAGYVRTFFQRLNMNDREVVALMGAHALGKTHLKNSGYEGPGGAANNVFTNEFYLNLLNEDWKLEKNDANNEQWDSKSGYMMLPTDYSLIQDPKYLSIVKEYANDQDKFFKDFSKAFEKLLENGITFPKDAPSPFIFKTLEEQGL

SEQ ID NO: 20189 - protein, 292 aa, Saccharomyces cerevisiae
TLVHVASVEKGRSYEDFQKVYNAIALKLREDDEYDNYIGYGPVLVRLAWHISGTWDKHDNTGGSYGGTYRFKKQFNDPSNAGLQNGFKFLEPIHKEFPWISSGDLFSLGGVTAVQEMQGPKIPWRCGRVDTPEDTTPDNGRLPDADKDAGYVRTFFQRLNMNDREVVALMGAGALGKTHLKNSGYEGPWGAANNVFTNEFYLNLLNEDWKLEKNDANNEQWDSKSGYMMLPTDYSLIQDPKYLSIVKEYANDQDKFFKDFSKAFEKLLENGITFPKDAPSPFIFKTLEEQGL

SEQ ID NO: 20190 - protein, 296 aa, Saccharomyces cerevisiae
MITTPLVHVASVEKGRSYEDFQKVYNAIALKLREDDEYDNYIGYGPVLVRLAWHISGTWDKHDNTGGSYGGTYRFKKEFNDPSNAGLQNGFKFLEPIHKEFPWISSGDLFSLGGVTAVQEMQGPKIPWRCGRVDTPEDTTPDNGRLPDADKDAGYVRTFFQRLNMNDREVVALMGAHALGKTHLKNSGYEGPGGAANNVFTNEFYLNLLNEDWKLEKNDANNEQWDSKSGYMMLPTDYSLIQDPKYLSIVKEYANDQDKFFKDFSKAFEKLLENGITFPKDAPSPFIFKTLEEQGL

SEQ ID NO: 20191 - protein, 296 aa, Saccharomyces cerevisiae
MIVEKLVHVASVEKGRSYEDFQKVYNAIALKLREDDEYDNYIGYGPVLVRLAWHISGTWDKHDNTGGSYGGTYRFKKEFNDPSNAGLQNGFKFLEPIHKEFPWISSGDLFSLGGVTAVQEMQGPKIPWRCGRVDTPEDTTPDNGRLPDADKDAGYVRTFFQRLNMNDREVVALMGAHALGKTHLKNSGYEGPQGAANNVFTNEFYLNLLNEDWKLEKNDANNEQWDSKSGYMMLPTDYSLIQDPKYLSIVKEYANDQDKFFKDFSKAFEKLLENGITFPKDAPSPFIFKTLEEQGL

SEQ ID NO: 20192 - protein, 294 aa, Saccharomyces cerevisiae
MKTLVHVASVEKGRSYEDFQKVYNAIALKLREDDEYDNYIGYGPVLVRLAWHISGTWDKHDNTGGSYGGTYRFKKEFNDPSNAGLQNGFKFLEPIHKEFPWISSGDLFSLGGVTAVQEMQGPKIPWRCGRVDTPEDTTPDNGRLPDADKDAGYVRTFFQRLNMNDREVVALMGAHALGKTHLKNSGYEGPGGAANNVFTNEFYLNLLNEDWKLEKNDANNEQWDSKSGYMMLPTDYSLIQDPKYLSIVKEYANDQDKFFKDFSKAFEKLLEDGITFPKDAPSPFIFKTLEEQGL

SEQ ID NO: 20193 - protein, 291 aa, Saccharomyces cerevisiae
LVHVASVEKGRSYEDFQKVYNAIALKLREDDEYDNYIGYGPVLVRLAWHISGTWDKHDNTGGSYGGTYRFKKEFNDPSNAGLQNGFKFLEPIHKEFPWISSGDLFSLGGVTAVQEMQGPKIPWRCGRVDTPEDTTPDNGRLPDADKDAGYVRTFFQRLNMNDREVVALMGAHALGKTHLKNSGYEGPQGAANNVFTNEFYLNLLNEDWKLEKNDANNEQWDSKSGYMMLPTDYSLIQDPKYLSIVKEYANDQDKFFKDFSKAFEKLLEDGITFPKDAPSPFIFKTLEEQGL

SEQ ID NO: 20194 - protein, 294 aa, Saccharomyces cerevisiae
MKTLVHVASVEKGRSYEDFQKVYNAIALKLREDDEYENYIGYGDDLVRLAWHISGTWDKHDNTGGSYGGTYRFKKEFNDPSNAGLQNGFKFLEPIHKEFPWISSGDLFSLGGVTAVQEMQGPKIPWRCGRVDTPEDTTPDNGRLPDADKDAGYVRTFFQRLNMNDREVVALMGAHALGKTHLKNSGYEGPWGAANNVFTNEFYLNLLNEDWKLEKNDANNEQWDSKSGYMMLPTDYSLIQDPKYLSIVKEYANDQDKFFKDFSKAFEKLLENGITFPKDAPSPFIFKTLEEQGL

SEQ ID NO: 20195 - protein, 291 aa, Saccharomyces cerevisiae
LVHVASVEKGRSYEDFQKVYNAIALKLREDDEYDNYIGYGPVLVRLAWHISGTWDKHDNTGGSYGGTYRFKKEFNDPSNAGLQNGFKFLEPIHKEFPWISSGDLFSLGGVTAVQEMQGPKIPWRCGRVDTPEDTTPDNGRLPDADKDAGYVRTFFQRLNMNDREVVALMGAHALGKTHLKNSGYEGPGGAANNVFTNEFYLNLLNEDWKLEKNDANNEQWDSKSGYMMLPTDYSLIQDPKYLSIVKEYANDQDKFFKDFSKAFEKLLEDGITFPKDAPSPFIFKTLEEQGL

SEQ ID NO: 20196 - protein, 290 aa, Saccharomyces cerevisiae
TLVHVASVEKGRSYEDFQKVYNAIALKLREDDEYDNYIGYGPVLVRLAWHISGTWDKHDNTGGSYGGTYRFKKEFNDPSNAGLQNGFKFLEPIHKEFPWISSGDLFSLGGVTAVQEMQGPKIPWRCGRVDTPEDTTPDNGRLPDADKDAGYVRTFFQRLNMNDREVVALMGAHALGKTHLKNSGYEGGGANNVFTNEFYLNLLNEDWKLEKNDANNEQWDSKSGYMMLPTDYSLIQDPKYLSIVKEYANDQDKFFKDFSKAFEKLLENGITFPKDAPSPFIFKTLEEQGL

SEQ ID NO: 20197 - protein, 289 aa, Saccharomyces cerevisiae
LVHVASVEKGRSYEDFQKVYNAIALKLREDDEYDNYIGYGPVLVRLAWHISGTWDKHDNTGGSYGGTYRFKKEFNDPSNAGLQNGFKFLEPIHKEFPWISSGDLFSLGGVTAVQEMQGPKIPWRCGRVDTPEDTTPDNGRLPDADKDAGYVRTFFQRLNMNDREVVALMGAHALGKTHLKNSGYEGGGANNVFTNEFYLNLLNEDWKLEKNDANNEQWDSKSGYMMLPTDYSLIQDPKYLSIVKEYANDQDKFFKDFSKAFEKLLENGITFPKDAPSPFIFKTLEEQGL

SEQ ID NO: 20198 - protein, 294 aa, Saccharomyces cerevisiae
MKTLVHVASVEKGRSYEDFQKVYNAIALKLREDDEYDNYIGYGPVLVRLAWHISGTWDKHDNTGGSYGGTYRFKKEFNDPSNAGLQNGFKFLEPIHKEFPWISSGDLFSLGGVTAVQEMQGPKIPWRCGRVDTPEDTTPDNGRLPDADKDAGYVRTFFQRLNMNDREVVALMGAHALGKTHLKNSGYEGPGGAANNVFTNEFYLNLLNEDWKLEKNDANNEQWDSKSGYMMLPTNYSLIQDPKYLSIVKEYANDQDKFFKDFSKAFEKLLENGITFPKDAPSPFIFKTLEEQGL

SEQ ID NO: 20199 - protein, 220 aa, Retama raetam
MGKSYPTVSGDYQKAVEKAKKKLRGFIAEKSCAPLILRLAWHSAGTFDVKTKTGGPFGTIKNPAELAHGANNGLDIAVRLLEPIKEQFPILSYADFYQLGGVVAVEITGGPEVPFHPGREDKPEPPPEGRLPDATKGSDHLRDVFGKAMGLSDQDIVALSGGHTIGAAHKERSGFEGPWTSNPLIFDNSYFTELLSGEKEGLLKLPSDTALLSDPVFALC

SEQ ID NO: 20200 - protein, 358 aa, Neurospora crassa
MAASRTATRTLRALRTSTRPALTAAPRAAFRQGGRRLYSSEPAKSGGSNIWAWAIGAGALGAGGLWYLNQDGASATPKVFAPKFDDYQAVYNEIASRLEEKDDYDDGSYGPVLVRLAWHASGTYDKETGTGGSNGATMRFAPESDHGANAGLKAARDFLEPVKAKFPWITYSDLWILGGVCAIQEMLGPQIPYRPGRQDRDAAGCTPDGRLPDASQAQDHLRNIFYRMGFNDQEIVALSGAHALGRCHADRSGFDGPWTFSPTVLTNDYYKLLLDEKWQWKKWNGPKQYEDKKTKSLMMLPADMALIQDKKFKQWVEKYAADNELFFKDFSNVIVKLFELGVPFAENSERWVFKTVNA

SEQ ID NO: 20201 - protein, 753 aa, Neurospora crassa
MSECPVRKSNVGGGGTRNHDWWPAQLRLNILRQHTPVSNPLDKDFDYAAAFKSLDYEGLKKDLTKLMTDSQDWWPADFGHYGGLFIRMAWHSAGTYRVTDGRGGGGEGQQRFAPLNSWPDNVSLDKARRLLWPIKQKYGNKISWSDLLLLTGNVALESMGFKTFGFAGGRPDTWEADESVYWGAETTWLGNEDRYSEGQEGHEGHGVVQGDESKKQHTDIHNRDLQSPLASSHMGLIYVNPEGPDGIPDPVASAKDIRVTFGRMAMNDEETVALIAGGHSFGKTHGAGPTHHVGKEPEAAPIEHQGLGWANSFGQGKGPDTITSGLEVTWTPTPTKWGMGYLEYLYKFDWEPTKSPAGANQWVAKNAEPTIPDAYDPNKKKLPTMLTTDIALRMDPAYDKICRDYLANPDKFADAFARAWFKLLHRDMGPRTRWIGPEVPSEILPWEDYIPPVDYQIIDDNDIAALKKEILATGVAPKKLIFVAWSSASSFRGSDKRGGANGARIRLAPQNEWKVNDPSTLREVLAALESVQQKFNDSSSGKKVSLADLIVLGGVAALEQASGLVVPFTPGRNDATQEHTDVHSFTHLEPHADGFRSYGKGTKRVRTEQFLIDRASLLTLSAPELTALIGGLRVLEANYDGSSYGVLTKTPGKLTNDYFVNLLDTNTAWKAADNEGEVFIGYDRKTHDKKWTATRADLIFGAHAELRALAEVYAAVDGEEKFKRDFVAAWHKVMNLDRFDLKQEGRGQNAPKL

SEQ ID NO: 20202 - protein, 382 aa, Phanerochaete chrysosporium
MAFGSLLAFVALAAITRAAPTAESAVCPDGTRVTNAACCAFIPLAQDLQETLFQGDCGEDAHEVIRLTFHDAIAISQSLGPQAGGGADGSMLHFPTIEPNFSANSGIDDSVNNLLPFMQKHDTISAADLVQFAGAVALSNCPGAPRLEFMAGRPNTTIPAVEGLIPEPQDSVTKILQRFEDAGNFSPFEVVSLLASHTVARADKVDETIDAAPFDSTPFTFDTQVFLEVLLKGTGFPGSNNNTGEVMSPLPLGSGSDTGEMRLQSDFALARDERTACFWQSFVNEQEFMAASFKAAMAKLAILGHSRSSLIDCSDVVPVPKPAVNKPATFPATKGPKDLDTLTCKALKFPTLTSDPGATETLIPHCSNGGMSCPGVQFDGPA

SEQ ID NO: 20203 - protein, 382 aa, Phanerochaete chrysosporium
MAFGSLLAFVALAAITRAAPTAESAVCPDGTRVTNAACCAFIPLAQDLQETLFQGDCGEDAHEVIRLTFHDAIAISQSLGPQAGGGADGSMLHFPTIEPNFSANNGIDDSVNNLLPFMQKHDTISAADLVQFAGAVALSNCPGAPRLEFMAGRPNTTIPAVEGLIPEPQDSVTKILQRFEDAGNFSPFEVVSLLASHTVARADKVDETIDAAPFDSTPFTFDTQVFLEVLLKGTGFPGSNNNTGEVMSPLPLGSGSDTGEMRLQSDFALARDERTACFWQSFVNEQEFMAASFKAAMAKLAILGHSRSSLIDCSDVVPVPKPAVNKPATFPATKGPKDLDTLTCKALKFPTLTSDPGATETLIPHCSNGGMSCPGVQFDGPA

SEQ ID NO: 20204 - protein, 357 aa, Phanerochaete chrysosporium
AVCPDGTRVSHAACCAFIPLAQDLQETIFQNECGQDAHEVIRLTFHDAIAISRSQGPKAGGGADGSMLLFPTVEPNFSANNGIDDSVNNLIPFMQKHNTISAADLVQFAGAVALSNCPGAPRLEFLAGRPNKTIAAVDGLIPEPQDSVTKILQRFEDAGGFTPFEVVSLLASHSVARANKVDQTIDAAPFDSTPFTFDTQVFLEVLLKGVGFPGSANNTGEVASPLPLGSGSDTGEMRLQSDFALAHDPRTACIWQGFVNEQAFMAASFRAAMSKLAVLGHNRNSLIDCSDVVPVPKPATGQPAMFPASTGPQDLELSCPSERFPTLTTQPGASQSLIAHCPDGSMSCPGVQFNGPA

SEQ ID NO: 20205 - protein, 357 aa, Phanerochaete chrysosporium
AVCPDGTRVSHAACCAFIPLAQDLQETIFQNECGEDAHEVIRLTFHDAIAISRSQGPKAGGGADGSMLLFPTVEPNFSANNGIDDSVNNLIPFMQKHNTISAADLVQFAGAVALSNCPGAPRLEFLAGRPNKTIAAVDGLIPEPQDSVTKILQRFEDAGGFTPFEVVSLLASHSVARANKVDQTIDAAPFDSTPFTFDTQVFLEVLLKGVGFPGSANNTGEVASPLPLGSGSDTGEMRLQSDFALAHDPRTACIWQGFVNEQAFMAASFRAAMSKLAVLGHNRNSLIDCSDVVPVPKPATGQPAMFPASTGPQDLELSCPSERFPTLTTQPGASQSLIAHCPDGSMSCPGVQFNGPA

SEQ ID NO: 20206 - protein, 357 aa, Phanerochaete chrysosporium
AVCPDGTRVSHAACCAFIPLAQDLQETIFQNECGEDAHEVIRLTFHDAIAISRSQGPKAGGGADGSMLLFPTVEPNFSANNGIDDSVNNLIPFMQKHNTISAADLVQFAGAVALSNCPGAPRLEFLAGRPNKTIAAVDGLIPEPQDSVTKILQRFEDAGGFTPFEVVSLLASHSVARADKVDQTIDAAPFDSTPFTFDTQVFLEVLLKGVGFPGSANNTGEVASPLPLGSGSDTGEMRLQSDFALAHDPRTACIWQGFVNEQAFMAASFRAAMSKLAVLGHNRNSLIDCSDVVPVPKPATGQPAMFPASTGPQDLELSCPSERFPTLTTQPGASQSLIAHCPDGSMSCPGVQFNGPA

SEQ ID NO: 20207 - protein, 378 aa, Phanerochaete chrysosporium
MAFKSLIAFVALAAAVRAAPTAVCPDGTRVSHAACCAFIPLAQDLQETIFQNECGEDAHEVIRLTFHDAIAISRLQGPKAGGGADGSMLLFPTVEPNFSANNGIDDSVNNLIPFMQKHNTISAADLVQFAGAVALSNCPGAPRLEFLAGRPNKTIAAVDGLIPEPQDSVTKILQRFEDAGGFTPFEVVSLLASHSVARADKVDQTIDAAPFDSTPFTFDTQVFLEVLLKGVGFPGSANNTGEVASPLPLGSGSDTGEMRLQSDFALAHDPRTACIWQGFVNEQAFMAASFRAAMSKLAVLGHNRNSLIDCSDVVPVPKPATGQPAMFPASTGPQDLELSCPSERFPTLTTQPGASQSLIAHCPDGSMSCPGVQFNGPA

SEQ ID NO: 20208 - protein, 378 aa, Phanerochaete chrysosporium
MAFKSLIAFVALAAAVRAAPTAVCPDGTRVSHAACCAFIPLAQDLQETIFQNECGEDAHEVIRLTFHDAIAISRSQGPKAGGGADGSMLLFPTVEPNFSANNGIDDSVNNLIPFMQKHNTISAADLVQFAGAVALSNCPGAPRLEFLAGRPNKTIAAVDGLIPEPQDSVTKILQRFEDAGGFTPFEVVSLLASHSVARADKVDQTIDAAPFDSTPFTFDTQVFLEVLLKGVGFPGSANNTGEVASPLPLGSGSDTGEMRLQSDFALAHDPRTACIWQGFVNEQAFMAASFRAAMSKLAVLGHNRNSLIDCSDVVPVPKPATGQPAMFPASTGPQDLELSCPSERFPTLTTQPGASQSLIAHCPDGSMSCPGVQFNGPA

SEQ ID NO: 20209 - protein, 382 aa, Phanerochaete chrysosporium
MAFASSLLALVALAAVTSAAPATTQATCPDGTKVNNAACCAFIPLAQDLQETIFQNDCGEDAHEVIRLTFHDAIAISQSKGPSAGGGADGSMLLFPTIEPNFSANNGIDDSVNNLIPFMQKHDTISAGDIVQFAGAVALTNCPGAPQLEFLAGRPNKTIPAIDGLIPEPQDSVTSILERFKDAGNFSPFEVVSLLASHSVARADKVDETIDAAPFDTTPFVFDTQIFLEVLLKGVGFPGTANNTGEVASPLPLTSGSDTGELRLQSDFALARDERTACIWQGFVNEQALMAASFKAAMAKLAVLGHDRNTLVDCSDVVPAPKPAVNKPASFPATTGPQDLELSCNTKPFPSLSVDAGAQQTLIPHCSDGDMTCQSVQFNGPA

SEQ ID NO: 20210 - protein, 390 aa, Phlebia radiata
MAFNFAAILAFVSLAAVTSAAPSKTTCSNGVVVPDAVCCDFVPLASALQSEVLMGDCGEDAHELVRLIFHDAIAISQSMGPSAGGGADGSMLIFPTVEPAFFPNLGIADSVNNLIPFLSQFPTISAGDLVHFAGAVAISNCPGAPQLEFLAGRPNATAPAIDGLIPEPQDDVTKILARFKDAGNFSPAEVVALLASHSIARADHVDPTLDAAPFDSTPFDFDTQVFLEVLLKGVGFPGLANNTGEVSSPLPVTDGTDVGELRLQSDFALARDERTACAWQSFVNEQEAMATAFKNAVKKLAVLGHNRNDLVDCSAVVPVPKPATGTPATFPASTGPQDLELTCTTEPFPTLSTAPGAQQTLIPHCSDGTMTCNSVQFDGPATNFGGADDS

SEQ ID NO: 20211 - protein, 328 aa, Trypanosoma cruzi
MAFCFGSFFSKYASSKSGSQARYRFLHSSAKIAAGATGALLLGGATVALCYFPSGRKVTEAPPFDVNSLRRDIEEILSEDMSKGPLFVRLAWHEAGSWDCRKKDGSPNSASMRFHPECSYAGNKGLDKGRNALESLKKKYPKISYADLWSFAAVVSIEAMGGPEIPWRWGRVDAKDGSVCGPDGRLPDASRMQDHVRDVFSRLGFNDEETVALIGAHTCGECHLENTGYVGPWTHDKYGFDNSFFTELFGNEWMLNPNVKKMQFMDKTTNRLMMLPADVSILLDDKYRSIAKKYADDNDYFCNAFSKAYQKLLEVGTTDLKSLPAESK

SEQ ID NO: 20212 - protein, 288 aa, Zantedeschia aethiopica
MAAPVVDAGYLKEVDKARRDLRALIASKNCAPVMLRLAWHDAGTYDVKTKTGGPNGSIRNEEEHKHGANAGLKIAIDLCETVKAKHPRITYADLYQLAGVVAVEVTGGPTIDFVPGRRDSLVSPKEGRLPDAKQGSAHLRDVFYRMGLSDKDIVALSGGHTLGRAHPERSGFDGPWTNEPLKFDNSYFVELLEGEKEGLLKLPTDKVLVEDPEFRGYVELFAKDEDAFFKDYAESHKKLSELGFTSPKSASKSDAHTSILLAQSAVGVAVAAAVVFLSYCYEVSRRSK

SEQ ID NO: 20213 - protein, 175 aa, Crocus sativus
MGKSSPTVSAEYLKAVEKCKRKLRGFIAEKNCAPLMLRIAWHSAGTFDCKSKTGGPFGTMRHKAELAHGANNGLDIAVRLLEPIKEQFPIISYADFYQLAGVVAVEITGGPDVPFHPGREDKPEPPVEGRLPDATKGCDHLRTVFGEQMGLSDKDIVALSGGHTLGRCHKDRSGF

SEQ ID NO: 20214 - protein, 247 aa, Galdieria partita
MVASKTDLEQKVRSRLVKLFEQTPCMPIMVRLAWHDAGTYDAQTGTGGVNGSIRFDPELRHGANNGLKIALDLLEPIKKEYPDIGYADLFQLASVTAIEFAKGPKIPFRMGRKDATGPDACPEEGRLPNAEDHMSQLRRTFHRMGLSDKDITVLSGAHTLGRCHKERSGYEGPWTHQPLEFDNSYFVEILKPNPDPGLIRLASDLSLLDDSYTRSLVETYAENKDIFFKDYTESHHKLSELGAVWEY

SEQ ID NO: 20215 - protein, 123 aa, Astragalus membranaceus
RLVEADATKGSDHLRDVFGKGMGLSDQDIVALSGGHTIGAAHKERSGFGGPWTSNPLIFDNSYFKELLSGEKEGLLQLPSDKALLTDPVFRPLVEKYAADEDAFFADYAVAHQKLSELGFAEA

SEQ ID NO: 20216 - protein, 735 aa, Bacillus halodurans
MDTNNTGKCPFHHGATTSPKSSGTTNNDWWPNALNLNILRQHDKKSNPMGEEFDYAEEFSKLDYDALKQDVRDLMRDSQDWWPADFGHYGPFFIRMSWHAAGTYRIGDGRGGGGTGNQRFAPLNSWPDNGNLDKARRLLWPIKQKYGNKISWADLLVLAGNVAIEDMGGPVIGFGAGREDIWHPEEDIYWGSEKEWLTGDKRYSGDRELENPLAAVEMGLIYVNPEGPDGKPDPIKAAHDIRETFGRMGMNDEETVALIAGGHTFGKAHGAGNPDHVGPEPEAAPIEAQGLGWQNTYGSGKGRDTITSGLEGAWTANPTQWDNGFFDLLFGYEWWLTKSPAGAYQWQAVDPDEKDLAPDAEDPSVKVPTVMLTTDLALRHDPEYEKISRRFHKNPDEFADAFARAWFKLLHRDMGPKARYLGPEVPAEDFIWQDPVPTVDYELTDAEVEELKAKILDSGLTVSELVTTAWASASTFRNSDKRGGANGARIRLAPQKDWEVNQPEQLEKVLSVLENIQSQLDKKVSIADLIVLGGSAAVEKAAKEAGFDVTVPFAPGRGDATQEQTDVEGFAVLEPVSDGFRNYQKKEYSVSPEELLIDKAQLLDLTAPEMTALIGGMRALGANYGGTQHGVFTDCVGTLTNDFFVNLLDMGIEWKPVDYNLYEGRDRKTGEVVRTATRVDLVFGSNSILRAIAEVYAQDDNKGKFVEDFIAAWVKVMNADRFDLKLNKKAQLTSK

SEQ ID NO: 20217 - protein, 447 aa, Mus musculus
MDEEYDVIVLGTGLTECILSGIMSVNGKKVLHMDRNPYYGGESSSITPLEELYKRFQMLEGPPESMGRGRDWNVDLIPKFLMANGQLVKMLLYTEVTRYLDFKVVEGSFVYKGGKIYKVPSTETEALASNLMGMFEKRRFRKFLVFVANFDENDPKTFEGVDPQTTSMRDVYRKFDLGQDVIDFTGHALALYRTDDYLDQPCLETINRIKLYSESLARYGKSPYLYPLYGLGELPQGFARLSAIYGGTYMLNKPVDDIIMENGKVVGVKSEGEVARCKQLICDPSYIPDRVQKAGQVIRIICILSHPIKNTNDANSCQIIIPQNQVNRKSDIYVCMISYAHNVAAQGKYIAIASTTVETAEPEKEVEPALELLEPIDQKFVAISDLYEPIDDGSESQVFCSCSYDATTHFETTCNDIKDIYKRMAGSAFDFENMKRKQNDVFGEADQ

SEQ ID NO: 20218 - protein, 447 aa, Mus musculus
MDEEYDVIVLGTGLTECILSGIMSVNGKKVLHMDRNPYYGGESSSITPLEELYKRFQILEGPPESMGRGRDWNVDLIPKFLMANGQLVKMLLYTEVTRYLDFKVVEGSFVYKGGKIYKVPSTETEALASNLMGMFEKRRFRKFLVFVANFDENDPKTFEGVDPQNTSMRDVYRKFDLGQDVIDFTGHALALYRTDDYLDQPCLETINRIKLYSESLARYGKSPYLYPLYGLGELPQGFARLSAIYGGTYMLNKPVDDIIMENGKVVGVKSEGEVARCKQLICDPSYIPDRVQKAGQVIRIICILSHPIKNTNDANSCQIIIPQNQVNRKSDIYVCMISYAHNVAAQGKYIAIASTTVETAEPEKEVEPALELLEPIDQKFVAISDLYEPIDDGSESQVFCSCSYDATTHFETTCNDIKDIYKRMAGSAFDFENMKRKQNDVFGEADQ

SEQ ID NO: 20219 - protein, 447 aa, Mus musculus
MDEEYDVIVLGTGLTECILSGIMSVNGKKVLHMDRNPYYGGESSSITPLEELYKRFQILEGPPESMGRGRDWNVDLIPKFLMANGQLVKMLLYTEVTRYLDFKVVEGSFVYKGGKIYKVPSTETEALASNLMGMFEKRRFRKFLVFVANFDENDPKTFEGVDPQNTSMRDVYRKFDLGQDVIDFTGHALALYRTDDYLDQPCLETINRIKLYSESLARYGKSSYLYPLYGLGELPQGFARLSAIYGGTYMLNKPVDDIIMENGKVVGVKSEGEVARCKQLICDPSYIPDRVQKAGQVIRIICILSHPIKNTNDANSCQIIIPQNQVNRKSDIYVCMISYAHNVAAQGKYIAIASTTVETAEPEKEVEPALELLEPIDQKFVAISDLYEPIDDGSESQVFCSCSYDATTHFETTCNDIKDIYKRMAGSAFDFENMKRKQNDVFGEADQ

SEQ ID NO: 20220 - protein, 445 aa, Mus musculus
MNEEYDVIVLGTGLTECILSGIMSVNGKKVLHMDQNPYYGGESASITPLEDLYKRFKLPGQPPASMGRGRDWNVDLIPKFLMANGQLVKMLLFTEVTRYMDFKVIEGSFVYKGGKIYKVPSTEAEALASSLMGLFEKRRFRKFLVYVANFDEKDPRTFEGVDPKKTSMRDVYKKFDLGQDVIDFTGHSLALYRTDDYLDQPCCETINRIKLYSESLARYGKSPYLYPLYGLGELPQGFARLSAIYGGTYMLNKPIEEIIVQNGKVVGVKSEGEIARCKQLICDPSYVKDRVEKVGQVIRVICILSHPIKNTNDANSCQIIIPQNQVNRKSDIYVCMISFAHNVAAQGKYIAIVSTTVETKEPEKEIRPALELLEPIEQKFVSISDLFVPKDLGTDSQIFISRAYDATTHFETTCDDIKDIYKRMTGSEFDFEEMKRKKNDIYGED

SEQ ID NO: 20221 - protein, 445 aa, Mus musculus
MNEEYDVIVLGTGLTECILSGIMSVNGKKVLHMDQNPYYGGESASITPLEDLYKRFKLPGQPPASMGRGRDWNVDLIPKFLMANGQLVKMLLFTEVTRYMDFKVIEGSFVYKGGKIYKVPSTEAEALASSLMGLFEKRRFRKFLVYVANFDEKDPRTFEGVDPKKTSMRDVYKKFDLGQDVIDFTGHSLALYRTDDYLDQPCCETINRIKLYSESLARYGKSPYLYPLYGLGELPQGFARLSAIYGGTYMLNKPIEEIIVQNGKVVGVKSEGEIARCKQLICDPSYVKDRVEKVGQVNRVICILSHPIKNTNDANSCQIIIPQNQVNRKSDIYVCMISFAHNVAAQGKYIAIVSTTVETKEPEKEIRPALELLEPIEQKFVSISDLFVPKDLGTDSQIFISRAYDATTHFETTCDDIKDIYKRMTGSEFDFEEMKRKKNDIYGED

SEQ ID NO: 20222 - protein, 445 aa, Mus musculus
MNEEYDVIVLGTGLTECILSGIMSVNGKKVLHMDRNPYYGGESASITPLEDLYKRFKIPGAPPASMGRGRDWNVDLIPKFLMANGQLVKMLLFTEVTRYLDFKVTEGSFVYKGGKIYKVPSTEAEALASSLMGLFEKRRFRKFLVYVANFDENDPRTFEGIDPKKTSMREVYKKFDLGQDVIDFTGHALALYRTDDYLDQPCCETINRIKLYSESLARYGKSPYLYPLYGLGELPQGFARLSAIYGGTYMLNKPIEEIIMQNGKVIGVKSEGEIARCKQLICDPSYVKDRVEKVGQVIRVICILSHPIKNTNDANSCQIIIPQNQVNRKSDIYVCMISSAHNVAAQGKYIAIASTTVETKEPEKEIRPALELLEPIEQKFVSISDLLVPKDLGTESQIFISRTYDATTHFETTCDDIKDIYKRMMGSEFDFEEMKRKKNDIYGEE

SEQ ID NO: 20223 - protein, 445 aa, Mus musculus
MNEEYDVIVLGHWLTECILSGIMSVNGKKVLHMDRNPYYGGESASITPLEDLYKRFKIPGAPPASMGRGRDWNVDLIPKFLMANGQLVKMLLFTEVTRYLDFKVTEGSFVYKGGKIYKVPSTEAEALASSLMGLFEKRRFRKFLVYVANFDENDPRTFEGIDPKKTSMREVYKKFDLGQDVIDFTGHALALYRTDDYLDQPCCETINRIKLYSESLARYGKSPYLYPLYGLGELPQGFARLSAIYGGTYMLNKPIEEIIMQNGKVIGVKSEGEIARCKQLICDPSYVKDRVEKVGQVIRVICILSHPIKNTNDANSCQIIIPQNQVNRKSDIYVCMISSAHNVAAQGKYIAIASTTVETKEPEKEIRPALELLEPIEQKFVSISDLLVPKDLGTESQIFISRTYDATTHFETTCDDIKDIYKRMMGSEFDFEEMKRKKNDIYGEE

SEQ ID NO: 20224 - protein, 445 aa, Mus musculus
MNEEYDVIVLGHTGTECILSGIMSVNGKKVLHMDRNPYYGGESASITPLEDLYKRFKIPGAPPASMGRGRDWNVDLIPKFLMANGQLVKMLLFTEVTRYLDFKVTEGSFVYKGGKIYKVPSTEAEALASSLMGLFEKRRFRKFLVYVANFDENDPRTFEGIDPKKTSMREVYKKFDLGQDVIDFTGHALALYRTDDYLDQPCCETINRIKLYSESLARYGKSPYLYPLYGLGELPQGFARLSAIYGGTYMLNKPIEEIIMQNGKVIGVKSEGEIARCKQLICDPSYVKDRVEKVGQVIRVICILSHPIKNTNDANSCQIIIPQNQVNRKSDIYVCMISSAHNVAAQGKYIAIASTTVETKEPEKEIRPALELLEPIEQKFVSISDLLVPKDLGTESQIFISRTYDATTHFETTCDDIKDIYKRMMGSEFDFEEMKRKKNDIYGEE

SEQ ID NO: 20225 - protein, 409 aa, Mus musculus
MNEEYDVIVLGTGLTLYKRFKLPGQPPASMGRGRDWNVDLIPKFLMANGQLVKMLLFTEVTRYMDFKVIEGSFVYKGGKIYKVPSTEAEALASSLMGLFEKRRFRKFLVYVANFDEKDPKTFEGVDPKKTSMRDVYKKFDLGQDVIDFTGHSLALYRTDDYLDQPCCETINRIKLYSESLARYGKSPYLYPLYGLGELPQGFARLSAIYGGTYMLNKPIEEIIVQNGKVVGVKSEGEIARCKQLICDPSYVKDRVEKVGQVIRVICILSHPIKNTNDANSCQIIIPQNQVNRKSDIYVCMISFAHNVAAQGKYIAIVSTTVETKEPEKEIRPALELLEPIEQKFVSISDLFVPKDLGTDSQIFISRAYDATTHFETTCDDIKDIYKRMTGSEFDFEEMKRKKNDIYGED

SEQ ID NO: 20226 - protein, 447 aa, Rattus norvegicus
MDEEYDVIVLGTGLTECILSGIMSVNGKKVLHMDRNPYYGGESSSITPLEELYKRFQLLEGPPESMGRGRDWNVDLIPKFLMANGQLVKMLLYTEVTRYLDFKVVEGSFVYKGGKIYKVPSTETEALASNLMGMFEKRRFRKFLVFVANFDENDPKTFEGVDPQTTSMRDVYRKFDLGQDVIDFTGHALALYRTDDYLDQPCLETINRIKLYSESLARYGKSPYLYPLYGLGELPQGFARLSAIYGGTYMLNKPVDDIIMENGKVVGVKSEGEVARCKQLICDPSYIPDRVRKAGQVIRIICILSHPIKNTNDANSCQIIIPQNQVNRKSDIYVCMISYAHNVAAQGKYIAIASTTVETAEPEKEVEPALELLEPIDQKFVAISDLYEPIDDGSESQVFCSCSYDATTHFETTCNDIKDIYKRMAGSAFDFENMKRKQNDVFGEADQ

SEQ ID NO: 20227 - protein, 447 aa, Rattus norvegicus
MDEEYDVIVLGTGLTECILSGIMSVNGKKVLHMDRNPYYGGESSSITPLEELYKRFQLLEGPPESMGRGRDWNVDLIPKFLMANGQLVKMLLYTEVTRYLDFKVVEGSFVYKGGKIYKVPSTETEALASNLMGMFEKRRFRKFLVFVANFDENDPKTFEGVDPQTTSMRDVYRKFDLGQDVIDFTGHALALYRTDDYLVQPCLETINRIKLYSESLARYGKSPYLYPLYGLGELPQGFARLSAIYGGTYMLNKPVDDIIMENGKVVGVKSEGEVARCKQLICDPSYIPDRVRKAGQVIRIICILSHPIKNTNDANSCQIIIPQNQVNRKSDIYVCMISYAHNVAAQGKYIAIASTTVETAEPEKEVEPALELLEPIDQKFVAISDLYEPIDDGSESQVFCSCSYDATTHFETTCNDIKDIYKRMAGSAFDFENMKRKQNDVFGEADQ

SEQ ID NO: 20228 - protein, 447 aa, Rattus norvegicus
MDEEYDVIVLGTGLTECILSGIMSVNGKKVLHMDRNPYYGGESSSITPLEELYKRFQLLEGPPESMGRGRDWNVDLIPKFLMANGQLVKMLLYTEVTRYLDFKVVEGSFVYKGGKIYKVPSTETEALASNLMGMFEKRRFRKFLVFVANFDENDPKTFEGVDPQTTSMRDVYRKFDLGQDVIDFTGHALALYRTDDYLDQPCLETINRIKLYSESLARYGKSPYLYPLYSLGELPQGFARLSAIYGGTYMLNKPVDDIIMENGKVVGVKSEGEVARCKQLICDPSYIPDRVRKAGQVIRIICILSHPIKNTNDANSCQIIIPQNQVNRKPDIYVCMISYAHNVAAQGKYIAIASTTVETAEPEKEVEPALELLEPIDQKFVAISDLYEPIDDGSESQVFCSCSYDATTHFETTCNDIKDIYKRMAGSAFDFENMKRKQNDVFGEADQ

SEQ ID NO: 20229 - protein, 447 aa, Rattus norvegicus
MDEEYDVIVLGTGLTECILSGIMSVNGKKVLHMDRNPYYGGESSSITPLEELYKRFQLLEGPPESMGRGRDWNVDLIPKFLMANGQLVKMLLYTEVTRYLDFKVVEGSFVYKGGKIYKVPSTETEALASNLMGMFEKRRFRKFLVFVANFDENDPKTFEGVDPQTTSMRDVYRKFDLGQDVIDFTGHALALYRTDDYLVQPCLETINRIKLYSESLARYGKSPYLYPLYGLGELPQGFARLSAIYGGTYMLNKPVHDIIMENGKVVGVKSEGEVARCKQLICDPSYIPERVRKAGQVIRIICILSHPIKNTNDANSCQIIIPQNQVNRKSDIYVCMISYAHNVAAQGKYIAIASTTVETAEPEKEVEPALELLEPIDQKFVAISDLYEPIDDGSESQVFCSCSYDATTHFETTCNDIKDIYKRMAGSAFDFENMKRKQNDVFGEADQ

SEQ ID NO: 20230 - protein, 445 aa, Rattus norvegicus
MNEEYDVIVLGTGLTECILSGIMSVNGKKVLHMDQNPYYGGESASITPLEDLYKRFKLPGQPPASMGRGRDWNVDLIPKFLMANGQLVKMLLFTEVTRYMDFKVIEGSFVYKGGKIYKVPSTEAEALASSLMGLFEKRRFRKFLVYVANFDEKDPRTFEGVDPKKTSMRDVYKKFDLGQDVIDFTGHSLALYRTDDYLDQPCCERLTELNFYSESLARYGKSPYLYPLYGPWELPQGFARLSAIYGGTYMLNKPIEEIIVQNGKVVGVKSEGEIARCKQLICDPSYVKDRVEKVGQVIRVICILSHPIKNTNDANSCQIIIPQNQVNRKSDIYVCMISFAHNVAAQGKYIAIVSTTVETKEPEKEIRPALELLEPIEQKFVSISDLFVPKDLGTDSQIFISRAYDATTHFETTCDDIKDIYKRMTGSEFDFEEMKRKKNDIYGED

SEQ ID NO: 20231 - protein, 359 aa, Rattus norvegicus
LMANGQLVKMLLYTEVTRYLDFKVVEGSFVYKGGKIYKVPSTETEALASNLMGMFEKRRFRKFLVFVANFDENDPKTFEGVDPQTTSMRDVYRKFDLGQDVIDFTGHALALYRTDDYLDQPCLETINRIKLYSESLARYGKSPYLYPLYGLGELPQGFARLSAIYGGTYMLNKPVDDIIMENGKVVGVKSEGEVARCKQLICDPSYIPDRVRKAGQVIRIICILSHPIKNTNDANSCQIIIPQNQVNRKSDIYVCMISYAHNVAAQGKYIAIASTTVETAEPEKEVEPALELLEPIDQKFVAISDLYEPIDDGSESQVFCSCSYDATTHFETTCNDIKDIYKRMAGSAFDFENMKRKQN

SEQ ID NO: 20232 - protein, 414 aa, Anopheles gambiae str. PEST
RTVIMDEEYDAIVLGTGLKECILSGMLSVSGKKVLHIDRNKYYGGESASITPLEDLFSRFAVDLPEGKYGRGRDWNVDLIPKFLMANGLLVKLLIHTGVTRYLEFKSVEGSYVYKGGKISKVPVDQKEALASDLMGLFEKRRFRNFLIYVQDFVADDPKTWKDFDPSTKDMQALYEKFGLEKSTQDFTGHALALYRDDSYLTEPAIKTINRIKLYSDSLARYGKSPYLYPMYGLGELPQGFARLSAIYGGTYMLDKPIDEIVYDASGKVVGVRSGEEVAKCKQVYCDPTYVPNKMQVDRKSDIYVSLISSTHQVSAKGWFIAMVSTTVETGNPEAEIKPGLDLLGPIAQKFLSITDYYEPTDDGLQSQVFISQSYDATTHFETTCLDVLDIFKRGTGEDFDFSKIKQELGDEEQ

SEQ ID NO: 20233 - protein, 471 aa, Giardia lamblia ATCC 50803
MDTLPKEFDAIVLGTGLKEGIVSALLSVHGRKVLHIDRNDFYGGDCASLKLSQLYSFFGESLSSIPAEFGKDNEWSIDLIPKFILSSGDLFYMLRHVDCLHYLEFGRVAGAFVYNNGVIHRVPATTKQALDSKLMGLFEKKRMANLFEYITSFEENPSATSNLSSQGKTPATATCNEYFDAYKLSDSTKEFIGHAMALELDDEYLNKPALETFRRIDLYTQSLSRFGQSPFIYPLYGLGDLPQAFSRVAAVWGGIYMLNTPVSEILYNDDKKVRGVRFGDHEVSAPIVVGDPSYFPDLVVSKGRVGRAICILKGPIPECDQQSDVEKDGAGNRIVQTAHQVILPASQIQRKSDIYVSTQGYNHRTTPRNCVLGYVSGLVYGSRSDNRDELKAGFDILKRAGISKTFYKEYDLLEPKEEAQRRNIFISKSYDATSHFESTVADAIDMYQRITGETLDLTTIVKRQAPTVEDA

SEQ ID NO: 20234 - protein, 445 aa, Kluyveromyces lactis
MDENYDVIVLGTGLTECILSGLLSIEGKKVLHVDRQDHYGGESSSVTLTQLYSKFKQHPLSKEDIESKFGKDRDWNVDLIPKFLMANGELTNILVHTDVTRYIEFKQVAGSYVYNRGKVYKVPANEMEAISSSLLGIFEKRRMKKFLEWISAYNEEDIATHQGLNLDQNTMDEVYYKFGLGNSTREFIGHAMALWTNDDYLQQPARPSVERIILYVQSISRFGKSPYIYPMYGLGELPQGFARLSAIYGGTYMLNTPIEKVLYSDDGKFEGIVTKEGTAKAPIVIADPTYFPEKCKTTGEKVIRAICITKQPVPNTSNADSCQIIIPQSQVGRKNDIYIATVSDAHKVTSKGHYLASVSTIIETDKPHIELEPAFKMLGPIEERFMGISEIFEPIEDGTKDNIYISKSYDSSSHFESMTDDVKDIYFRITGHPLVLKKREDVAEE

SEQ ID NO: 20235 - protein, 443 aa, Volvox carteri f. nagariensis
MNEEYDVIVLGTGLKECIISGLLSVDKKKVLHVDRNNYYGGESASLSLIQLYERFRGGDKPPEKLGPSRDYNVDMVPKFMMANGKLVRVLLHTDVVKYLEFKAVDGSYVLQKGKVHKVPANRSEALSSQLMGLFEKRRARNFFLYVQDYEESDPKTHKGLDLKRMTMSELYKQYDLSEDTQDFIGHALGLHRDDAYLTQPALATVLRIKLYHESLFRYEGLKSPYLYPRYGLGELPQAFARLSAVYGGTYMLNQPSMEVLYENGVAVGIKNGDDVARAKLVVGDPSYFPGKTRVVSKVVRAIAIMSHPIPNTDSAHSVQIILPQKQTGRKSDMYVFCCSYAHNVAAKDKWLAFVSTTMETPNPEVDLAPGLALLGPVDEKFVEVREVCEPLEDGARDKCYISKGYDATTHFETTVEDVLDMYRRITGRDLDLTAKDLSQVENA

SEQ ID NO: 20236 - protein, 459 aa, Plasmodium falciparum 3D7
MNEHYDVIILGTGLKECILSGLLSHYGKKILVLDRNPYYGGETASLNLTNLYNTFKPKENIPSKYGENRHWNVDLIPKFILVGGNLVKILKKTRVTNYLEWLVVEGSYVYQHQKKGFLTSEKFIHKVPATDMEALVSPLLSLMEKNRCKNFYQYVSEWDANKRNTWDNLDPYKLTMLEIYKHFNLCQLTIDFLGHAVALYLNDDYLKQPAYLTLERIKLYMQSISAFGKSPFIYPLYGLGGIPEGFSRMCAINGGTFMLNKNVVDFVFDDDNKVCGIKSSDGEIAYCDKVICDPSYVMHLKNKIKKIGQVIRCICILSNPIPETNQTNSCQIIIPQNQLNRKSDIYINLASFQHGVTLKGKYIAIVSATVETNNPIKEIEKPLELLGTIEEKFVKISDLYVSTSKKPADNIFVTSSYDATSHFETATNDLLQIWENLWGQKLNFDDLNTNADGEAPDFN

SEQ ID NO: 20237 - protein, 459 aa, Plasmodium falciparum 3D7
MNEHYDVIILGTGLKECILSGLLSHYGKKILVLDRNPYYGGETASLNLTNLYNTFKPKENIPSKYGENRHWNVDLIPKFILVGGNLVKILKKTRVTNYLEWLVVEGSYVYQHQKKGFLTSEKFIHKVPATDMEALVSPLLSLMEKNRCKNFYQYVSEWDANKRNTWDNLDPYKLTMLEIYKHFNLCQLTIDFLGHAVALYLNDDYLKQPAYLTLERIKLYMQSISAFGKSPFIYPLYGLGGIPEGFSRMCAINGGTFMLNKNVVDFVFDDDNKVCGIKSSDGEIAYCDKVICDPSYVMHLKNKIKKIGQVIRCICILSNPIPETNQTNSCQIIIPQNQLNRKSDIYINLVSFQHGVTLKGKYIAIVSATVETNNPIKEIEKPLELLGTIEEKFVKISDLYVSTSKKPADNIFVTSSYDATSHFETATNDLLQIWENLWGQKLNFDDLNTNADGEAPDFN

SEQ ID NO: 20238 - protein, 464 aa, Oryza sativa (japonica cultivar-group)
MDVEYDVIVLGTGLKECILSGLLSVDRLKVLHMDRNDYYGGDSTSLNLNQLWKRFKGEGTPPAQIGASRDYNVDMIPKFMMANGTLVRVLIHTGVTKYLSFKAVDGSYVFNKGKIHKVPSTDMEALKSPLMGLFEKRRAGKFFLFVQDYKENDPSTHKGYDLNKMTTKELISKYGLDDNTIDFIGHAVALHKEDNYLTEPAIDTLYAESVGRFQGGSPYIYPLYGLGELPQGFARLSAVYGGTYMLNKPECKIEFNDEGKVCGVTSEGETAKCKKVVCDPSYIPDKVRKVGKVFRAIAIMSHPIPNTADSHSVQIIIPQKQLGRKSDMQITLGLLVISIIVTKECSLVHARYVFCCSYSHNVASKGKFIAFVSAQAESENPAAELKPGIDLLGPVDELFIDTYDRFEPTNDPSSDNCFISTSYDATTHFESTVMDVLSIYTKITGKTVDLSVDLSAASAAEDDL

SEQ ID NO: 20239 - protein, 438 aa, Lycopersicon esculentum
IVLGTGLKECILSGLLSVDGLKVLHMDKNDYYGGESSSLNLIQLWKRFRGNDQPPEELGTSKEYNVDMIPKFAMANGTLVRVLIHTDVTKYLNFKAVDGSFVYNKGKIYKVPATDVEALKSPLMGLFEKRRARKFFLYVQDFEETDPKTHEGMDLNKITAKEFIAKYELEDDTIDFIGHALALCTDDNYLAQPAMDFIKRVKLYAESLARFQAGSPYIYPLYGLGELPQAFARLSAVYGGTYMLNKPQCKVEFDDGGKVVGVTSEGETAKCKKVVCDPSYLPDKVQKVGKVARAICIMSHPIPNTNDSHSAQVILPQKQLGRKSDMYLFCCSYSHNVAPKGKYIAFVSTEAETDDPESELKPGVDILGAVDEIFYETYDRFIPSHDSAADNCFISKSYDSTTHFESTVMDVLDMYSKITGKVIDLSVDLSAASATAEE

SEQ ID NO: 20240 - protein, 111 aa, Hordeum vulgare
DVEYDVIVLGTGLKECILSGLLSVDRLKVLHMDRNDYYGGDSTSLNLNQLWKRFKGDGTPPANIGASRDYNVDMVPKFMMANGALVRVLIHTGVTKYLSFKAVDGSYVFNK

SEQ ID NO: 20241 - protein, 447 aa, Oryza sativa
MDEEYDVIVLGTGLKECIISGLLSVDGLKVLHMDRNDYYGGESTSLNLTKLWKRFKGNETAPEHLGVSKEYNVDMVPKFMMANGALVRVLIHTSVTKYLNFKAVDGSFVYNNGKIHKVPATDVEALKSNLMGLFEKRRARKFFIYVQDYEEDDPKSHEGLDLHKVTTREVISKYGLEDDTVDFIGHALALHRDDNYLDEPAIDTVKRMKLYAESLARFQGGSPYIYPLYGLAELPQAFARLSAVYGGTYMLNKAECKVEFDENGKAYGVTSEGETAKCKKVVCDPSYLPDKVKKVGRVARAICIMKHPIPDTKDSHSVQIILPKKQLKRKSDMYVFCCSYAHNVAPKGKFIAFVSTEAEADKPEIELKPGIDLLGPVEETFFDIYDRYEPTNTADEDNCFVTNSYDATTHFETTVKDVLALYSKITGKELDLSVDLNAASAAESEAA

SEQ ID NO: 20242 - protein, 446 aa, Triticum aestivum
  unsure (1)..(446): unsure at all Xaa locations
MDEEYDVIVLGTGLKECILSGLLSVDGLKVLHMDRNDYYGGDSTSLNLNQLWKKFRGEEKPPAHLGASRDYNVDMVPKFMMANGTLVRTLIHTDVTKYLSFKAVDGSYVFSKGKIHKVPATDMEALKSPLMGLFEKRRARNFFIYVQDYNDADPRTHQGLDLTRMTTRELIAKHGLSDDTIDFIGHALALHRDDRYLSEPAIDTVKRMKLYSESLARFQGGSPYIYPLYGLGELPQAFARLSAVYGGTYMLNKPECKVEFDMEGKVCGVTSEGETAKCKKXVVCDPSYLANKGRKVGKVARAIAIMSHPIPNANDSHSIQIILPQKQLGRKSDMYVFCCSYTHNVAPKGKFIAFVSAEAETDNPQSELKPGIDLLGPVDELFFDMYDRYEPVNEPSLDNCFVSSSYDATTHFETTVTDVLNMYTLITGKTVDLSVDLSAASAAEEY

SEQ ID NO: 20243 - protein, 449 aa, Triticum aestivum
  unsure (1)..(449): unsure at all Xaa locations
MDEEYDVIVLGTGLKECILSGLLSVDGLKVLPMDXNDYYGGXDSTSLNLNQLWKKFRGEDKPPAHLGSSKDYNVDMVPKFMMANGTLVRTLIHTNVTKYLSFKAVDGSFVFSKGKIHKVPATDMEALKSPLMGLFEKRRARNFFIYVQNYDEADPKTHQGLDLTTLTPREPIATHGLVDDTXVDFMGRALALLGDDPHLNXKPALDTVKRMKLYSESLARIQGVSPYIYPLYGLGELPQRFARLSAVYGGSYMLTKPECKVEFHMEGKACGVTSEGETAKCKKVVCDPSYLTNKVRKIGKVARAIAIMSHPIPNTNESHSVQIILPQKQLGRNSDMYVFCCSYTHNVAPKGKFIAFVSAEAESDNIQSELKPGIDLLGPVDELFFDMYDRYEPVNEPSLDNCFISTSYDATTHFETTVTDVLNMYTMITGKTIDLSVDLSAASAAEEEY

SEQ ID NO: 20244 - protein, 434 aa, Triticum aestivum
  unsure (1)..(434): unsure at all Xaa locations
MDEEYDVIVLGTGLKECILSGLLSVDGLKVLHMDRNDYYGGDSTSLNLNQLWKKFRGEEKPPAHLGASRDYNVDMVPKFMMANGTLVRTLIHTDVTKYLSFKAVDGSFVFSKGKIHKVPATDMEALKSPLMGIFEKRRARNFFIYVQDYNDADPRTHQGLDLTRMTTRELIAKHGLSDDTIDFIGHALALHRDDRYLSEPAIDTVKRMKLYSESLARFQGGSPYIYPLYGLGELPQAFARLSAVYGGTYMLNKPECKVEFDMEGKVCGVTSEGETAKCKKVVCDPSYLANKVRKIGKVARAIAIMSHPIPNANDSHSIQIILPQKQLGRKSDMYVFCCSYTHNVAPKGKFIAFVSAEAETDNPQSELKPGIDLLGPVDELFFDMYDRYDQXRXPSXXNXXCPTGXKPYSFGHWDDXLIXXXFWKTXXYVXXLXX

SEQ ID NO: 20245 - protein, 306 aa, Triticum aestivum
  unsure (1)..(306): unsure at all Xaa locations
MDEEYDVIVLGTGLKECILSGILSVDGLKVLHMDRNDYYGGESTSLNLAKIWKRFKGSDTTPDHLGVSKEYNVDMVPKFMMANGALVRVLIRTSVTKYLNFKAVDGSFVYNNGKIHKVPATDVEALKSNLMGLFEKRRARKFFIYVQDYEEDDAKSHEGLDLHKVTTRELISKYGLEDDTVDFIGHALALHRDDSYLDEPALGTVKRMKLYAESLARFQGGSPYIYPLYGLGELPQAFARLSAVYGGTYMLNKPECKVEFDESGKAFGVTSEGETAKCKKVVCDPSYLPDKVNKVGRVARAICIMX

SEQ ID NO: 20246 - protein, 444 aa, Triticum aestivum
  unsure (1)..(444): unsure at all Xaa locations
MDEEYDVIVLGTGLKECILSGILSVDGLKVLHMDRNDYYGGESTSLNLAKIWKRFKGSDTTPDHLGISKEYKVDMVPKRRISYGALIDSSQLTLLRRTTAPXQLDDATTHFETTVKDVLALYSKITGKELDLSVDLNAASAXVKMMPLEHLLLVDNFSFLSFFIHRFVHRWIGSILSISFLGFHLSFHTKCSTMDLYTSNTFFTSELLAVALARVHRGSPYIYPLYGLGELPQAFARLSAVYGGTYMLNKPECKVEFDESGKAFGVTSEGETAKCKKVVCDPSYLPDKVKKVGRVARAICIMKHPIPDTKDSHSVQIILPKKQLKRKSDMYVFCCSYAHNVAPKGKFVAFVSTEAETDKPEIELKPGIDLLGPVEETFFDMYDRFEPVNAAEEDNCFLTTSYDATTHFETTVKDVLALYSKITGKELDLSVDLNAASAGENDAA

SEQ ID NO: 20247 - protein, 327 aa, Triticum aestivum
  unsure (1)..(327): unsure at all Xaa locations
MDEEYDVIVLGTGLKECILSGLLSVDGLKVLHMDRNDYYGGDSTSLNLNQLWKKFRGEEKPPAHLGASRDYNVDMVPKFMMANGTLVRTLIHTDVTKYLSFKAVDGSYVFSKGKIHKVPATDMEALKSPLMGIFEKRRARNFFIYVQDYNDADPRTHQGLDLTRMTTRELIAKHGLSDDTIDFIGHALALHRDDRYLSEPAIDTVKRMKLYSESLARFQGGSPYIYPLYGLGELPQAFARLSAVYVRTYMLNKPECKVEFDMEGKVCGVTSEGETAKCKKVVCDPSYLANKVRKIGKVARAIAFMSHPISYAYXDSHSIXYIILPQK

SEQ ID NO: 20248 - protein, 360 aa, Triticum aestivum
  unsure (1)..(360): unsure at all Xaa locations
MRVRLLPDSRTPNPTPTPNCCPFVNSTSPHRRPSVLTPLAPRSHRDKLAESPMDEEYDVIVLGTGLKECILSGLLSVDGLKVLHMDRNDYYGGDSTSLNLNQLWKKFRGEDKPPAHLGSSKDYNVDMVPKFMMANGTLVRTLIHTNVTKYLSFKAVDGSFVFSKGKIHKVPATDMEALKSPLMGLFEKRRARNFFIYVQNYDEADPKTHQGLDLTTMTTKELIAKHGLSDDTIDFIGHALALHRDDRYLSEPAIDTVKRMKLYSESLARFQGGSPYIYPLYGLGELPQAFARLSAVYGGTYMLNKPECKVEFDMEGKVCGVTSEGETAKCKKXVVCDPSYLANKGRKDGKXVARAIAIMX

SEQ ID NO: 20249 - protein, 440 aa, Schizosaccharomyces pombe
MDEEYDVIVLGTGLTECVLSGLLSVDGKKVLHIDRNDYYGADSASLNLTQLYALFRPGEQRPESLGRDRDWCVDLVPKFLMANGDLTNILIYTDVTRYIEFKQIAGSYVYRDGRIAKVPGNEMEALKSPLMSLFEKRRAKKFLEWVNNYREDDPSTYKDINIDRDSMESVFKKFGLQSGTQDFIGHAMALYLDDAYLKKPARETRERILLYASSIAKFGKSPYIYPLYGLGELPQGFARLSAIYGGTYMLNQPVDEIVYGDDGVAIGVRSGDQVAKAKQIIGDPSYFREKVRSVGRLVRAICILNHPIPNTDNLDSVQIIIPQNQVKRKHDIYIAGISSVHNVCPKGYYLAIISTIVETANPLSEIAPGLKLLGPVVESFSRVQEIYEPVTDGTKDQCYISKSVDATSHFETLTCDVRDIYKRMTGTDLVLKQRPKMEDQ

SEQ ID NO: 20250 - protein, 447 aa, Pichia pastoris
MEENYDVIVLGTGLTECILSGLLSVDGKKVLHIDRQQFYGGESASLTLSQVYNKFKPNKTAAESLGKDRDWCIDLIPKFLMANGELTNILVHTDVTRYIEFKQISGSFVYRDGRIAKVPSNEMEAIKSSLMGFFEKRRMKSFLEFITNYKEEEVGTHKGLDLDKNTMDEVYYKYGLEKGTKDFIGHAMALWPNDDYLREPARETYDRIILYLHSVARFGKSPYIYPLYGLGELPQGFARLSAIYGGTYMLDTPIEEVFYDDDGKFTGVRTKEGVAKAPIVIADPTYFPEKVKKVGQKVIRAICILNHPVPNTHDTDSAQIIIPQNQIGRKNDIYIAVVSHSHNVTAKNQYLAIISTVIETDRPHVELEPAFKLLGPTEDVLMGIAELYEPLEDGSNDHVYLSRSYDPSSHFETTTDDVKDLYRRVTGHDLVLKKRKTVEEEESLACE

SEQ ID NO: 20251 - protein, 451 aa, Saccharomyces cerevisiae
MDQETIDTDYDVIVLGTGITECILSGLLSVDGKKVLHIDKQDHYGGEAASVTLSQLYEKFKQNPISKEERESKFGKDRDWNVDLIPKFLMANGELTNILIHTDVTRYVDFKQVSGSYVFKQGKIYKVPANEIEAISSPLMGIFEKRRMKKFLEWISSYKEDDLSTHQGLDLDKNTMDEVYYKFGLGNSTKEFIGHAMALWTNDDYLQQPARPSFERILLYCQSVARYGKSPYLYPMYGLGELPQGFARLSAIYGGTYMLDTPIDEVLYKKDTGKFEGVKTKLGTFKAPLVIADPTYFPEKCKSTGQRVIRAICILNHPVPNTSNADSLQIIIPQSQLGRKSDIYVAIVSDAHNVCSKGHYLAIISTIIETDKPHIELEPAFKLLGPIEEKFMGIAELFEPREDGSKDNIYLSRSYDASSHFESMTDDVKDIYFRVTGHPLVLKQRQEQEKQ

SEQ ID NO: 20252 - protein, 603 aa, Saccharomyces cerevisiae
MLSPERRPSMAERRPSFFSFTQNPSPLVVPHLAGIEDPLPATTPDKVDVLIAGTGMVESVLAAALAWQGSNVLHIDKNDYYGDTSATLTVDQIKRWVNEVNEGSVSCYKNAKLYVSTLIGSGKYSSRDFGIDLSPKILFAKSDLLSILIKSRVHQYLEFQSLSNFHTYENDCFEKLTNTKQEIFTDQNLPLMTKRNLMKFIKFVLNWEAQTEIWQPYAERTMSDFLGEKFKLEKPQVFELIFSIGLCYDLNVKVPEALQRIRRYLTSFDVYGPFPALCSKYGGPGELSQGFCRSAAVGGATYKLNEKLVSFNPTTKVATFQDGSKVEVSEKVIISPTQAPKDSKHVPQQQYQVHRLTCIVENPCTEWFNEGESAAMVVFPPGSLKSGNKEVVQAFILGAGSEICPEGTIVWYLSTTEQGPRAEMDIDAALEAMEMALLRESSSGLENDEEIVQLTGNGHTIVNSVKLGQSFKEYVPRERLQFLFKLYYTQYTSTPPFGVVNSSFFDVNQDLEKKYIPGASDNGVIYTTMPSAEISYDEVVTAAKVLYEKIVGSDDDFFDLDFEDEDEIQASGVANAEQFENAIDDDDDVNMEGSGEFVGEMEI

SEQ ID NO: 20253 - protein, 603 aa, Saccharomyces cerevisiae
MLSPERRPSMAERRPSFFSFTQNPSPLVVPHLAGIEDPLPATTPDKVDVLIAGTGMVESVLAAALAWQGSNVLHIDKNDYYGDTSATLTVDQIKRWVNEVNEGSVSCYKNAKLYVSTLIGSGKYSSRDFGIDLSPKILFAKSDLLSILIKSRVHQYLEFQSLSNFHTYENDCFEKLTNTKQEIFTDQNLPLMTKRNLMKFIKFVLNWEAQTEIWQPYAERTMSDFLGEKFKLEKPQVFELIFSIGLCYDLNVKVPEALQRIRRYLTSFDVYGPFPALCSKYGGPGELSQGFCRSAAVGGPTYKLNEKLVSFNPTTKVATFQDGSKVEVSEKVIISPTQAPKDSKHVPQQQYQVHRLTCIVENPCTEWFNEGESAAMVVFPPGSLKSGNKEVVQAFILGAGSEICPEGTIVWYLSTTEQGPRAEMDIDAALEAMEMALLRESSSGLENDEEIVQLTGNGHTIVNSVKLGQSFKEYVPRERLQFLFKLYYTQYTSTPPFGVVNSSFFDVNQDLEKKYIPGASDNGVIYTTMPSAEISYDEVVTAAKVLYEKIVGSDDDFFDLDFEDEDEIQASGVANAEQFENAIDDDDDVNMEGSGEFVGEMEI

SEQ ID NO: 20254 - protein, 594 aa, Saccharomyces cerevisiae
MAERRPSFFSFTQNPSPLVVPHLAGIEDPLPATTPDKVDVLIAGTGMVESVLAAALAWQGSNVLHIDKNDYYGDTSATLTVDQIKRWVNEVNEGSVSCYKNAKLYVSTLIGSGKYSSRDFGIDLSPKILFAKSDLLSILIKSRVHQYLEFQSLSNFHTYENDCFEKLTNTKQEIFTDQNLPLMTKRNLMKFIKFVLNWEAQTEIWQPYAERTMSDFLGEKFKLEKPQVFELIFSIGLCYDLNVKVPEALQRIRRYLTSFDVYGPFPALCSKYGGPGELSQGFCRSAAVGGPTYKLNEKLVSFNPTTKVATFQDGSKVEVSEKVIISPTQAPKDSKHVPQQQYQVHRLTCIVENPCTEWFNEGESAAMVVFPPGSLKSGNKEVVQAFILGAGSEICPEGTIVWYLSTTEQGPRAEMDIDAALEAMEMALLRESSSGLENDEEIVQLTGNGHTIVNSVKLGQSFKEYVPRERLQFLFKLYYTQYTSTPPFGVVNSSFFDVNQDLEKKYIPGASDNGVIYTTMPSAEISYDEVVTAAKVLYEKIVGSDDDFFDLDFEDEDEIQASGVANAEQFENAIDDDDDVNMEGSGEFVGEMEI

SEQ ID NO: 20255 - protein, 463 aa, Saccharomyces cerevisiae
MIFPRVLFAKSDLLSILIKSRVHQYLEFQSLSNFHTYENDCFEKLTNTKQEIFTDQNLPLMTKRNLMKFIKFVLNWEAQTEIWQPYAERTMSDFLGEKFKLEKPQVFELIFSIGLCYDLNVKVPEALQRIRRYLTSFDVYGPFPALCSKYGGPGELSQGFCRSAAVGGPTYKLNEKLVSFNPTTKVATFQDGSKVEVSEKVIISPTQAPKDSKHVPQQQYQVHRLTCIVENPCTEWFNEGESAAMVVFPPGSLKSGNKEVVQAFILGAGSEICPEGTIVWYLSTTEQGPRAEMDIDAALEAMEMALLRESSSGLENDEEIVQLTGNGHTIVNSVKLGQSFKEYVPRERLQFLFKLYYTQYTSTPPFGVVNSSFFDVNQDLEKKYIPGASDNGVIYTTMPSAEISYDEVVTAAKVLYEKIVGSDDDFFDLDFEDEDEIQASGVANAEQFENAIDDDDDVNMEGS

SEQ ID NO: 20256 - protein, 465 aa, Neurospora crassa
MADEIAKEYDVIVLGTGLTECILSGVLSVKGKKVLHIDRNDHYGGEAASVNLETLFKKYGNFAAGTEPWKEYGRPNDWNIDLVPKFLMSSGELTNILVSTDVTRYLEFKQVAGSYVQQGAGSKATIAKVPSDAAEALRSPLMGIFEKRRMKSFIEWVGEFDPKDPATHKGLDMATCTMKDVFEKFSLEAGTKDFVGHAMALYLNDNYLDTPGAAPETIERIRLYGQSVARYGKSPYIYPLYGLGELPQGFARLSAIYGGTYMLNTNVDELVYENGKAVGIKATMTGVEPEMKFETRAKMILGDPSYFPDKVKVVGHVLRAICILKHPLASTNDADSCQLIIPQSQVGRKNDIYIACVSSAHNVCPKGYWIAIVSTIAETSANHHLELAPGIERLGKIEEQFMGPPIPLYEPLEDGRNDNIFISKSYDATSHFETSTEDVKDIYRRCAGEELVVEGLREGIQMSQE

SEQ ID NO: 20257 - protein, 640 aa, Candida albicans
MDNCDVLIIGTGLQESILAAALSWQGTQVLHIDSNTYYGDSCSTLTIEQLKKWCGDVNSGKIHQFQDAQIYIPGGKQSNQYTSKDYGIDLTPKIMFCQSDLLSLLIKSRVYRYLEFQSLSNFHVFENDDFQQKVNATTKQDIFTDKSLSLMTKRYLMKFLKFLLLDPDYKQRVKPYADTPIQVFLQQEFKLEEPQINELVYSIGLSYKEQTSTKQALIRMKRFLSSFDVYGKFPCMVSKFGGPGELSQGFCRSAAVAGTTYKLNTNLTDFDPISKIAHFNDGSHIKINEKIIISPTQLPKFLQSSYNKVVENLQPYYVTRLVTVVRRDCKEWMSGNESSAIVVFPPHSLPTDNQHSVQVIIQNGNSGVCPDGQAIWFSSTVEQDLSRAKVDLESAFEKMETSLLRESSEEIVNDILGDNNNNNNNNNNNNNNNNNNNNNDFVMNAQGTTTPVLVNSFKLGSSLINFVPKDKLEIVCKLGYVEKTFINPDLSNIFKPTKTNNIVYKDVEDANNEIIFTNMPSSELSYDGIITDVKSIYQRITGTTDDFFDVDFEDEEDEYDRNNQPVVQPKRSSVVGGIVGGGSITSLTALREQHNENNHSDNAIDSDEDEDEDINDMNDNEEEDDHGRGPEPFGADEMEL

SEQ ID NO: 20258 - protein, 476 aa, Giardia intestinalis
MDTLPKEFDAIVLGTGLKEGIVSALLSVHGRKVLHIDRNDFYGGDCASLKLSQLYSFFGESLSSIPAEFGKDNEWSIDLIPKFILSSGDLFYMLRHVDCLHYLEFGRVAGAFVYNNGVIHRVPATTKQALDSKLMGLFEKKRMANLFEYITSFEENPSATSNLSSQGKTPATATCNEYFDAYKLSDSTKEFIGHAMALELDDEYLNKPALETFRRIDLYTQSLSRFGQSPFIYPLYGLGDLPQAFSRVAAVWGGIYMLNTPVSEILYNDDKKVRGVRFGDHEVSAPIVVGDPSYFPDLVVSKGRVGRAICILKGPIPECDQQSDVEKDGAGNRIVQTAHQVILPASQIQRKSDIYVSTQGYNHRTTPRNCVLGYVSGLVYGSRSDNRDELKAGFDILKRAGISKTFYKEYDLLEPKEEAQRRNIFISKSYDATSHFESTVAESIDMYQRITGETLDLTTIVNGQAPTVEDRVIVCE

SEQ ID NO: 20259 - protein, 429 aa, Encephalitozoon cuniculi
MIAEHEYDFVILGTGLVECAVGCILARKNKRVILLDRNPMYGSDFATLRYTELETYFQSPSIAPELEVYDTEFSIDLTPKLFLADSKMLKMLVRYGIDEYLEFCRIPGSFLWRKKLHPVPTNEAQSMTTGLIGIWQKPKVMRFFWNVRDYAREAAKGKAYKFKDTMREEFKEYGLTEESMELIGHGIALNLDDSYLDRHPKETFDKIVTYVRSIICYENSMESPYLYPRYGLSEIAQGFARSCCTKGGEIMINAEILEVNEKNVEVLVREPVNKNVLRIKAGKIISGQSYFQRSTLLYEIIRGICIIRGDPVCVTRGASSAQIIFLKEELKRRNDIFVVVLGSEEKSTPEGYKVAIISTVKETSDPENEIKVVLEKLGDIVRYFVDVKPVYRAEDTENVIFTKGVDESPHFEDIYEEIEGICKKLNVFD

SEQ ID NO: 20260 - protein, 448 aa, Geodia cydonium
MDEKYDVIVLGTGLKECILSGLLSVSGKKVLHMDRNKYYGGASASLSPLEELYKHFGLEEQPPEQMGRGRDWNVDLIPKFLMANGQLVKLLIHSGVTRYLEFKSVEGSYVYKKGGKIHKVPSTEAEALSSSLMGLLEKRRFRNFVSWVGSYDEKKESTHKGVDPKKPMKAAFEKHGLEQNTIDFVGHALALYRDDAYINEPCGPTISRIQLYSESIQRYGKSPYLYPLYGLGELPQGFARLSAIYGGTYMLDKPVDEIVYEGGKVVGVKSKDEVVRTDCVIGDPSYFADKVKKTGQVVRCICIMNHPIPNTKDALSCQIILPQNQVGRSSDIYISCVSFAHNVSTKGYYLAMVSTNVETSNPEEELRPGLDLLGPIQKKFVSVDDIFEPTDNGLDSRVFVSKSYDATTHFETTCDDVLDIFRELLVKPLTSPRSRHKWRQLSNSPLLH

SEQ ID NO: 20261 - protein, 444 aa, Caenorhabditis elegans
MDEEYDAIVLGTGLKECIISGMLSVSGKKVLHIDRNNYYGGESASLTPLEQLYEKFHGPQAKPQQEMGRGRDWNVDLIPKFLMANGPLVKLLIHTGVTRYLEFKSIEASFVVKGGKIYKVPADEMEALATSLMGMFEKRRFKKFLVWVQQFDENKEDTWQGLDPHNSTMQQVYEKFGLDENTADFTGHALALYRDDEHKNQPYAPAVEKIRLYSDSLARYGKSPYLYPLYGLGELPQGFARLSAIYGGTYMLDKPVDEIVMENGKAIGVKCGDEIVRGKQIYCDPSYAKDRVKKTGQVVRAICLLNHPIPNTNDAQSCQIIIPQKQVGRHYDIYISCCSNTNMVTPKGWYLAMVSTTVETANPEAEVLPGLQLLGAIAEKFIQISDVYEPSDLGSESQIFISQSYDATTHFETTCKDVLNMFERGTTKEFDFTNITHLSLNDQE

SEQ ID NO: 20262 - protein, 443 aa, Drosophila melanogaster
MNEEYDAIVLGTGLKECILSGMLSVSGKKVLHIDRNKYYGGESASITPLEELFQRYGLEPPGERFGRGRDWNVDLIPKFLMANGQLVKLLIHTGVTRYLEFKSIEGSYVYKGGKIAKVPVDQKEALASDLMGMFEKRRFRNFLIYVQDFREDDPKTWKDFDPTKANMQGLYDKFGLDKNTQDFTGHALALFRDDEYLNEPAVNTIRRIKLYSDSLARYGKSPYLYPMYGLGELPQGFARLSAIYGGTYMLDKPIDEIVLGEGGKVVGVRSGEEVAKCKQVYCDPSYVPEKVRKRGKVIRCICILDHPVASTKDGLSTQIIIPQKQVGRKSDIYVSLVSSTHQVAAKGWFVGMVSTTVETENPEVEIKPGLDLLEPIAQKFVTISDYLEPIDDGSESQIFISESYDATTHFETTCLDVLNIFKRGTGETFDFSKIKHELGDEEQ

SEQ ID NO: 20263 - protein, 448 aa, Drosophila melanogaster
MDEEYDVDVLGTGLKECILSGIMLSVSGKKVLHIDRNKYYGGESASITPLEELFQRYRTGAARPRFGRGRDWNVDLIPKFLMANGQLVKLLIHTGVTRYLEFKSIEGSYVYKGGKIAKVPVDQKEALASDLMGMFEKRRFRNFLIYVQDFREDDPKTWKDFDPTKANMQGLYDKFGLDKNTQDFTGHALALFRDDEYLNEPAVNTIRRIKLYSDSLARYGKSPYLYPMYGLGELPQGFARLSAIYGGTYMLDKPIDEIVLGEGGKVVGVRSGEEVAKCKQVYCDPSYVPRRLRKRGKVIRCICIQDHPGASTKDGLSTQIIIPQKQVGRKSDIYVSLVSSTHQVAAKGWFVGMVSTTVETENPEVEIKPGLDLLEPIAQKFVTISDYLEPIDDGSESQIFISESYDATTHFETTCWDVLNIFKRGTGETFDFSKDQGTSWVTRSSKRE

SEQ ID NO: 20264 - protein, 448 aa, Drosophila melanogaster
MDEEYDVDVLGTGLKECILSGIMLSVSGKKVLHIDRNKYYGGESASITPLEELFQRYRTGAARPRFGRGRDWNVDLIPKFLMANGQLVKLLIHTGVTRYLEFKSIEGSYVYKGGKIAKVPVDQKRPWHPDLMGMFEKRRFRNFLIYVQDFREDDPKTWKDFDPTKANMQGLYDKFGLDKNTQDFTGHALALFRDDEYLNEPAVNTIRRIKLYSDSLARYGKSPYLYPMYGLGELPQGFARLSAIYGGTYMLDKPIDEIVLGEGGKVVGVRSGEEVAKCKQVYCDPSYVPRRLRKRGKVIRCICIQDHPGASTKDGLSTQIIIPQKQVGRKSDIYVSLVSSTHQVAAKGWFVGMVSTTVETENPEVEIKPGLDLLEPIAQKFVTISDYLEPIDDGSESQIFISESYDATTHFETTCWDVLNIFKRGTGETFDFSKDQGTSWVTRSSKRE

SEQ ID NO: 20265 - protein, 448 aa, Plasmodium yoelii yoelii
MSTNKYNIFNYNITMVACIYSKKILVLDRNPYYGGETASLNLTNLYNTFKPNEKIPSKYGENRHWNVDLIPKFILVGGNLVKILKKTRVTNYLEWLVVEGSYVYQHQKKSLLFSEKFIHKVPSTDMEALVSPLLSLMEKNRCKNFYQYVSEWNANDRNTWDNLDPYRLTMMDIYKYFNLCQLTIDFLGHAVALYLNDDYLKQPAYITLERIKLYMHSISAFGKSPFIYPLYGLGGIPEGFSRMCAINGGTFMLNKNVTDFIYNDNNQVCGIKSSDGEVAYCDKVICDPSYVMHLENKIQKIGQVIRCICILSNPIPETNDINSCQIIIPQNQLNRKSDIYVNLVSFQHGVSYKGKYIAIVSATVETNDPTKEIEKALELLGPIDEKFIKISDLYVSTNPKPKDNIFVTSSYDATSHFETATNDLLQIWENLWGQKLNFDDLNKSDNEL

SEQ ID NO: 20266 - protein, 446 aa, Branchiostoma floridae
MDETYDVIVLGTGLKECILSGLLSVSGKKVLHMDRNKYYGGESASITPLEELYEKFGLGSPPESMGRGRDWNVDLIPKFLMANGMLVKLLIHSGVTRYLEFKSCEGSYVYKSGGNKIHKVPVTEKEALSTSLMGMFEKRRYRKFLMWVNDIDESNPKTHGDIDIGKATMQEVYTHFGLDENTADFTGHALALWRDDNYKQQSCIDTIRRIKLYSESLARYGKTPYLYPLYGLGELPQGFARLSAIYGGTYMLDKPECKIHFDENGKVTGVESDGETAKCSAVVCDPGYAGDKVKKVGQVVRCICILSHPVPNTKDSLSCQLIIPQNQVDRKSDIYVCCVSHAHNVASKGKFLAICSTTVETDNPEAELKPALNLLGPIDQKFVSVSDLYEPIEDGTNSKLFVSSTYDATTHFETTCLDILDIYKRYTGEEFDFTKVADQIQTVADE

SEQ ID NO: 20267 - protein, 444 aa, Branchiostoma belcheri
MDETYDVIVLGTGLKECILSGLLSVSGKKVLHMDRNKYYGGESASITPLEELYEKFGLGSPPETMGRGRDWNVDLIPKFLMANGMLVKLLIHTGVTRYLEFKSCEGSYVYKAGKVHKVPVTEKEALSTSLMGMFEKRRYRKFLIWVNDLDESNPETHKPIDIEKATMQEVYTNFGLDKNTADFTGHALALWRDDNYKEQSCVDTIRRIKLYSESLARYGKTPYLYPLYGLGELPQGFARLSAIYGGTYMLDKEGCTIKFDEEGKVIGVESAGEVAKCSAVVCDPSYAADKVKKVGQVVRCICILSHPVPNTKDSLSCQLIIPQNQVDRKSDIYVCCVSYAHNVASKGKFLAICSTTVETDNPEAELKPALRLLGPIDQKFVSVSDLFEPIDDGPNSKLFVSTTYDATTHFETTCLDILDIYKRYYGEAFDFTKVADQIQTVADE

SEQ ID NO: 20268 - protein, 448 aa, Danio rerio
MNEEYDVIVLGTGLTECILSGIMSVKGKKVLHMDRNSYYGGESASITPLEDLFKRFSLPGSPPESMGKGRDWNVDLIPKSLMANGQLVRMLLITQVTRYLDFKVIEGSFVYKKGSIYKVPSTETEALASSLMGLFEKRRFRKFLVFVANFDENDPKTMEGVDPKKTTMRDVYKKFDLGQDVIDFTGHALALYRTDDYLDQPCIETINRIKLYSESLARYGKSPYLYPLYGLGELPQGFARLSAIYGGTYMLNKPIEEIVIENGKVVGVKSEGEIARCKQLTCDPSYIKDRVNKVGQVIRVICILSHPIKNTSDANSCQIIIPQNQVNRKHDIYVCMISYAHNVAAQGKYIAIVSTTVETNDPEKEIKPALDLLEPVEQKFVSISDLYSPTDVGSDSQIFISRSYDATTHFETTCDDIKDIYKRMTGTEFDFAEMERKKNDIFGDAADQ

SEQ ID NO: 20269 - protein, 446 aa, Xenopus laevis
MNEEYDVIVLGTGLTECILSGIMSVNGKKVLHMDRNSYYGGESASITPLEDLYKRFNIPGSPPESMGRGRDWNVDLIPKFLMANGQLVKMLLFTEVTRYLDFKVIEGSFVYKGGKIYKVPSTETEALASSLMGMFEKRRFKKFLSYVASFDENDSKTQEGVDPKKTTMRDVYKKFDLGQDVVDFTGHALALYRTDEYLDQPCLETVNRIKLYSESLARYGKSPYLYPLYGLGELPQGFARLSAIYGGTYMLNKPIEELVMENGKIVGVKSEGEVARCKQLICDPSYVPDRVTKVGQVIRVICILSHPIKNTNDANSCQIIIPQNQVNRKSDIYVCMISYAHNVAAQGKYIAIISTTVETNDPEREIKPALELLEPIEQKFVSISDMFAPTDMGTESQIFISRTYDPTTHFETTCNDIKDIYKRMMGSEFDFEEMKRKKSDIFGEDQ

SEQ ID NO: 20270 - protein, 448 aa, Gallus gallus
MNEEYDVIVLGTGLTECILSGIMSVNGKKVLHMDRNSYYGGESASITPLEDLYKRFNLPGTPPESMGRGRDWNVDLIPPFLMANGQLVKMLLYTEVTRYLDFKVIEGSFVYKGGKIYKVPSTEAEALASSLMGLFEKRRFRKFLVYVANFDENDPRTFEGVDPKKTTMRDVYKKFDLGQDVIDFTGHALALYRTDDYLDQPCQETINRIKLYSESLARYGKSPYLYPLYGLGELPQGFARLSAIYGGTYMLNKPIEEIVIENGKVVGVKSEGEVARCKQLICDPSYVSDRVTKVGQVIRVICILSHPIKNTNDANSCQIIIPQNQVNRKSDIYVCMISSAHNVAAQGKYIAIASTTVETADPEKEIKPALDLLEPIEQKFVSISDLFAPTDLGTESQIFISRTYDATTHFETTCDDIKDIYKRMMGSEFDFEEMKRKKNDIYGEEEQQ

SEQ ID NO: 20271 - protein, 447 aa, Macaca fascicularis
MDEEYDVIVLGTGLTECILSGIMSVNGKKVLHMDRNPYYGGESSSITPLEELYKRFQLLEGPPESMGRGRDWNVDLIPKFLMANGQLVKMLLYTEVTRYLDFKVVEGSFVYKGGKIYKVPSTETEALASNLMGMFEKRRFRKFLVFVANFDENDPKTFEGVDPQTTSMRDVYRKFDLGQDVIDFTGHALALYRTDDYLDQPCLETINRIKLYSESLARYGKSPYLYPLYGLGELPQGFARLSAIYGGTYMLNKPVDDIIMENGKVVGVKSEGEVARCKQLICDPSYIPDRVRKAGQVIRIICILSHPIKNTNDANSCQIIIPQNQVNRKSDIYVCMISYAHNVAAQGKYIAIASTTVETTDPEKEVEPALELLEPIDQKFVAISDLYEPIDDGCESQVFCSCSYDATTHFETTCNDIKDIYKRMAGMAFDFENMKRKQNDVFGEAEQ

SEQ ID NO: 20272 - protein, 447 aa, Homo sapiens [sequence omitted]

SEQ ID NO: 20273 - protein, 445 aa, Homo sapiens
MDEEYDVIVLGTGLTECILSGIMSVNGKKVLHMDRNPYYGGESASITPLEDLYKRFKIPGSPPESMGRGRDWNVDLIPKFLMANGQLVKMLLYTEVTRYLDFKVTEGSFVYKGGKIYKVPSTEAEALASSLMGLFEKRRFRKFLVYVANFDEKDPRTFEGIDPKKTTMRDVYKKFDLGQDVIDFTGHALALYRTDDYLDQPCYETINRIKLYSESLARYGKSPYLYPLYGLGELPQGFARLSAIYGGTYMLNKPIEEIIVQNGKVIGVKSEGEIARCKQLICDPSYVKDRVEKVGQVIRVICILSHPIKNTNDANSCQIIIPQNQVNRKSDIYVCMISFAHNVAAQGKYIAIVSTTVETKEPEKEIRPALELLEPIEQKFVSISDLLVPKDLGTESQIFISRTYDATTHFETTCDDIKNIYKRMTGSEFDFEEMKRKKNDIYGED

SEQ ID NO: 20274 - protein, 445 aa, Homo sapiens
MNEEYDVIVLGTGLTECILSGIMSVNGKKVLHMDRNPYYGGESASITPLEDLYKRFKIPGSPPESMGRGRDWNVDLIPKFLMANGQLVKMLLYTEVTRYLDFKVTEGSFVYKGGKIYKVPSTEAEALASSLMGLFEKRRFRKFLVYVANFDEKDPRTFEGIDPKKTTMRDVYKKFDLGQDVIDFTGHALALYRTDDYLDQPCYETINRIKLYSESLARYGKSPYLYPLYGLGELPQGFARLSAIYGGTYMLNKPIEEIIVQNGKVIGVKSEGEIARCKQLICDPSYVKDRVEKVGQVIRVICILSHPIKNTNDANSCQIIIPQNQVNRKSDIYVCMISFAHNVAAQGKYIAIVSTTVETKEPEKEIRPALELLEPIEQKFVSISDLLVPKDLGTESQIFISRTYDATTHFETTCDDIKNIYKRMTGSEFDFEEMKRKKNDIYGED

SEQ ID NO: 20275 - protein, 447 aa, Homo sapiens [sequence omitted]

SEQ ID NO: 20276 - protein, 359 aa, Homo sapiens
LMANGQLVKMLLYTEVTRYLDFKVTEGSFVYKGGKIYKVPSTEAEALASSLMGLFEKRRFRKFLVYVANFDEKDPRTFEGIDPKKTTMRDVYKKFDLGQDVIDFTGHALALYRTDDYLDQPCYETINRIKLYSESLARYGKSPYLYPLYGLGELPQGFARLSAIYGGTYMLNKPIEEIIVQNGKVIGVKSEGEIARCKQLICDPSYVKDRVEKVGQVIRVICILSHPIKNTNDANSCQIIIPQNQVNRKSDIYVCMISFAHNVAAQGKYIAIVSTTVETKEPEKEIRPALELLEPIEQKFVSISDLLVPKDLGTESQIFISRTYDATTHFETTCDDIKNIYKRMTGSEFDFEEMKRKKN

SEQ ID NO: 20277 - protein, 188 aa, Homo sapiens
GIVQNGKVIGVKSEGEIARCKQLICDPSYVKDRVEKVGQVIRVICILSHPIKNTNDANSCQIIIPQNQVNRKSDIYVCMISFAHNVAAQGKYIAIVSTTVETKEPEKEIRPALELLEPIEQKFVSISDLLVPKDLGTESQIFISRTYDATTHFETTCDDIKNIYKRMTGSEFDFEEMKRKKNDIYGED

SEQ ID NO: 20278 - protein, 286 aa, Homo sapiens
MNEEYDVIVLGIGLMECILSATEGSFVYKCGQIYKVPSTETEALTSSLIGLFKKRHFRKFLVYVANLDEKDPRTLEGIDPKKTTITATRLFARLSAIYGGTYMLNKPIEEIIVQDGKVIGIKSEGEIAHCKQLICDPSYVKDQLEKVGQVIRVICILSHSIKNTSDVNSCQIIIPQNQVSRKSDICVCTISSAHNVATQEKYIAIVTTTVETKEPEKEVISSLELLEPTRWEFVSISGLLVPKDLGTESQIFISRAYNPTTHFETIVMTLKTSIRRLQDSSLTLRK

SEQ ID NO: 20279 - protein, 656 aa, Homo sapiens
MADNLPTEFDVVIIGTGLPESILAAACSRSGQRVLHIDSRSYYGGNWASFSFSGLLSWLKEYQQNNDIGEESTVVWQDLIHETEEAITLRKKDETIQHTEAFPYASQDMEDNVEEIGALQKNPSLGVSNTFTEVLDSALPEESQLSYFNSDEMPAKHTQKSDTEISLEVTDVEESVEKEKYCGDKTCMHTVSDKDGDKDESKSTVEDKADEPIRNRITYSQIVKEGRRFNIDLVSKLLYSQGLLIDLLIKSDVSRYVEFKNVTRILAFREGKVEQVPCSRADVFNSKELTMVEKRMLMKFLTFCLEYEQHPDEYQAFRQCSFSEYLKTKKLTPNLQHFVLHSIAMTSESSCTTIDGLNATKNFLQCLGRFGNTPFLFPLYGQGEIPQGFCRMCAVFGGIYCLRHKVQCFVVDKESGRCKAIIDHFGQRINAKYFIVEDSYLSEETCSNVQYKQISRAVLITDQSILKTDLDQQTSILIVPPAEPGACAVRVTELCSSTMTCMKDTYLVHLTCSSSKTAREDLESVVKKLFTPYTETEINEEELTKPRLLWALYFNMRDSSGISRSSYNGLPSNVYVCSGPDCGLGNEHAVKQAETLFQEIFPTEEFCPPPPNPEDIIFDGDDKQPEAPGTNNVVMAKLESSEESKNLESPEKHLQN

SEQ ID NO: 20280 - protein, 656 aa, Homo sapiens
MADNLPTEFDVVIIGTGLPESILAAACSRSGQRVLHIDSRSYYGGNWASFSFSGLLSWLKEYQQNNDIGEESTVVWQDLIHETEEAITLRKKDETIQHTEAFCYASQDMEDNVEEIGALQKNPSLGVSNTFTEVLDSALPEESQLSYFNSDEMPAKHTQKSDTEISLEVTDVEESVEKEKYCGDKTCMHTVSDKDGDKDESKSTVEDKADEPIRNRITYSQIVKEGRRFNIDLVSKLLYSQGLLIDLLIKSDVSRYVEFKNVTRILAFREGKVEQVPCSRADVFNSKELTMVEKRMLMKFLTFCLEYEQHPDEYQAFRQCSFSEYLKTKKLTPNLQHFVLHSIAMTSESSCTTIDGLNATKNFLQCLGRFGNTPFLFPLYGQGEIPQGFCRMCAVFGGIYCLRHKVQCFVVDKESGRCKAIIDHFGQRINAKYFIVEDSYLSEETCSNVQYKQISRAVLITDQSILKTDLDQQTSILIVPPAEPGACAVRVTELCSSTMTCMKDTYLVHLTCSSSKTAREDLESVVKKLFTPYTETEINEEELTKPRLLWALYFNMRDSSGISRSSYNGLPSNVYVCSGPDCGLGNEHAVKQAETLFQEIFPTEEFCPPPPNPEDIIFDGDDKQPEAPGTNNVVMAKLESSEESKNLESPEKHLQN

SEQ ID NO: 20281 - protein, 447 aa, Canis familiaris
MDEEYDVIVLGTGLTECILSGIMSVNGKKVLHMDRNPYYGGESSSITPLEELYKRFQLLEGPPEAMGRGRDWNVDLIPKFLMANGQLVKMLLYTEVTRYLDFKVVEGSFIYKGGKIYKVPSTETEALASNLMGMFEKRRFRKFLVFVANFDENDPKTFEGVDPQSTSMRDVYRKFDLGQDVIDFTGHALALYRTDDYLDQPCLETINRIKLYSESLARYGKSPYLYPLYGLGELPQGFARLSAIYGGTYMLNKPVDDIIMENGKVVGVKSEGEVARCKQLICDPSYIPDRVRKAGQVIRIICILSHPIKNTNDANSCQIIIPQNQVNRKSDIYVCMISYAHNVAAQGKYIAIASTTVETAEPEKEVEPALELLEPIDQKFVAISDLYEPIDDGSESQVFCSCSYDATTHFETTCNDIKDIYKRMAGSAFDFENMKRKQNDVFGEADQ

SEQ ID NO: 20282 - protein, 445 aa, Canis familiaris
MNEEYDVIVLGTGLTECILSGIMTVNGKKVLHMDRNPYYGGESASITPLEDLYKRFKIPGAPPASMGRGRDWNLDLIPKFLMANGQLVKMLLYTEVTRYLDFKVTEGSFVYKGGKIYKVPSTEAEALASSLMGLFEKRRFRKFLVYVANFDEKDPRTFEGIDPKKTAIGEVYKKFDLGQDVIDFTGHALALYRTDDYLDQPCCETINRIKLYSESLARYGKSPYLYPLYGLGELPQGFARLSAIYGGTYMLNKPIEEIIVQNGKVIGVKSEGEVARCKQLICDPSYVKDRVEKVGQVIRVICILSHPIKNTNDANSCQIIIPQNQVNRKSDIYVCMISSAHNVAAQGKYIAIVSTTAETKEPEKEIRPALELLEPIEQKFVSISDLLVPKDLGTESQIFISRTYDATTHFETTCDDIKNIYKRMTGSEFDFEEMKRKKNDIYGED

SEQ ID NO: 20283 - protein, 447 aa, Bos taurus
MDEEYDVIVLGTGLTECILSGIMSVNGKKVLHMDRNPYYGGESSSITPLEELYKRFQLLEGPPETMGRGRDWNVDLIPKFLMANGQLVKMLLYTEVTRYLDFKVVEGSFVYKGGKIYKVPSTETEALASNLMGMFEKRRFRKFLVFVANFDENDPKTFEGVDPQNTSMRDVYRKFDLGQDVIDFTGHALALYRTDDYLDQPCLETINRIKLYSESLARYGKSPYLYPLYGLGELPQGFARLSAIYGGTYMLNKPVDDIIMENGKVVGVKSEGEVARCKQLICDPSYVPDRVRKAGQVIRIICILSHPIKNTNDANSCQIIIPQNQVNRKSDIYVCMISYAHNVAAQGKYIAIASTTVETTDPEKEVEPALELLEPIDQKFVAISDLYEPIDDGSESQVFCSCSYDATTHFETTCNDIKDIYKRMAGSAFDFENMKRKQNDVFGEADQ

SEQ ID NO: 20284 - protein, 433 aa, Bos taurus
HHMDEEYDVIVLGTGLTECILSGIMSVNGKKVLHMDRNPYYGGESSSITPLEELYKRFQLLEGPPETMGRGRDWNVDLIPKFLMANGQLVKMLLYTEVTRYLDFKVVEGSFVYKGGKIYKVPSTETEALASNLMGMFEKRRFRKFLVFVANFDENDPKTFEGVDPQNTSMRDVYRKFDLGQDVIDFTGHALALYRTDDYLDQPCLETINRIKLYSESLARYGKSPYLYPLYGLGELPQGFARLSAIYGGTYMLNKPVDDIIMENGKVVGVKSEGEVARCKQLICDPSYVPDRVRKAGQVIRIICILSHPIKNTNDANSCQIIIPQNQVNRKSDIYVCMISYAHNVAAQGKYIAIASTTVETTDPEKEVEPALGLLEPIDQKFVAISDLYEPIDDGSESQVFCSCSYDATTHFETTCNDIKDIYKRMAGSAFDF

SEQ ID NO: 20285 - protein, 408 aa, Mus musculus
MKEEYNVMVLGTGLTECILSGIMSINGKKVLYMGQNSYYGGESASITPLEDLYKRCKLPEQRPASMGRGRDWNVNLIPKFLMANGQLVKMLLFTEVTRYMDFRVIEGSFVYKGGKIYKVPSTEAEALACSLMGLLEKRCFGKFLVYVVNFDEKDPRTFEGVDPKKTSMRDVYKKFDLGQDVIDFTGHSLALYRTGGYLDQPCCETINRIKRCSESLARYGKSPYLYPLNGLGELLQGFARLSAIYGGTYMLNKPVEEIIVQNGKVLICDPSYVKDRVEKVGQVVRVICILSHPIKNTNDAKSCQIVIPQKQVNRKSDIYVFMISFAHNVTAKGKYIAIVSTTLETKEPEKEIRLALELLEPIEQEFVSISDLFVPKDLGTDRSSFPMPMMLPHTLRQPVMTLKISTRG

SEQ ID NO: 20286 - protein, 323 aa, Mus musculus
EALRSNLMGMFEKRRFRKFLVFVANFDENDPKTFEGVDPQNTSMRDVYRKFDLGQDVIDFTGHALALYRTDEYLDQPCLETINRIKLYSESLARYGKSPYLYPLYGLGELPQGFARLSAIYGGTYMLNKPVDDIIMENGKVVGVKSEGEVARCKQLICDPSYIPDRVQKAGQVIRIICILSHPIKNTNDANSCQIIIPQNQVNRKSDIYVCMISYAHNVAAQGKYIAIASTTVETAEPEKEVEPALELLEPIDQKFVAISDLYEPIDDGSESQVFCSCSYDATTHFETTCNDIKDIYKRMAGSAFDFENMKRKQNDVFGEADQ

SEQ ID NO: 20287 - protein, 230 aa, Mus musculus
MNEEYDVIVLGTGLTECILSGIMSVNGKKVLHMDQNPYYGGESASITPLEDLYKRFKLPGQPPASMGRGRDWNVDLIPKFLMANGQLVKMLLFTEVTRYMDFKVIEGSFVYKGGKIYKVPSTEAEALASSLMGLFEKRRFRKFLVYVANFDEKDPRTFEGVDPKKTSMRDVYKKFDLGQDVIDFTGHSLALYRTDDYLDQPCCETINRIKLYSEQSVTKHLKGHCKDVET

SEQ ID NO: 20288 - protein, 621 aa, Mus musculus
MAEKLPTEFDVVIIGTGLPESILAAACSRSGQRVLHVDSRSYYGGNWASFSFTGLQSWLKDYQQNHDSEEGVTATWQDLIHETEEAISLRKKDETIQHTEVFCYASQDVEDSVQDTETLQRSSPLEASATPADSLDSASLPKERQSAYSTSYEVPSRHTEESDRELSLPSANVEDSLEKEKYCGDKTDMHTVSGEDKGEHKLVVQDSIEQPKRNRITYSQMVKESRRFNIDLVSKPLYSQGSLIDLLIKSNVSRYAEFKNVTRILAFWEGKVEQVPCSRADVFNSKELSMVEKRMLMKFLTFCLDYEQHSDEYQDFKQCSFSDYLKTKKLTPNLQHFILHSIAMTSESSCPTLDGLQATKNFLQCLGRFGNTPFIFPLYGHGEIPQCFCRMCAVFGGVYCLRHKVQCLVVDKDSGRCKGIIDAFGQRISANYFIVEDSYLPKETCSNVQYKQISRAVLITDQSILKTDSDQQISILVVPPLEPGTTSVRVMELCSSTMTCMKDSYLVHLTCSSSKTAREDLEPVVKQLFIPEAEAEAGKDELRKPRLLWALYFNMRDSSGVSRSSYCGLPSNVYICSGPDWGLGSEHAVKQAETLFQEIFPSEEFCPPPPNPEDIIFEAEG

SEQ ID NO: 20289 - protein, 621 aa, Mus musculus
MAEKLPTEFDVVIIGTGLPESILAAACSRSGQRVLHVDSRSYYGGNWASFSFTGLQSWLKDYQQNHDSEEGVTATWQDLIHETEEAISLRKKDETIQHTEVFCYASQDVEDSVQDTETLQRSSPLEASATPADSLDSASLPKERQSAYSTSYEVPSRHTEESDRELSLPSANVEDSLEKEKYCGDKTDMHTVSGEDKGEHKLVVQDSIEQPKRNRITYSQMVKESRRFNIDLVSKPLYSQGSLIDLLIKSNVSRYAEFKNVTRILAFWEGKVEQVPCSRADVFNSKELSMVEKRMLMKFLTFCLDYEQHSDEYQDFKQCSFSDYLKTKKLTPNLQHFILHSIAMTSESSCTTLDGLQATKTFLQCLGRFGNTPFIFPLYGHGEIPQCFCRMCAVFGGVYCLRHKVQCLVVDKDSGRCKGIIDAFGQRISANYFIVEDSYLPKETCSNVQYKQISRAVLITDQSILKTDSDQQISILVVPPLEPGTTSVRVMELCSSTMTCMKDSYLVHLTCSSSKTAREDLEPVVKQLFIPEAEAEAGKDELRKPRLLWALYFNMRDSSGVSRSSYCGLPSNVYICSGPDWGLGSEHAVKQAETLFQEIFPSEEFCPPPPNPEDIIFEAEG

SEQ ID NO: 20290 - protein, 665 aa, Mus musculus
MADNLPSDFDVIVIGTGLPESIIAAACSRSGQRVLHVDSRSYYGGNWASFSFSGLLSWLKEYQENSDVVTENSMWQEQILENEEAILLSSKDKTIQHVEVFCYASQDLHKDVEEAGALQKNPASVMSAQATEAAEAAEAAEATEAAEAAEAAEAACLPTAEESLSTRSCELPAEQSQCMGPESSPQVNDAEVGEKETQSDAKCSTEQSSEILPKVQDNTETPKRNVITYSQIIKEGRRFNIDLVSKLLYSRGLLIDLLIKSNVSRYAEFKNITRILAFREGTVEQVPCSRADVFNSKQLTMVEKRMLMKFLTFCVEYEDHPDEYKAYEETTFSEYLKTQKLTPNLQYFVLHSIAMTSETTSSTVDGLKATKKFLQCLGRYGNTPFLFPLYGQGELPQCFCRMCAVFGGIYCLRHSVQCLVVDKESRKCKAIVDQFGQRIISKHFVIEDSYLSENTCSGVQYRQISRAVLITDGSVLKPDSDQQVSILTVPAEESGSFAVRVIELCSSTMTCMKGTYLVHLTCMSSKTAREDLERVVQKLFTPYTEIEAENEQVEKPRILWALYFNMRDSSDISRDCYNDLPSNVYVCSGPDCNLGNDNAVQQAEIVFQKICPNEDFCPAPPNPEDIILDGDSSQQEVSESSVIPETNSETPKESTVLGDSEEPSE

SEQ ID NO: 20291 - protein, 665 aa, Mus musculus
MADNLPSDFDVIVIGTGLPESIIAAACSRSGQRVLHVDSRSYYGGNWASFSFSGLLSWLKEYQENSDVVTENSMWQEQILENEEAILLSSKDKTIQHVEVFCYASQDLHKDVEEAGALQKNPASVMSAQATEAAEAAEAAEATEAAEAAEAAEAACLPTAEESLSTRSCELPAEQSQCMGPESSPQVNDAEVGEKETQSDAKSSTEQSSEILPKVQDNTETPKRNVITYSQIIKEGRRFNIDLVSKLLYSRGLLIDLLIKSNVSRYAEFKNITRILAFREGTVEQVPCSRADVFNSKQLTMVEKRMLMKFLTFCVEYEDHPDEYKAYEETTFSEYLKTQKLTPNLQYFVLHSIAMTSETTSSTVDGLKATKKFLQCLGRYGNTPFLFPLYGQGELPQCFCRMCAVFGGIYCLRHSVQCLVVDKESRKCKAIVDQFGQRIISKHFVIEDSYLSENTCSGVQYRQISRAVLITDGSVLKPDSDQQVSILTVPAEESGSFAVRVIELCSSTMTCMKGTYLVHLTCMSSKTAREDLERVVQKLFTPYTEIEAENEQVEKPRILWALYFNMRDSSDISRDCYNDLPSNVYVCSGPDCNLGNDNAVQQAEIVFQKICPNEDFCPAPPNPEDIILDGDSSQQEVSESSVIPETNSETPKESTVLGDSEEPSE

SEQ ID NO: 20292 - protein, 512 aa, Mus musculus
MADNLPSDFDVIVIGTGLPESIIAAACSRSGQRVLHVDSRSYYGGNWASFSFSGLLSWLKEYQENSDVVTENSMWQEQILENEEAILLSSKDKTIQHVEVFCYASQDLHKDVEEAGALQKNPASVMSAQATEAAEAAEAAEAAEATEAAEAACLPTAEESLSTRSCELPAEQSQCTGPESSPQVNDAEVGEKETQSDAKSSTEQSSEILPKVQDNTETPKRNVITYSQIIKEGRRFNIDLVSKLLYSRGLLIDLLIKSNVSRYAEFKNITRILAFREGTVEQVPCSRADVFNSKQLTMVEKRMLMKFHTFCVEYEDHPDEYKAYEETTFSEYLKTQKLTPNLQYFVLHSIAMTSETTSSTVDGLKATKKFLQCLGRYGNTPFLFPLYGQGELPQCFCRMCAVFGGIYCLRHSVQCLVVDKESRKCKAIVDQFGQRIISKHFVIEDSYLSENTCSGVQYRQISRAVLITDGSVLKPDSDQQVSILTVPAEESGSFAVRVIELCSSTMTCMKGT

SEQ ID NO: 20293 - protein, 356 aa, Mus musculus
MTNTLETTHSSLVTLYPVGFYQLSKRKIKRKYKTEGKNIHFMGSEKQILCLPVAVAFSLFIISTSVIFEVDIFKEKVAGGYLLLLPEEPMLSLFHIFLCKGNEQVQPSLHPCILAEFDPDMKRTSETKAHSQGPCSSWLAFVLVHLHNGRQHEEPLQSYWTCPSQEYTTEKGSLGFGSRISEKLMTTKASPSQWPMCSYLQIPRMKFIDHRGFCGLSPTSSDTPESTGFARLNAVYGGTYLLINQLKKITVQNGKVFGIKSELEIVHCKQLICDPNYVKDRVEKMGQNQVNGKSDIYVCMISFAHNVAAYGKYIAIVSTTVETKEPEKEIQPDLQLSEPIEQKFVSINDLFVPKAL

SEQ ID NO: 20294 - protein, 621 aa, Rattus norvegicus
MADKLPTEFDVVIIGTGLPESILAAACSRSGQRVLHVDSRSYYGGNWASFSFTGLLSWLKDYQQNHDSEGDVTGTWQDLIDETEEAIALCKKDETIQHTEVFCYASQDVEDSMQETDPLQKSPSPEASATPADSLDTASLPKERHSEDCTSYEAPSRRTEGSDGAVSLSSADAQDSLEKEKFCGDETGMHTVSDGEEGEHKLAAEDNVGQPKRNTITYSQMVKESRTFNIDLVSKLLYSQGSLIDLLIKSNVSRYAEFKNVTRILAFREGKVEQVPCSRADVFNSKELTMVEKRMLMKFLTFCLDYEQHSDEYQDFKQCSFSDYLKTKKLTPNLQHFILHSIAMSSDSSCTTLDGLQATKNFLRCLGRFGNTPFIFPLYGQGEIPQCFCRMCAVFGGVYCLRHKVQCLVVDRDSGRCKGIIDGFGQRISANYFIVEDSYLSKEMCSNIQYKQISRAVLITDQSILKTDSDQQISILVVPPLEPGTASVRVMELCSSTMTCMKDSYLVHLTCFSSKTAREDLEPVVKQLFIPFAEAEADKEELRKPRLLWALYFNMRDSSGVSRSSYCSLPSNVYICSGPDCGLGNEHAVKQAETLFQEIFPSEEFCPPPPNPEDIIFEAEG

SEQ ID NO: 20295 - protein, 650 aa, Rattus norvegicus
MADNLPSDFDVIVIGTGLPESIIAAACSRSGQRVLHVDSRSYYGGNWASFSFSGLLSWLKEYQENNDVVTENSMWQEQILENEEAIPLSSKDKTIQHVEVFCYASQDLHKDVEEAGALQKNHASVTSAQSAEAAEAAETSCLPTAVEPLSMGSCEIPAEQSQCPGPESSPEVNDAEATGKKENSDAKSSTEEPSENVPKVQDNTETPKKNRITYSQIIKEGRRFNIDLVSQLLYSRGLLIDLLIKSNVSRYAEFKNITRILAFREGTVEQVPCSRADVFNSKQLTMVEKRMLMKFLTFCVEYEEHPDEYRAYEGTTFSEYLKTQKLTPNLQYFVLHSIAMTSETTSCTVDGLKATKKFLQCLGRYGNTPFLFPLYGQGELPQCFCRMCAVFGGIYCLRHSVQCLVVDKESRKCKAVIDQFGQRIISKHFIIEDSYLSENTCSRVQYRQISRAVLITDGSVLKTDADQQVSILAVPAEEPGSFGVRVIELCSSTMTCMKGTYLVHLTCMSSKTAREDLERVVQKLFTPYTEIEAENEQVEKPRLLWALYFNMRDSSDISRDCYNDLPSNVYVCSGPDSGLGNDNAVKQAETLFQQICPNEDFCPAPPNPEDIVLDGDSSQQEVPESSVTPETNSETPKESTVLGNPEEPSE

SEQ ID NO: 20296 - protein, 221 aa, Rattus norvegicus
MLLFTEAICYMGFKVNEGGFVYKGGKFYNIPSEAEALASSLMELFEKHLFRKFLVYVANFDEKDTRNFEAHTSIHCMVLGELPQGFASAIYGGTYMLNIPIEEITVQNGKVSQINCKLDIYDCMISFAHNGAAQGKYIATVGTTVEITEPEKETRPPLELLEPIEQKFVTISDLFVPKDLATDSLIFISCAYDATTCFEISCDDIKDIYKSMTGSEFELMK

SEQ ID NO: 20297 - protein, 530 aa, Anopheles gambiae str. PEST
GLTESIIAAAASRIGKTVLHLDTNDYYGGYWASFNLEAFRKYLNSSATQISTAVEAINNNFLPLQAQPTLVRNVQVQWYNFTEKGDVDGWNREKIEQEFRKFNIDLVPKLLYARGSMVELLISSNICRYAEFRALDRVATVWDGRITTVPCSRSDVFTNKEVNVVEKRLLMKFLQSCVTYEEDSEAKEELDGKTFLEHLQSHKLTPNLTHYVLCAIAMGNARTPCREGIAAVKKFLMSLGHYGNSPFLFPVYGCGEIPQCFCRLCAVFGGIYCLNKAVEGIHFEQCNEGFKYDSVKCGKQNITSKGLVVGQGYMSRAVFSKSTPAEGAAQKLCGNLARAVILTNVPLGDLIHVTTLAVTENPEEDLKPYVAQILSKDYLPAPEITNENASATESESVKRENTSSTILYEAYFNIPSCLACAENANFSLPVGVRLVCGPYHELDYDQSIDQAKTVFHEIYPDEEFLPRAPDPEEIIIGEEEPVPDQGDSLQDSNEPVDNASECRELESESTDAQEAKEDAVDKAEECTEQK

SEQ ID NO: 20298 - protein, 444 aa, Arabidopsis thaliana
MDEEYEVIVLGTGLKECILSGLLSVDGVKVLHMDRNDYYGGESTSLNLNQLWKKFRGEEKAPEHLGASRDYNVDMMPKFMMGNGKLVRTLIHTDVTKYLSFKAVDGSYVFVKGKVQKVPATPMEALKSSLMGIFEKRRAGKFFSFVQEYDEKDPKTHDGMDLTRVTTKELIAKYGLDGNTIDFIGHAVALHTNDQHLDQPAFDTVMRMKLYAESLARFQGTSPYIYPLYGLGELPQAFARLSAVYGGTYMLNKPECKVEFDEGGKVIGVTSEGETAKCKKIVCDPSYLPNKVRKIGRVARAIAIMSHPIPNTNDSHSVQVIIPQKQLARKSDMYVFCCSYSHNVAPKGKFIAFVSTDAETDNPQTELKPGTDLLGPVDEIFFDMYDRYEPVNEPELDNCFISTSYDATTHFETTVADVLNMYTLITGKQLDLSVDLSAASAAEE

SEQ ID NO: 20299 - protein, 445 aa, Arabidopsis thaliana
MDEEYEVIVLGTGLKECILSGLLSVDGLKVLHMDRNDYYGGESTSLNLNQLWKKFRGEEKAPAHLGSSRDYNVDMMPKFMMANGKLVRVLIHTDVTKYLSFKAVDGSYVFVQGKVQKVPATPMEALKSPLMGIFEKRRAGKFFSYVQEYDEKDPKTHDGMDLRRVTTKDLIAKFGLKEDTIDFIGHAVALHCNDNHLHQPAYDTVMRMKLYAESLARFQGGSPYIYPLYGLGELPQAFARLSAVYGGTYMLNKPECKVEFDEEGKVSGVTSEGETAKCKKVVCDPSYLTNKVRKIGRVARAIAIMSHPIPNTNDSQSVQVILPQKQLGRKSDMYVFCCSYSHNVAPKGKFIAFVSTDAETDNPQTELQPGIDLLGPVDELFFDIYDRYEPVNEPTLDNCFISTSYDATTHFDTTVVDVLNMYKLITGKELDLSVDLNAASAAEEE

SEQ ID NO: 20300 - protein, 445 aa, Arabidopsis thaliana
MDEEYEVIVLGTGLKECILSGLLSVDGLKVLHMDRNDYYGGESTSLNLNQLWKKFRGEEKAPAHLGSSRDYNVDMMPKFMMANGKLVRVLIHTDVTKYLSFKAVDGSYVFVQGKVQKVPATPMEALKSPLMGIFEKRRAGKFFSYVQEYDEKDPKTHDGMDLRRVTTKDLIAKFGLKEDTIDFIGHAVALHCNDNHLHQPAYDTVMRMKLYAESLARFQGGSPYIYPLYGLGELPQAFARLSAVYGGTYMLNKPECKVEFDEEGKVSGVTSEGETAKCKKVVCDPSYLTNKVRKIGRVARAIAIMSHPIPNTNDSQSVQVILPQKQLGRKSDMYVFCCSYSHNVAPKGKFIAFVSTDAETDNPQTELQPGIDLLGPVDELFFDIYDRYEPVNEPTLDNCFISTSYDATTHFDTTVVDVLNMYKLITGKELDLSVDLNPASAAEEE

SEQ ID NO: 20301 - protein, 445 aa, Arabidopsis thaliana
MDEEYEVIVLGTGLKECILSGLLSVDGLKVLHMDRNDYYGGESTSLNLNQLWKKFRGEEKAPAHLGSSRDYNVDMMPKFMMANGKLVRVLIHTDVTKYLSFKAVDGSYVFVQGKVQKVPATPMEALKSPLMGIFEKRRAGKFFSYVQEYDEKDPKTHDGMDLRRVTTKDLIAKFGLKEDTIDFIGHAVALHCNDNHLHQPAYDTVMRMKLYAESLARFQGGSPYIYPLYGLGKLPQAFARLSAVYGGTYMLNKPECKVEFDEEGKVSGVTSEGETAKCKKVVCDPSYLTNKVRKIGRVARAIAIMSHPIPNTNDSQSVQVILPQKQLGRKSDMYVFCCSYSHNVAPKGKFIAFVSTDAETDNPQTELQPGIDLLGPVDELFFDIYDRYEPVNEPTLDNCFISTSYDATTHFDTTVVDVLNMYKLITGKEPDLSVDLNAASAAEEE

SEQ ID NO: 20302 - protein, 445 aa, Arabidopsis thaliana
MDEEYEVIVLGTGLKECILSGLLSVDGLKVLHMDRNDYYGGESTSLNLNQLWKKFRGEEKAPAHLGSSRDYNVDMMPKFMMANGKLVRVLIHTDVTKYLSFKAVDGSYVFVQGKVQKVPATPMEALKSPLMGIFEKRRAGKFFSYVQEYDEKDPKTHDGMDLRRVTTKDLIAKFGLKEDTIDFIGHAVALHCNDNHLHQPAYDTVMRMKLYAESLARFQGGSPYIYPLYGLGELPQAFARLSAVYGGTYMLNKPECKVEFDEEGKVSGVTSEGETAKCKKVVCDPSYLTNKVRKIGRVARAIAIMSHPIPNTNDSQSVQVILPQKQLGRKSDMYVFCFSYSHNVAPKGKFIAFVSTDAETDNPQTELQPGIDLLGPVDELFFDIYDRYEPVNEPTLDNCFISTSYDATTHFDTTVVDVLNMYKLITGKELDLSVDLNAASAAEEE

SEQ ID NO: 20303 - protein, 445 aa, Arabidopsis thaliana
MDEEYDVIVLGTGLKECILSGLLSVDGLKVLHMDRNDYYGGESSSLNLTQLWKRFRGSDTPEENLGASREYNVDMIPKFIMANGLLVQTLIHTDVTKYLNFKAVDGSFVYKKGKIYKVPATDVEALKSPLMGLFEKRRARKFFIYVQDYDEKDPKSHEGLDLSKVTAREIISKYGLEDDTIDFIGHALALHNDDDYLDQPAIDFVKRIKLYAESLARFQGGSPYIYPLYGLGELPQAFARLSAVYGGTYMLNKPECKVEFDGSGKAIGVTSAGETAKCKKVVCDPSYLSEKVKKVGKVTRAVCIMSHPIPDTNDAHSVQIILPQKQLGRKSDMYLFCCSYAHNVAPKGKYIAFVSAEAETDNPEEELKPGIELLGPTDEIFYHSYDTYVPTNIQEEDNCFISATYDATTHFESTVVDVLDMYTKITGKTLDLSVDLSAASAAAEN

SEQ ID NO: 20304 - protein, 444 aa, Cicer arietinum
MDEEYDVIVLGTGLKECILSGLLSVDGLKVLHMDRNDYYGGESTSLNLIQLWKRFRGDDKPPPHLGSSKDYNIDMNPKFIMANGMLVRVLIHTDVTKYLYFKAVDGSFVFNKGKVHKVPSNDMEALKSPLMGIFEKRRARKFFIYVQDYNESDPKTHDGMDLTRVTTKELIAKFGLDDNTVDFIGHALALHRDDRYLNEPALDTVKRMKLYAESLARFQGGSPYIYPLYGLGELPQAFARLSAVYGGTYMLNKPECKVEFDGEGKVLGVSSEGETAKCKKVVCDPSYLPNKVRKVGKVARAIAIMSHPIPNTNDSHSVQVILPQKQLGRKSDMYLFCCSYSHNVAPKGKFIAFVSTEAETDQPAIELKPGIDLLGPVDEIFFDMYDRFEPVNEPTLDNCFVSTSYDATTHFESTVLDVLNMYTLITGKVLDLSVDLSAAGAAEE

SEQ ID NO: 20305 - protein, 444 aa, Nicotiana tabacum
MDEEYDVIVLGTGLKECILSGLLSVDGLKVLHMDRNDYYGGESTSLNLVQLWKRFRGSDKPPAELGSSRDFNVDMIPKFIMANGALVRVLIHTDVTKYLYFKAVDGSFVYNKGKVHKVPATDMEALKSPLMGIFEKRRARKFFIYVQDYNESDPKTHEGMDLTRVTTRELIAKYGLDDNTVDFIGHALALHRDDRYLDEPAQDTVKRMKLYAESLARFQGGSPYIYPLYGLGELPQAFARLSAVYGGTYMLNKPECKVEFDEEGKVCGVTSEGETAKCKKVVCDPSYLPNKVRKVGKVARAIAIMSHPIPNTNDSHSVQIILPQKQLGRKSDMYLFCCSYTHNVAPKGKFIAFVSTEAETDNPESELKQGVNLLGPVDEIFYETYDRSEPVNEPSLDNCFISTSYDATTHFESTVDDVLNLYTKITGKVLDLNVDLSAASAAEE

SEQ ID NO: 20306 - protein, 445 aa, Oryza sativa
MDEEYDLIVLGTGLKECILSGLLSVDGLKVLHMDRNDYYGGDSTSLNLNQLWKRFRGEDKPPAHLGSSKDYNVDMVPKFMMANGTLVRTLIHTDVTKYLSFKAVDGSYVFSKGKIHKVPATDMEALKSPLMGLFEKRRARNFFIYVQDYNEADPKTHQGLDLTTMTTRELIAKYGLSDDTVDFIGHALALHKDDRYLNEPAIDTVKRMKVYAESLAPFQGGSPSIYPLYGLGELPQGHARLSAVYGGTYILNKPDCKVEFDMEGKVCGVTSEGETAKCKKVVCDPSYLPNKVRKDRKVARAIAIMSHPIASTNDSHSVQIILPQKQLGRKSDMYVFCCSYTHNVAPKGKFIAFVSTEAETDNPQSELKPGIDLLGQVDELFFDIYDRYEPVNEPSLDNCFVSTSYDATTHFETTVTDVLNMYTLITGKAVDLSVDLSAASAAEEY

SEQ ID NO: 20307 - protein, 445 aa, Oryza sativa; identical to SEQ ID NO: 20306

SEQ ID NO: 20308 - protein, 445 aa, Oryza sativa
MDEEYDVIVLGTGLKECILSGLLSVDGLKVLHMDRNDYYGGDSTSLNLNQLWKRFRGEDKPPAHLGASRDYNVDMVPKFMMANGTLVRTLIHTDVTKYLSFKAVDGSYVFSKGKIHKVPATDMEALKSPLMGLFEKRRARNFFIYVQDYDEADPKTHQGLDLTTMTTRELIAKYGLSDDTVDFIGHALALHRDDRYLNEPAIDTVKRMKLYAESLPRFQGGSPSIYPLYGLGELPQGFARLRAVYGGTYMLNKPDCKVEFDMEGKVCGVTSEGESAKCKKVVCDPSYLPNKVRKIGKVARAIAIMSHPIANTNDSHSVQIILPQKQLGRKSDMYVFGCSYTHNVAPKGKFIAFVSTEAETDHPESELKPGIDLLGQVDELFFDIYDRYEPVNEPSLDNCFVSTSYDATTHFETTVTDVLNMYTLITGKTVDLSVDLSAASAAEKY

SEQ ID NO: 20309 - protein, 445 aa, Oryza sativa; identical to SEQ ID NO: 20308

SEQ ID NO: 20310 - protein, 446 aa, Oryza sativa
MDVEYDVIVLGTGLKECILSGLLSVDRLKVLHMDRNDYYGGDSTSLNLNQLWKRFKGEGTPPAQIGASRDYNVDMIPKFMMANGTLVRVLIHTGVTKYLSFKAVDGSYVFNKGKIHKVPSTDMEALKSPLMGLFEKRRAGKFFLFVQDYKENDPSTHKGYDLNKMTTKELISKYGLDDNTIDFIGHAVALHKEDNYLTEPAIDTVKRMKLYAESVGRFQGGSPYIYPLYGLGELPQGFARLSAVYGGTYMLNKPECKIEFNDEGKVCGVTSEGETAKCKKVVCDPSYIPDKVRKVGKVFRAIAIMSHPIPNTADSHSVQIIIPQKQLGRKSDMYVFCCSYSHNVASKGKFIAFVSAQAESENPAAELKPGIDLLGPVDELFIDTYDRFEPTNDPSSDNCFISTSYDATTHFESTVMDVLSIYTKITGKTVDLSVDLSAASAAEDDL

SEQ ID NO: 20311 - protein, 907 aa, Oryza sativa
  unsure (1)..(907): unsure at all Xaa locations
MDVEYDVIVLGTGLKECILSGLLSVDRLKVLHMDRNDYYGGDSTSLNLNQLWKRFKGEGTPPAQIGASRDYNVDMIPKFMMANGTLVRVLIHTGVTKYLSFKAVDGSYVFNKGKIHKVPSTDMEALKSPLMGLFEKRRAGKFFLFVQDYKENDPSTHKGYDLNKMTTKELISKYGLDDNTIDFIGHAVALHKEDNYLTEPAIDTVKRMKAKSVGRFQGGSPYIYPLYGLGELPQGFARLSAVYGGTYMLNKPECKIEFNDEGKVCGVTSEGETAKCKKVVCDPSYIPDKIXXLGLLVISIIVTKECSLVHARYVFCCSYSHNVASKGKFIAFVSAQAESENPAAELKPGIDLLGPVDELFIDTYDRFEPTNDPSSDNCFISTSYDATTHFESTVMDVLSIYTKITGKVLYLISPLNVVDSANEHRTGTSNYFEEYLVKCSLRLCSYVERCFVALAGRFIDTSAPCASQLSRSGLRWGTSSSLALKDVRRRNEDALGRNNLAIRIVEIGIQRPTSIRRHSSRPSLSLSLRTTQLDSRALAAAAASSPTARASTPPPPPPPPRLQHCRSPPPVLPSPVIFVVSGVRFQTQLQMDGRGRKHRILMVSDFFFPNFGGVESHIYYLSQCLLKLGHKVIVMTHAYGNRSGVRYVTGGLKVYYVPWKPFLMQNTLPTLFLTFPIVRTILIREKISVVHGHQAFSTLCHEALMHARTMGYKVVFTDHSLYGFADAGSIHMNKVLQFTLADIDQAICVSHTSKENTVLRSGISPEKVFMVPNAVDTAMFTPSPDRLSCDEIVIVVISRLVYRKGADLLVEVIPEVCRLFPKVRFIVGGDGPKRVRIEEMREKFSLQDRVEMLGAVPHAQVRSVLISGHIFLNSSFFSSGIVDTHPNIITNIEEDISGENELSVENS

SEQ ID NO: 20312 - protein, 389 aa, Oryza sativa
  unsure (1)..(389): unsure at all Xaa locations
MDEEYDVIVLGTGLKECIISGLLSVDGLKVLHMDRNDYYGGESTSLNLTKLWKRFKGNETAPEHLGVSKEYNVDMVPKFMMANGALVRVLIHTSVTKYLNFKAVDGSFVYNNGKIHKVPATDVEALKSNLMGLFEKRRARKFFIYVQDYEEDDPKSHEGLDLHKVTTREVISKYGLEDDTVDFIGHALALHRDDNYLDEPAIDTVKRMKLYAESLARFQGGSPYIYPLYGLAELPQAFARLSAVYGGTYMLNKAECKVEFDENGKAYGVTSEGETAKCKKVVCDPSYLPDKVKKVGRVARAICIMKHPIPDTKDSHSVQIILPKKQLKRKSDMXKFIAFXSTEAEADKPEIELKPGIDLLGPVEETFFDIYDRYEPTNTADEDNCFVTN

SEQ ID NO: 20313 - protein, 357 aa, Oryza sativa
  unsure (1)..(357): unsure at all Xaa locations
MDVEYDVIVLGTGLKECILSGLLSVDRLKVLHMDRNDYYGGDSTSLNLNQLWKRFKGEGTPPAQIGASRDYNVDMVPKFMMANGTLVXRVLIHTGXTKYLXIKAVDGSYVXNKGKIHKGPSTDMEALKSPLMGXFEKRRAGKFFLFVQDYKENDPSTHKGYDLNKMTTKELISKYGLDDNTIDFIGHAVALHKEDNYLTEPAIDTVKRMKLYAESVGRFQGGSPYIYPLYGLGELPQGFARLSAVYGGTYMLNKPECKIEFNDEGKVCGVTSEGETAKCKKVVCDPSYIPDKVRKVGKVFRAIAIMSHPIPNTADSHSVQIIIPQKQLGRKSDMQVFCISPLVFIHYWALHLXITLG

SEQ ID NO: 20314 - protein, 305 aa, Oryza sativa
MDEEYDVIVLGTGLKECILSGLLSVDGLKVLHMDRNDYYGGDSTSLNLNQFMMANGTLVRTLIHTDVTKYLSFKAVDGSYVFSKGKIHKVPATDMEALKSPLMGLFEKRRARNFFIYVQDYNEADPKTHQGLDLTTMTTRELIAKYGLSDDTVDFIGHALALHRDDRYLNEPAIDTVKRMKLYAESLARFQGGSPYIYPLYGLGELPQGFARLSAVYGGTYMLNKPDCKVEFDMEGKVCGVTSEGETAKCKKVVCDPSYLPNKSYDATTHFETTVTDVLNMYTLITGKAVDLSVDLSAASAAEEY

SEQ ID NO: 20315 - protein, 229 aa, Oryza sativa
  unsure (1)..(229): unsure at all Xaa locations
MDVEYDVIVLGTGLKECILSGLLSVDRLKVLHMDRNDYYGGDSTSLNLNQFMMANGTLVRVLIHTGVTKYLSFKAVDGSYVFNKGKIHKVPSTDMEALKSPLMGLFEKRRAGKFFLFVQDYKENDPSTHKGYDLNKMTTKELISKYGLDDNTIDFIGHAVALHKEDNYLTEPAIDTVKRMKAKSVGRFQGGSPYIYPLYGLGELPQGFARLSAVYGGTYMLNKPECKVX

SEQ ID NO: 20316 - protein, 220 aa, Oryza sativa
  unsure (1)..(220): unsure at all Xaa locations
XTRPDPKVPSTDMEALKSPLMGLFEKRRAGKFFLFVQDYKENDPSTHKGYDLNKMTTKELISKYGLDDNTIDFIGHAVALHIEDNYLTEPAIDTVKRMKLYAESVGRFQGGSPYIYPLYGLGELPQGFARLSAVYGGTYMLNKPECKIEFNDEGKVCGVTSEGETAKCKKVVXCDPSYIPDKVRKVGKGFPAIAIMSHPIPNTADSHSVQIIIPXKQLGX

SEQ ID NO: 20317 - protein, 197 aa, Oryza sativa
  unsure (1)..(197): unsure at all Xaa locations
ARGKFIMASGILVKILLHTDVAXEYLEFKVVDGSYVFMGGKVHKVPANDTEALKSDLMGLFEKRRAKNFFTLSQNYDVNNPKTHSGFPDLNKTTMKEIFAHFGLVDDTINFIGHSLALHRDDDYLTQPAKPTIEKCRLYAESLSRFGKSPYIYPLYGLGELPQGFARLSAIYGGTYMLNKPYEGVVFDENGRVSGVX

SEQ ID NO: 20318 - protein, 158 aa, Oryza sativa
  unsure (1)..(158): unsure at all Xaa locations
XKKVRKVGKVFRPIGIRGLPIPKTADSPSAQIINPQKQLGRKSDMYVFCCSHSHNVASKGKFIAFVSAQAESENPAAELKPGIDLLGPVDELFIDTYARFEPTNDPSSDNCFISTSYDAPTPFESTVMDVLSIYTKIPGKTVDLSVDLSAASAAEDDL

SEQ ID NO: 20319 - protein, 205 aa, Triticum aestivum
  unsure (1)..(205): unsure at all Xaa locations
VFTMAFPLTRPRSPVEFDDEGKVRGVTSEGETAKGKKVVCDPSYVPEKVKKVGKVFRAIAIMSHPIPNTAESHSVQIIIPQKQLGRRSDMYVFCCSYSHNVASKGKFIAFVSAQAESDNPEAELKPGIDLLGPFDELFFDTYDRYEPTNDPSSDNCFISTSYDATTHFESTVMDVLSLYTKITGKTVDLSVDLSAASAPEDDXQF

SEQ ID NO: 20320 - protein, 193 aa, Triticum aestivum
  unsure (1)..(193): unsure at all Xaa locations
MDEEYDVIVLGTGLKECILSGLLSVDGLKVLHMDRNDYYGGDSTSLNLNQLWKKFRGEDKPPAHLGLSKDYNVDMVPKVMMANGTLVRTLIHTNVTKYLSFKAVDGSFVFSKGKIHKVPATDMEALKSPLMGLFEKRRARNFFIYVQNYDEADPKTHQGLDLTTLTTKELIAKPGXXXXVKXEQGFIGXPXHG

SEQ ID NO: 20321 - protein, 445 aa, Zea mays
MDEEYDVIVLGTGLKECILSGLLSVDGLKVLHMDRNDYYGGDSTSLNLNQLWKRFRGEDKPPAHLGASRDYNVDMVPKFMMANGTLVRTLIHTDVTKYLSFKAVDGSYVFSKGKIYKVPATDMEALKSPLMGLFEKRRARNFFIYVQDYNEADPRTHQGLDLTRVTTRELIAKYGLSDDTVDFIGHALALHRDDRYLDEPALDTVKRMKLYADSLARFQGGSPYIYPLYGLGELPQGFARLSAVYGGTYMLNKPECKVEFDMEGKVCGVTSEGETAKCKKVVCDPSYLPNKVRKIGRVVRAIAIMSHPIPNTNESHSVQIILPQKQLGRRSDMYVFCCSYTHNVAPRGKFIAFVSAEAETDNPQSELKPGIDLLGSVDEIFYDIYDRYEPVNEPSLDNCFVSTSYDATTHFETTVTDVLNMYTMITGKTVDLSVDLSAASAAEEY

SEQ ID NO: 20322 - protein, 445 aa, Zea mays
MDEEYDVIVLGTGLKECILSGLLSVDGLKVLHMDRNDYYGGDSTSLNLNQLWKRFRGEDKPPAHLGASRDYNVDMVPKFMMANGTLVRTLIHTDVTKYLSFKAVDGSYVFSKGKIYKVPATDMEALKSPLMGLFEKRRARNFFIYVQDYNEADPRTHQGLDLTRVTTRELIAKYGLSDDTVDFIGHALALHRDDRYLDEPALDTVKRMKLYSESLARFQGGSPYIYPLYGLGELPQGFARLSAVYGGTYMLNKPECKVEFDMEGKVCGVTSEGETAKCKKVVCDPSYLPNKVRKIGRVVRAIAIMSHPIPNTNESHSVQIILPQKQLGRRSDMYVFCCSYTHNVAPRGKFIAFVSAEAETDNPQSELKPGIDLLGSVDEILYDIYDRYEPVNEPSLDNCFVTTSYDATTHFETTVTDVLNMYTMITGKTVDLSVDLSAASAAEEY

SEQ ID NO: 20323 - protein, 445 aa, Zea mays
MDEEYDVIVLGTGLKECILSGLLSVDGLKVLHMDRNDYYGGDSTSLNLNQLWKRFRGEDKPPAHLGASRDYNVDMVPKFMMANGTLVRTLIHTDVTKYLSFKAVDGSYVFSKGKIYKVPATDMEALKSPLMGLFEKRRARNFFIYVQDYNEADPRTHQGLDLTRVTTRELIAKYGLSDDTVDFVGHALALHRDDRYLDEPALDTVKRMKLYADSLARFQGGSPYIYPLYGLGELPQGFARLSAVYGGTYMLNKPDCKVEFDMEGKVCGVTSEGETAKCKKVVCDPSYLQNKVRKIGRVVRAIAIMSHPIPNTNESHSVQIILPQKQLGRRSDMYVFCCSYTHNVAPRGKFIAFVSAEAETDNPQSELKPGIDLLGSVDEIFYDIYDRYEPVNEPSLDNCFVSTSYDATTHFETTVTDVLNMYTMITGKTVDLSVDLSAASAAEEY

SEQ ID NO: 20324 - protein, 446 aa, Zea mays
  unsure (1)..(446): unsure at all Xaa locations
MDEEYDVIVLGTGLKECILSGLLSVDGLKVLHMDRNDYYGGDSTSLNLNQLWKRFRGEDKPPAHLGASRDYNVDMVPKFMMANGTLVRTLIHTDVTKYLSFKAVDGSYVFSKRKIHKVPATDMEALKSPLMGLFEKRRARNFFVYVQNYNEADPVTHQGLDLTRITTRELILKHGLSDDTVDFIGHALALHRDDRYLNEPALDTVKRMKLYAESLARFQGGSPYIYPLYGLGELPQAFARLSAVYGGTYMLNKPECKVEFDIEGKVCGVTSEGETAKCKKVVCDPSYLPSKVRKIGKVARAIAIMSHPIPNTNESHSIQIILPQKQLGRKSDMYVFCCSYTHNVAPKGKXFIAFVSAEAETDNPQSELKPGIDLLGQVDELFFDMYDRYKPVNEPSLDNCFVSMSYDATTHFETTVTDVLSMYTAITGKTVDLSVDLSAASAAEEY

SEQ ID NO: 20325 - protein, 446 aa, Zea mays
MDVEYDVIVLGTGLKECILSGLLSVDRLKVLHMDRNDYYGGDSTSLNLNQLWKRFKGEETPPAHIGASRDYNVDMVPKFMMANGTLVRVLIHTGVTKYMSFKAVDGSYVFNKGKIHKVPSTDMEALKSPLMGLFEKRRAGKFFLYVQDYKENDPSTHKGYNLTKLTTKELISKYGLDDNTIDFIGHAVALHRDDSYLTEPAIDTVKRMKLYAESVARFQGGSPYIYPLYGLGELPQGFARLSAVYGGTYMLSKPECKVEFDDEGKVCGVTSEGETAKCKKVVCDPSYLPDKVKKIGKVFRAIAIMSHPIPNTAESHSVQIILPQKQLGRRSDMYVFCCSYSHNVASKGKFIAFVSAQAETDNPEKELKPGIDLLGKVDELFIDIYDRYEPTNDSSADNCFISTSYDATTHFESTVMDVLSLYTKITGKTVDLSVDLSAASAAEDDM

SEQ ID NO: 20326 - protein, 447 aa, Zea mays; identical to SEQ ID NO: 583

SEQ ID NO: 20327 - protein, 216 aa, Zea mays
MDEEYDVIVLGTGLKECILSGLLSVDGLKVLHMDRNDYYGGDSTSLNLNQLWKKFRGEEKPPAHLGASRDYNVDMVPKFMMANGTLVRTLIHTDVTKYLSFKAVDGSFVFSKGKIHKVPATDMEALKSPLMGIFEKRRARNFFIYVQDYNDADPRTHQGLDLTRMTTRELIAKHGLSDDTIDFIGHALALHRDDRYLSEPAIDTVKRMKLYSESLA

SEQ ID NO: 20328 - protein, 216 aa, Zea mays
  unsure (1)..(216): unsure at all Xaa locations
MDEEYDVIVLGTGLKECILSGLLSVDGLKVLHMDRNDYYGGDSTSLNLNQLWKKFRGEDKPPAHLGSSKDYNVDMVPKFMMANGTLVRTLIHTNVTKYLSFKAGDGSFVFSKGKIHKVPATDMEALKSPLMGLFEKRRARNFFIYVQNYDEADPKTHQGLDLTTXLTTKELIAKYGLVDDTVDFIGHALALHXRDDRHLHXEPALDTGKKMKLYSE

SEQ ID NO: 20329 - protein, 242 aa, Zea mays
  unsure (1)..(242): unsure at all Xaa locations
MNEEYDVIVLGTGLTECILSGIMSVNGKKVLHMDQNPYYGGESASITPLEDLYKRFKLPGQPPASMGRGRDWNVDLIPKFLMANGQLVKMLLFTEVTRYMDFKVIEGSFVYKGGKIYKVPSTEAEALASSLMGLFEKRRFRKFLVYVANFDEKDPRTLXGVDPKKTSMRDVXKKFDXGQDVIDFTGHSLALYRTDDYLDQPXCCETINRIKLYSESLARYGKSPYLYPLYGXLGELPQGFAX

SEQ ID NO: 20330 - protein, 459 aa, Schizosaccharomyces pombe
MDDPNSYDVIIVGTNLRNSILSAALSWANQRVLHIDENSFYGEIDGSLTLRDLEQINEKIKKVDSSQILNDNGSHKSPLKRFEVQFLNKDLIPKNKGSVIQFHPQEIFASSELVKLLSETKIYKYLLLKPARSFRLLTSNEEWIKVPESRADIFNNKNLSLASKRIVMRFMKFVSNIADEQNQNLVKEWESKPFYKFLEEVFQLSGAIEESIIYGLCQSLSKDIPTKDALDTVLKYFHSFGMYGDYSYLLAMYGTGSELCQGFCRSSAVMGGTFMLGQAIDKIDESKIVLKDGSTLSAKKIVSSVDEGKLPHQQIQQRYLLVKGDCQQLFQEDGFFAALDASLIHFSPFSISENFGNSVQAKLYGSGSGDCPEGYCIWYLKTLNDSPCNEVFNLATKKLCSFSGCDDLEIIVQVDETLNQLRHIDYDDTLHSAKSLFYEILGQNNTFLQREGLFDEDDE

SEQ ID NO: 20331 - protein, 490 aa, Neurospora crassa
MAMGSIGDTLWDVVICGTGLQQSLLALSLSRSGKNILHIDPNDYYGGAEAAFSLQEAESWVDRLATEDKGLFRSASITKPDVVGLSFPRAYSLALAPQLIHARSELLSQLVSSRAYRQVEFLAVGSFYIFKAPVGPEQQPSLVRIPSTREDVFSTTAISAKAKRGLMKFLRFVLDYDSPEQRDAWKPFADKPLVDFLQEHFKMDTELKTYIITLTLSLDGRITTEDGLFIVHRHLTSMGHFGPGFAALYPKWGGISEIAQVACRAGAVGGAVYMLGAGIKSMETATDEIELELTSGDKVKTKLLVRGDESVGDEPSISRLVAVVDSPLKTLFESTVDGAPTPCVAVVALPPGSLTTPGEANTDPVYVFAHSSGTGECPNGQSVLYLSTMVTPNSKEILSRSLESLLSAVDPDRVPQCLYQLYYEQAAGVKQSRLDGLILDLPGPSLSLLMDDASLNHVREAWKKVVGGAVDDAEYMVFTDREPVDDDDYE

SEQ ID NO: 20332 - protein, 510 aa, Caenorhabditis elegans
MDEKLPESVDVVVLGTGLPEAILASACARAGLSVLHLDRNEYYGGDWSSFTMSMVHEVTENQVKKLDSSEISKLSELLTENEQLIELGNREIVENIEMTWIPRGKDEEKPMKTQLEEASQMRRFSIDLVPKILLSKGAMVQTLCDSQVSHYAEFKLVNRQLCPTETPEAGITLNPVPCSKGEIFQSNALSILEKRALMKFITFCTQWSTKDTEEGRKLLAEHADRPFSEFLEQMGVGKTLQSFIINTIGILQQRPTAMTGMLASCQFMDSVGHFGPSPFLFPLYGCGELSQCFCRLAAVFGSLYCLGRPVQAIVKKDGKITAVIANGDRVNCRYIVMSPRFVPETVPASSTLKIERIVYATDKSIKEAEKEQLTLLNLASLRPDAAVSRLVEVGFEACTAPKGHFLVHATGTQEGETSVKTIAEKIFEKNEVEPYWKMSFTANSMKFDTAGAENVVVAPPVDANLHYASVVEECRQLFCTTWPELDFLPRAMKKEEEEEEEPETEEIAEN

SEQ ID NO: 20333 - protein, 511 aa, Drosophila melanogaster
MLDDLPEQFDLVVIGTGFTESCIAAAGSRIGKSVLHLDSNEYYGDVWSSFSMDALCARLDQEVEPHSALRNARYTWHSMEKESETDAQSWNRDSVLAKSRRFSLDLCPRILYAAGELVQLLIKSNICRYAEFRAVDHVCMRHNGEIVSVPCSRSDVFNTKTLTIVEKRLLMKFLTACNDYGEDKCNEDSLEFRGRTFLEYLQAQRVTEKISSCVMQAIAMCGPSTSFEEGMQRTQRFLGSLGRYGNTPFLFPMYGCGELPQCFCRLCAVYGGIYCLKRAVDDIALDSNSNEFLLSSAGKTLRAKNVVSAPGYTPVSKGIELKPHISRGLFISSSPLGNEELNKGGGGVNLLRLLDNEGGREAFLIQLSHYTGACPEGLYIFHLTTPALSEDPASDLAIFTSQLFDQSDAQIIFSSYFTIAAQSSKSPAAEHIYYTDPPTYELDYDAAIANARDIFGKMFPDADFLPRAPDPEEIVVDGEDPSALNEHTLPEDLRAQLHDMQQATQEMDIQE

SEQ ID NO: 20334 - protein, 511 aa, Drosophila melanogaster
MLDDLPEQFDLVVIGTGFTESCIAAAGSRIGKSVLHLDSNEYYGDVWSSFSMDALCARLDQEVEPHSALRNARYTWHSMEKESETDAQSWNRDSVLAKSRRFSLDLCPRILYAAGELVQLLIKSNICRYAEFRAVDHVCMRHNGEIVSVPCSRSDVFNTKTLTIVEKRLLMKFLTACNDYGEDKCNEDSLEFRGRTFLEYLQAQRVTEKISSCVMQAIAMCGPSTSFEEGMQRTQRFLGSLGRYGNTPFLFPMYGCGELPQCFCRLCAVYGGIYCLKRAVDDIALDSNSNEFLLSSAGKTLRAKNVVSAPGYTPVSKGIELKPHISRGLFISSSPLGNEELNKGGGGVNLLRLLDDEGGREAFLIQLSHYTGACPEGLYIFHLTTPALSEDPVSDLAIFTSQLFDQSDAQIIFSSYFTIAAQSSKSPAAEHIYYTDPPTYELDYDAAIANARDIFGKMFPDADFLPRAPDPEEIVVDGEDPSALNEHTLPEDLRAQLHDMQQATQEMDIQE

SEQ ID NO: 20335 - protein, 653 aa, Homo sapiens
MADTLPSEFDVIVIGTGLPESIIAAACSRSGRRVLHVDSRSYYGGNWASFSFSGLLSWLKEYQENSDIVSDSPVWQDQILENEEAIALSRKDKTIQHVEVFCYASQDLHEDVEEAGALQKNHALVTSANSTEAADSAFLPTEDESLSTMSCEMLTEQTPSSDPENALEVNGAEVTGEKENHCDDKTCVPSTSAEDMSENVPIAEDTTEQPKKNRITYSQIIKEGRRFNIDLVSKLLYSRGLLIDLLIKSNVSRYAEFKNITRILAFREGRVEQVPCSRADVFNSKQLTMVEKRMLMKFLTFCMEYEKYPDEYKGYEEITFYEYLKTQKLTPNLQYIVMHSIAMTSETASSTIDGLKATKNFLHCLGRYGNTPFLFPLYGQGELPQCFCRMCAVFGGIYCLRHSVQCLVVDKESRKCKAIIDQFGQRIISEHFLVEDSYFPENMCSRVQYRQISRAVLITDRSVLKTDSDQQISILTVPAEEPGTFAVRVIELCSSTMTCMKGTYLVHLTCTSSKTAREDLESVVQKLFVPYTEMEIENEQVEKPRILWALYFNMRDSSDISRSCYNDLPSNVYVCSGPDCGLGNDNAVKQAETLFQEICPNEDFCPPPPNPEDIILDGDSLQPEASESSAIPEANSETFKESTNLGNLEESSE

SEQ ID NO: 20336 - protein, 653 aa, Homo sapiens
MADTLPSEFDVIVIGTGLPESIIAAACSRSGRRVLHVDSRSYYGGNWASFSFSGLLSWLKEYQENSDIVSDSPVWQDQILENEEAIALSRKDKTIQHVEVFCYASQDLHEDVEEAGALQKNHALVTSANSTEAADSAFLPTEDESLSTMSCEMLTEQTPSSDPENALEVNGAEVTGEKENHCDDKTCVPSTSAEDMSENVPIAEDTTEQPKKNRIAYAQIIKEGRRFNIDLVSKLLYSRGLLIDLLIKSNVSRYAEFKNITRILAFREGRVEQVPCSRADVFNSKQLTMVEKRMLMKFLTFCMEYEKYPDEYKGYEEITFYEYLKTQKLTPNLQYIVMHSIAMTSETASSTIDGLKATKNFLHCLGRYGNTPFLFPLYGQGELPQCFCRMCAVFGGIYCLRHSVQCLVVDKESRKCKAIIDQFGQRIISEHFLVEDSYFPENMCSRVQYRQISRAVLITDRSVLKTDSDQQISILTVPAEEPGTFAVRVIELCSSTMTCMKGTYLVHLTCTSSKTAREDLESVVQKLFVPYTEMEIENEQVEKPRILWALYFNMRDSSDISRSCYNDLPSNVYVCSGPDCGLGNDNAVKQAETLFQEICPNEDFCPPPPNPEDIILDGDSLQPEASESSAIPEANSETFKESTNLGNLEESSE

SEQ ID NO: 20337 - protein, 109 aa, Homo sapiens
RKSDIYVCMISYAHNVAAQVKYIAIASTTVETTDPEKEVEPALELLEPIDQKFVAISDLYEPIDDGCESQVFCSCSYDATTQFETTCNGIKDIYKRMAGTAFDFENMKR

SEQ ID NO: 20338 - protein, 242 aa, Rattus norvegicus
MTEKDEQPQLEEGEDELDSKLNYKPPPQKSLKELQEMDKDDESLTKYKKTLLGDVPVVSGMASTETCIAVDHSQEQRASRLDPTVPNVTVTRLSLVCDSAPGPITMDLTGDLKALKKDTFVLKEGPTANESVSSLTCLYRHDHSEKVTDRPLRAQVNKDIVSGLKYVQQTYRNGMKVDKATFMVGSYGPRPEEYEFLTPVEEAPKGMLARGTYHNKSFFTDDDKQDHLTWEWNLAIKKDWTD

SEQ ID NO: 20339 - protein, 98 aa, Cavia
LTLVCSTAPGPLELDLTGDLESFKKQSFVLKEGVEYRIKISFRVNREIVSGMKYIQHTYRKGVKIDKTDYMVGSYGPRAEEYEFLTPMEEAPKGMLAR

SEQ ID NO: 20340 - protein, 201 aa, Anopheles gambiae str. PEST
AMSTEKEMNPAEVEQEEHDSNYQPPPQKTIEEIMAADAEDESLRKYKEALLGEAQAEKIIFDESDPRKVIVKKLALLVADRDPMELDLTGDLTKLKKNVFVIKEGIQYKIRIDFVVQREIVHGLKYVQKTYRMGVPVDKMVQMVGSYPPKKEIQSYTTPFEEAPSGMMARGTYSVTSLFTDDDKNEHLKWDWSFEIKKDWQ

SEQ ID NO: 20341 - protein, 201 aa, Giardia lamblia ATCC 50803
MSTLTSHTVMCSEVAEMTETQASGGSTKQASSPIPIGAPISAEEAAKLWDESLCPELPPIAPGAGKVSICDLRILSPDLMEPLVYSTSSITPEHTQKPLYTIKQGCLFSMGFSWRVSEAPIVGFRSLVRIYRLGIPVYKGRVFLGTFLPRSEPYIYFMSEECAPKGILAKGYFRAKLEFVDEHNTSFGSLEYLFNFSDNWG

SEQ ID NO: 20342 - protein, 240 aa, Arabidopsis thaliana
MSLVSGARDMGFDDNNNNKNNKDGDDENSSSRTRADDDALSRQMSESSLCATEEEEDDDSKLQLGPQYTIKEHLEKDKDDESLRKWKEQLLGSVDVTNIGETLDPEVRIDSLAIISPGRPDIVLLVPENGNPKGMWFTLKEGSKYNLKFTFHVNNNIVSGLRYTNTVWKTGVKVDRAKEMLGTFSPQLEPYNHVMPEETTPSGMFARGSYSARTKFLDDDNKCYLEINYSFDIRKEWPAL

SEQ ID NO: 20343 - protein, 223 aa, Arabidopsis thaliana
MVLEDEMKKGEASGETSEKMGLSRKNSGSSLSPTEDDEEDEDKKLELGPMIALKEQLERDKDDESLRRWKEQLLGVVDLEDVGETPDPVVKILDLTIRSPDREEMVLTIPEDGLPNPKGPWFTIKEGSKYTLVFNFRVTNNIVSGLRYNNTVWKTGVKVDSTKAMLGTFSPQAESYQHVMPEEMTPSGMFARGSYSARTKFIDDDNKCYLEINYTFDIRKSWQ

SEQ ID NO: 20344 - protein, 236 aa, Arabidopsis thaliana
MVLEDEMKKGEASGETSEKMGLSRKNSGSSLSPTEDDEEDEDKKLELGPMIALKEQLERDKDDESLRRWKEQLLGVVDLEDVGGKPNSLLDLDSMVQTPDPVVKILDLTIRSPDREEMVLTIPEDGLPNPKGPWFTIKEGSKYTLVFNFRVTNNIVSGLRYNNTVWKTGVKVDSTKAMLGTFSPQAESYQHVMPEEMTPSGMFARGSYSARTKFIDDDNKCYLEINYTFDIRKSWQ

SEQ ID NO: 20345 - protein, 223 aa, Arabidopsis thaliana
MVLNDEEMKAGESSEEPKGQGLSRKNSHSSMCPTDDDEEEEDKKLELGPMIALKEQLEKDKDDESLRRWKEQLLGSVDLEEVGETPDPLVKILTLTIRSPDREDMVLTIPENGKPASKGPWFTLKEGSKYTLIFTFRVTNNIVSGLQYSNTVWKTGIKVYSRKEMLGTFSPQAEPYTHVMFEETAPSGLLVRGSYSVKSKFVDDDNQCYLENNYTFDIRKNWL

SEQ ID NO: 20346 - protein, 237 aa, Glycine max
MSAAVSATKDVPFNAHLEEDIKNKESNKVVNVGEADQIPYNDDAEGTEEAEEDPKLGLDLGPQCSLKEQLEKDKEDESLRKWKEQLLGGIDVSAVGENKEPEVKIVSLTIICPGRPDLILPIPFTSDAKKSIFTLKEGSQYQLKFSFTVSNNIVSGLKYTNVVWKTGLRVDNTKKMLGTYSPSQELYTYELEEETTPSGLFARGTYSARTKFVDDDRKCYLDTSYHFEIQKNWPTPI

SEQ ID NO: 20347 - protein, 243 aa, Glycine max
  unsure (1)..(243): unsure at all Xaa locations
MSAAVSSTTPHLEEELKNKATNNKKKNNVGGESDQPPYNDGANSDVAEETEPEEDDDSNNKDLDLGPQFTLKEQLEKDKDDESLRKWKEQLLGSVDMSVVGSECKDPEVKILSLIITSPDKPDLTLPIPFTTDPKKSLFILKEGSKCQMKFTFTVSNNIVSGLKYTNVVWKTGVRVDSRKKMLGTFSPQQEPYTFELEEETIPSGMFVRGTYAARTKFVDDDRKCYLDVNYYFEIQKNRPTPX

SEQ ID NO: 20348 - protein, 240 aa, Glycine max
MSAAVSSTTSHLEEELKNNNNNNNNVGGESDQPPYNEGANSDVAEETEPEEDDDSNNKELDLGPQFTLKEQLEKDKDDVSLRKWKEQLLGSVDMSVVGSESKDPEVKILSLIITSPDKPDLTLPIPFTTDAKKSLFILKEGSKCQMKFTFTVSNNIVSGLKYTNVVWKTGVRVDSRKKMLGTFSPKQEPYTFELEEETIPSGMFVRGTYAARTKFVDDDRKCYLDVSYYFEIQKNRPTPQ

SEQ ID NO: 20349 - protein, 233 aa, Glycine max
MESGGNGKRAHEEAGPSSGIDGRKLEMTEKASDDDKEEEEEEEEEEEGAIEDSKNGFFVPGPLLSLKEQIERDKEDESLRRWKEKLLGCLESDIDGQLDPEVKFHSIGILSEDFGEIVTPLPVDENRNGCTLFTLREGSRYQLKLKFSVLHNIVSGLTYSNTVWKGGLQVDQSKGMLGAFAPQKEPYVYALKEDTTPSGALARGVYSAKLKFEDDDRRCHMELKYLFEIKKRS

SEQ ID NO: 20350 - protein, 156 aa, Glycine max
  unsure (1)..(156): unsure at all Xaa locations
XLAIKSADRPDIVLAIPEGGNPKGLWFTLKEGSRYRLMFTFQVENXHQVSGLKYTNTVWKTGIKVDSSKEMIGTFSPQAEPYTHEMPEETTPSGMFARGQYSARSKFVDDDNKCYLEINYTFDIRKEWQXESTDLSLSDMFNPKSLLFCAEISFSV

SEQ ID NO: 20351 - protein, 254 aa, Glycine max
  unsure (1)..(254): unsure at all Xaa locations
MEGANWRITDEEAGPSSSSGIASTKQQNPPETFHHRKEAEEEEETEEEEEEDVCQHKNITFVPGPLLSLKDQIEKDKEDESLRRWKEKLLGCMESELDGQIHPEVEFHSIDIISEYFGEVITSFSVDEXWQGAHILFTLREGSHYRLWLKFSVLHNIVSGLTYCNTVWKGGLQVDQSKGMLGTFAPQKEPYVHALKEDITPSGVLARGVYSAKIKFEDDDRRCHMELKYSLEIKKRXSGFMAHCDIHHASFLYF

SEQ ID NO: 20352 - protein, 137 aa, Glycine max
  unsure (1)..(137): unsure at all Xaa locations
XCTSENKEPEVKIVSLTIICPGRPDLILPIPFTSESKNSIFTLKEGSQYRLKFSFTVSNNIVSGLKYTNVVWKTGLRVDNTKKMLGTYSPSQEPYTYELEEETTPSGLFARGTYSARTKFVDDDHKCYXDTSYHFEX

SEQ ID NO: 20353 - protein, 161 aa, Glycine max
  unsure (1)..(161): unsure at all Xaa locations
XLAIKSADRPDIVLAIPEGGNPKGLWFTLKEGSREXGHQVSGLKYTNSVWKQGIKVDSRKEFQRTFKXQDEPYTQPPSKETTPFGMFARGQYSARSKFVDDDNKCYLEINYTFDIRKEWQXESTDLSLSDMFNLKSLLFCAEISFSVYLLLFHYLIISNPV

SEQ ID NO: 20354 - protein, 122 aa, Glycine max
  unsure (1)..(122): unsure at all Xaa locations
XFTTDAKKSFFXLKEGRKSQMKFTFPVSNTIVFGLKSPNVVWKPGVRVAPRKKMLGPFTPTQDPXYPFELEEEPIPFGMFVRGPYAPRPKFVDHDXKCYLDLSYSFEIQKTSPPPSMRFKLE

SEQ ID NO: 20355 - protein, 162 aa, Glycine max
  unsure (1)..(162): unsure at all Xaa locations
MSAAVCSTTPHLEEELKNKATYNKKKNNVGGESDQPPYNDGANSDVAEETEPEEDDDSNNKDLDLGPQFTLKEQLEKDRNXXKDPEVKILSLIITSPDEPDLTLPIPCTTDAXKRSFMLKEGSKWQMKCTLTVCTNIGSGLKYTXVGWKTGVRVDSRKKMLG

SEQ ID NO: 20356 - protein, 71 aa, Glycine max
  unsure (1)..(71): unsure at all Xaa locations
XLTIISPDRDDIVLPIPENENPKGLWFTTKEGSHYRLKFTFNVSNNIVFGLNKNGNIPNLHLHYDKSKXLI

SEQ ID NO: 20357 - protein, 226 aa, Nicotiana tabacum
MMEGGNNKEEAGPSRGLNFSEDKRKEELEEGDSEEDEHNQDSATDIITTSYVPGPLLSLKDQIEKDKEDESLRRWKEKLLGCLESDLNGQMEPEVKFHSVGILSSDFEEINTPLPVKEGQSKSVLFTLREGSEYRLKLTFSVLHNIVSGLAYTNTVWKAGLQVDQSKGMLGTFAPQREPYIHMLEEETTPSGALARGTYTAKLKFVDDDKRCHLVLNYSFEISKGR

SEQ ID NO: 20358 - protein, 248 aa, Oryza sativa
  unsure (1)..(248): unsure at all Xaa locations
HLLFQGHRGPADGGGDEGAGGGGGQERRRGARRRRRDDEXGKQCGEAPHCRKESNEEEEDDEEKAPKAIDLGPRVSIKDQLEKDKDDESLRRWKEQLLGSVDLNSVGETLEPDVKIMSLAILSPGRPDIFLPLPVEPNAKGVWFTLKEGSLYKLKFTFSVSNNIVSGLRYTNAVWKTGIKVDSHKEMLGTFSPQPEPYTYVTPEETTPSGMFARGSYSARTKFLDDDRKCYLEINYTFDIRREWPALS

SEQ ID NO: 20359 - protein, 222 aa, Oryza sativa
  unsure (1)..(222): unsure at all Xaa locations
XSCSKGIAAPPTEEATKERVAVVGKNGGESNEEEEDDEEKAPKAIDLGPRVSIKDQLEKDKDDESLRRWKEQLLGSVDLNSVGETLEPDVKIMSLAILSPGRPDIFLPLPVEPNAKGVWFTLKEGSLYKLKFTFSVSNNIVSGLRYTNAVWKTGIKVDSHKEMLGTFSPQPEPYTYVTPEETTPSGMFARGSYSARTKFLDDDRKCYLEINYTFDIRREWPA

SEQ ID NO: 20360 - protein, 166 aa, Triticum aestivum
  unsure (1)..(166): unsure at all Xaa locations
XKDDESLRRWKEQLLGSVDLNSVGETLEPDVKIMSLSIQSPGRPDIFLPLPVEPXSGKGVWFTLKEGSPYKLKFTFSVSNNIVSGLRYTNTVWKTGIKVDSTKEMLGTFSPQPEPYAYVTPEETTPSGMFARGSYSAKTKFLDDDRKCYLQINYTFDIRREWPSSG

SEQ ID NO: 20361 - protein, 202 aa, Saccharomyces cerevisiae
MAEESTDFSQFEEERNNDQYKVSAKKTVDEYKNLDAEDESLAKWKESLGLSSDVLPLEFPGDKRKVVVQKIQLLVNTEPNPITFDLTNEKTIKELASKRYKIKENSIYKLKIVFKVQHEIITGLRYVQYIKKAGIAVDKIDDHLGSYAPNTKTKPFYEVELPESEAPSGFLARGNYSAVSKFIDDDKTNHLTLNWGVEIVKK

SEQ ID NO: 20362 - protein, 161 aa, Neurospora crassa
MPLESLGLGGGNDLSDPNDPRVCIIHSLSMESPGREPVVIDLSTPGSLEDLKKKPFTIKEGAKFTMKAQFKVQHEILSGLHYVQTVKRGKIRIPGGKTSEMIGSYAPNTDKNPMYTKTFAEEEAPTGMLARGNYNAVSRFVDDDGKTHLEFEWSFDIAKDW

SEQ ID NO: 20363 - protein, 148 aa, Neurospora crassa
MSDPNDPRVCIIHSLSMESPGREPVVIDLSTPGSLEDLKKKPFTIKEGAKFTMKAQFKVQHEILSGLHYVQTVKRGKIRIPGGKTSEMIGSYAPNTDKNPMYTKTFAEEEAPTGMLARGNYNAVSRFVDDDGKTHLEFEWSFDIAKDW

SEQ ID NO: 20364 - protein, 168 aa, Entamoeba histolytica
KNEKDPSLVAYLKSLGIDPDYVPPKDDPRRVVISEFAVLFKEHDPVILKLNTEEDMEKAKKTPIIIKEGAEFKMRVTFRVQHQPVLGLRILNTVSKLGKQVASDEEMLGSYPPKNEFNALELPKNDWNEAPTGMLARGEYKSNVKFYDDDKVTHLQFDYLIKIAKDWD

SEQ ID NO: 20365 - protein, 191 aa, Caenorhabditis elegans
MSDHENTGENTSEYQYKQPPQKSIDELLNADKEDESLKVYKAKLLGQGTVIVDEKNPLRVIVRSVELLINGKTAQSFDLSDPAKLVNSDLSVSIKEGSNYRLSFAFHVQREITSGLHYKHKVKRSGITVENEKYMMGSYAPKLEIQEYKSPNEEAPSGMMHRGKYKVYSKITDDDNNVYLDWQWTLHITKE

SEQ ID NO: 20366 - protein, 191 aa, Caenorhabditis elegans
MLDHENTGENTSEYQYKQPPQKSIDELLNADKEDESLKVYKAKLLGQGTVIVDEKNPLRVIVRSVELLINGKTAQSFDLSDPAKLVNSDLSVSIKEGSNYRLSFAFHVQREITSGLHYKHKVKRSGITVENEKYMMGSYAPKLEIQEYKSPNEEAPSGMMHRGKYKVYSKITDDDNNVYLDWQWTLHITKE

SEQ ID NO: 20367 - protein, 203 aa, Pinus taeda
MAAVRGQVLVALGACLALAVLQSVAATTYAVGGNTGWTIPASNAKLYTDWVKARTFKLGDILVFKFATNVHNVYRVSKADYDKCVTTSPLEKYETGPASITLNTTGHHYYICAVSGHCAAGQKVSIKVSTAAAPGSSPSPAPVSSPATSASSPAPGSSTSSATPNSSASAPGASNSKSGASHSVSSDAAIFMAILSGFATLFL

SEQ ID NO: 20368 - protein, 121 aa, Spinacia oleracea
MGQGRGSARSALVVGLAILCLLAIVQPTLAAVYNIGWSFNVNGARGKSFRAGDVLVFKYIKGQHNVVAVNGRGYASCSAPRGARTYSSGQDRIKLTRGQNYFICSFPGHCGGGMKIAINAK

SEQ ID NO: 20369 - protein, 91 aa, Spinacia oleracea
AVYNIGWSFNVNGARGKSFRAGDVLVFKYIKGQHNVVAVNGRGYASCSAPRGARTYSSGQDRIKLTRGQNYFICSFPGHCGGGMKIAINAK

SEQ ID NO: 20370 - protein, 96 aa, Cucumis sativus
AVYVVGGSGGWTFNTESWPKGKRFRAGDILLFNYNPSMHNVVVVNQGGFSTCNTPAGAKVYTSGRDQIKLPKGQSYFICNFPGHCQSGMKIAVNAL

SEQ ID NO: 20371 - protein, 96 aa, Cucumis sativus
  unsure (1)..(96): unsure at all Xaa locations
AVYVVGGSGGWTFNTESWPKGKRFRAGDILLFNYNPXMHNVVVVNQGGFSTCNTPAGAKVYTSGRDQIKLPKGQSYFICNFPGHCQSGMKIAVNAL

SEQ ID NO: 20372 - protein, 108 aa, Cucurbita pepo
ATVHKVGDSTGWTTLVPYDYAKWASSNKFHVGDSLLFNYNNKFHNVLQVDQEQFKSCNSSSPAASYTSGADSIPLKRPGTFYFLCGIPGHCQLGQKVEIKVDPGSSSA

SEQ ID NO: 20373 - protein, 117 aa, Medicago sativa subsp. X varia
MNMVTVISLLGLLFLAKSTNAETYTVGGPKGWTFGIKKWPNGKSFVAGDVLDFGYNPKMHNVVLVDQTGYDKCKTPEGSKVFRTGSDQIELVKGDNYFICNLPGHCQSGMKIYINAA

SEQ ID NO: 20374 - protein, 129 aa, Arabidopsis thaliana
MAKGRGSASWSARAIVTLMAVSVLLLQADYVQAATYTVGDSGIWTFNAVGWPKGKHFRAGDVLVFNYNPRMHNVVKVDSGSYNNCKTPTGAKPYTSGKDRITLSKGQNFFICNFPNHCESDMKIAVTAV

SEQ ID NO: 20375 - protein, 129 aa, Arabidopsis thaliana
  unsure (1)..(129): unsure at all Xaa locations
MAKGRGSASWSARAIVTLMAVSVLLLQADYVQAATYTVGDSGIWTFNAVGWPKGKHFRAGDVLVFNYNPRMHNVVXVDSGSYNNCKTPTGAKPYTSGKDRITLSKGQNFFICNFPNHCESDMKIAVTAV

SEQ ID NO: 20376 - protein, 125 aa, Glycine max
  unsure (1)..(125): unsure at all Xaa locations
MAQGSGSAXXAVLVLVLLCVLLHGDFAESKVYTVGDRAGWALSSGGWPRGKRFRAGDVLLFRYGRGAHNVVAVSAAAYKSCSAARGGRTYNSGSDRVTLSRGTNYFICSVPGHCQAGMKMAVTAA

SEQ ID NO: 20377 - protein, 189 aa, Pisum sativum
MAFSNALVLCFLLAIINMALPSLATVYTVGDTSGWVIGGDYSTWASDKTFAVGDSLVFNYGAGAHTVDEVKESDYKSCTSGNSISTDSTGATTIPLKKAGKHYFICGVPGHSTGGMKLSIKVKASSGSSAAPSATPSSSGKGSPSSDDTPAATTTTTTPTKQNESSATSLSPIVALFFTVSWICSYVLV

SEQ ID NO: 20378 - protein, 129 aa, Oryza sativa (japonica cultivar-group)
MAQGRGSAAGRRNAAVLAMVLLCVLLHGELAESAVYTVGDRGGWGFNSGGWLRGKRFRAGDVLVFKYSPSAHNVVAVNAAGYKSCSAPRGAKVYKSGSDRVTLARGTNYFICSFPGHCQAGMKIAVTAA

SEQ ID NO: 20379 - protein, 107 aa, Rhus vernicifera
TVYTVGDSAGWKVPFFGDVDYDWKWASNKTFHIGDVLVFKYDRRFHNVDKVTQKNYQSCNDTTPIASYNTGBBRINLKTVGQKYYICGVPKHCDLGQKVHINVTVRS

SEQ ID NO: 20380 - protein, 122 aa, Lycopersicon esculentum
MFGVSKSTIIVIVMILCILLQSNISNAATYPAGDGKGWGFNMNGWPNGKTFNAGDVIEFKYKVDEHNVVKVSQEEYDSCKTSGGQVFNSGDDQIPLEKGTSYFICTFGPHCSEGVKAAITAN

SEQ ID NO: 20381 - protein, 123 aa, Nicotiana alata
MSGKQGSAILWVIFMVLFTIQITNAAIYNVGDGNGWTFGVSNWPNGKNFKAGDVLVFKYPKGVHNVVIVNKANYGTCNASGRTLSSGNDRVTLGKGTYYFICGIPGHCNGGQKISVTAKLTNK

SEQ ID NO: 20382 - protein, 184 aa, Nicotiana tabacum
MDMIMRMVLFGALALASLVQLTTAQTAHVVGDNEGWTIPSSGASAYTNWAAGKTFMVGDTLVFNFMTNTHDVLQVPKASFDGCSSQNAIGSAIVSGPANVTLDSAGERYYICTFGRHCQNGQKLAITVSSSTGTPGANPPTSFAAGPSGSVPGGIAPPPPPSSSTTVFASFLLGLSSIALAIFL

SEQ ID NO: 20383 - protein, 129 aa, Oryza sativa; identical to SEQ ID NO: 20378

SEQ ID NO: 20384 - protein, 125 aa, Triticum aestivum
  unsure (1)..(125): unsure at all Xaa locations
MAQGSGSAXXAVLALVLLCLLLHGDFAESKVYTVGDRNGWALSSGGWPRGKRFRAGDVLLFRYGRGAHNVVAVSAAGYRSCSAARGGRTYNSGSDRVTLARGTNYFICSVPGHCQAGMKMAVTAA

SEQ ID NO: 20385 - protein, 125 aa, Triticum aestivum
  unsure (1)..(125): unsure at all Xaa locations
MAQGSGGAXXAVLALLLLCVLLHGDFAESKVYTVGDRAGWALSSGGWPRGKRFRAGDVLLFKYGRGAHNVVAVNAAGYKSCSAARGGRTYNSGSDRVTLARGTNYFICSVPGHCQAGMKMAVTAA

SEQ ID NO: 20386 - protein, 150 aa, Triticum aestivum
  unsure (1)..(150): unsure at all Xaa locations
RTHALLPVFTPSAPAPPFPSSSAASHGAGKRRRDXAVLALLLLCVLLHGDFAESKVYTVGDRAGWALSSGGWPRGKRFRAGDVLLFRYGRGAHNVVAVSAAAYKSCSAARGGRTYNSGSDRVTLSRGTNYFICSVPGHCQAGMKMAVTAA

SEQ ID NO: 20387 - protein, 126 aa, Triticum aestivum
LAMAARGGGSANVAVLLAVLLLCTLVAEAAVFNVGDRGGWSFNTNSWPTGKRFKAGDVLVFKYDATAHDVVAVSAAGYKACAKPANGAKVYKSGADRVTLARGTNYFICSIPGHCQSGMKIAVTAA

SEQ ID NO: 20388 - protein, 158 aa, Triticum aestivum
  unsure (1)..(158): unsure at all Xaa locations
HPLTFLLSTCLSPRTCYVSSRTCLVGRSLLSXLAMAAQGRGSANVAVVLGVLLLCTLVAEAAVFNVGDRGGWSFNTNSWPTGKRFKAGDVLVFKYDATAHDVVAVSAAGYKACAKPAKGAKVYKSGADRVTLARGTNYFICSIPGHCQSGMKIAVTAA

SEQ ID NO: 20389 - protein, 127 aa, Triticum aestivum
  unsure (1)..(127): unsure at all Xaa locations
MAAQGRGSAAXXVVGVLLGGVLLSAAVAEAAVFNVGDRGGWSFNTNSWPTGKRFKAGDVLVFKYDATAHDVVAVSAAGYRACAKPAKGAKVYKSGADRVTLARGTNYFICSIPGHCQSGMKIAVTAA

SEQ ID NO: 20390 - protein, 165 aa, Brassica oleracea
MARFTVLIAAPVLAFLVAAPVPEVTAKKYLVGDKKFWNPDINYDTWVQGKHFYLGDWLYFVYYRDQHNILEVNKTDYEGCISDHPIRNYTRGGGRDIVPLNVTKQYYLLDGRGGCFKGMKLTVTVEKLPPPPKSAPVKNIRSVSITRVSKHQLVVILFCCDIHFP

SEQ ID NO: 20391 - protein, 122 aa, Cicer arietinum
MALGRGSALVVLLVCFLVIHSELAQAAIYTVGGAGGWTFNTIAWPNGKNFKAGDTLVFNYSPGAHNVVAVSKAGYGSCKTPRGAKVYRSGKDQIRLARGQNYFICNYVGHCESGMKIAINAV

SEQ ID NO: 20392 - protein, 131 aa, Oryza sativa (japonica cultivar-group)
MARGRGSAMRGAVAVAFLAVVVSCIFLSGCGVADAATYYVGDSLGWSLGSGSWPSGKKFHAGDILVFRYLPWMHNVVAVDEDGYADCNPPPFSRYYTSGSDSVRLARGDNFFVCTRYGHCNLGMKMVVTAV

SEQ ID NO: 20393 - protein, 332 aa, Lycopersicon esculentum
MARKLSSLVVFGSILFALLQHVAMAQQTHVVGDTLGWTVPNGGAASYSTWAAGKSFVVGDILVFNFRSGSHSVAEVSKGAFDSCNTSSPISISTNGPTNITLSSAGSHYYLCTFPSHCTLGQKLAINVSGSASPAPQPAPATPPTATPVMAPAPSVSVAPATAPSPASVAQTYIVGDNLGWSVPTSGPNSYQRWANNKSFKVGDTLVFNFVNGTHNVAMVSKASYDSCNTTSPINTISNGPARIRLTNSGEHYYMCTFPRHCSLGQKLAINVTGSDVTAPTPSTAATPSSPTVPSSDSPVNSPPAPSASAPSLVLATLPLTFLSFALVRLLN

SEQ ID NO: 20394 - protein, 131 aa, Oryza sativa; identical to SEQ ID NO: 20392

SEQ ID NO: 20395 - protein, 127 aa, Triticum aestivum
MAGGRGGASRVAVAAAAALAVACCCMGVASAATYYVGDGGGWSLSSGSWPNGKQFRAGDVLVFRYNPLIHNVVAVGEDGYNGCTTPAGSRTYESGNDAVRLVRGDNRFMCTRLYHCNFGMKMVVNAA

SEQ ID NO: 20396 - protein, 65 aa, Arabidopsis thaliana
FNYNPRMHNVVKVDSGSYNNCKTPTGAKPYTSGKDRITLSKGQNFFICNFPNHCESDMKIAVTAV

SEQ ID NO: 20397 - protein, 140 aa, Arabidopsis thaliana
MAQSSGHVSYVAVTVPIAIVMTVLCLFLANAVTYARRPTTYIVGGDDGWDPVVPMDTWARGKTFYAGDILEFKYDYQRFNLIVVNRTGYETCEANVGAIEYSSGDDKIQLNYGYNYFIGTYTPEDCTTGLKMAIKALAPR

SEQ ID NO: 20398 - protein, 119 aa, Zea mays
  unsure (1)..(119): unsure at all Xaa locations
LCNXNVTVISLLCLLVLVEHAHATTYTVGGPGGWTFNTNTWPNGKKFRAGXXLIFNYDSTTHNVVXXXRSGYNSCKTPAGAKVFSSGKDQIRLARGLNYFICNNAGHCESGMKVAINAV

SEQ ID NO: 20399 - protein, 195 aa, Oryza sativa (japonica cultivar-group)
MVTKKQQAALLAVVAVAALAQVAAAAVHPVGGNGAWDTTGNYNAWSVSQKFSQGDSILFTYPSSHDVVEVPKASYDACSPANALASYTGGSTTVKLDAPGKHYFICGVPGHCAAGMKLEVTVAAATATKPRHKKGAAPAAAPAMPPAVSSPTEEMPAVTSPTGSPAPSSASAASTIAINVAATLAAGMALAFLAM

SEQ ID NO: 20400 - protein, 182 aa, Cucumis sativus
MAAGSVAFVLGLIAVVFLHPATAQSTVHIVGDNTGWSVPSSPNFYSQWAAGKTFRVGDSLQFNFPANAHNVHEMETKQSFDACNFVNSDNDVERTSPVIERLDELGMHYFVCTVGTHCSNGQKLSINVVAANATVSMPPPSSSPPSSSPPSSVMPPPSPSSSNALMATLYLTFSALLVMAFF

SEQ ID NO: 20401 - protein, 179 aa, Oryza sativa (japonica cultivar-group)
MVCHRMLPLLVVAVALLPAAAVATNYTVGDEKGWNPDVDYTAWVKKHRPFYKGDWLPVFEYQNGRSDVVQVDEVGYDNCDKANAISSYSKGHSYAFQLKEAKDYYFICSYGYCYKGMKLAVTAKKGSASSSSSGSGDSSSSSKSDTASSKSKSSAAASSLANPSYAALLAVAIIFLRML

SEQ ID NO: 20402 - protein, 180 aa, Capsicum annuum
MEKMLCMIVFGALAIASLAQDASAQTVHVVGDNTGWVIPSNGAAAYTNWADRKTFRVGDTLVFNFTTNQHDVLQVQKSSFDGCNSQNAVSGPILGRTSKYNTQLHLEITTIISTFGRHCLNGQKLAIRVSSSTSTPGANPPTSSAAGPSGSVPGGTDAGPSGSVPGGTAPPPPSSSTTRI

SEQ ID NO: 20403 - protein, 165 aa, Oryza sativa
  unsure (1)..(165): unsure at all Xaa locations
MVCHRMLPLLVVAVALLPAAAVATNYTVGDEKGWNPDVDYTAWVKKHRPFYKGDWLLFEYQNGRSDVVQVDEVGYDNCDKANAISSYSKGHSYAFQLKEAKDYYFICSYGYCYKGMKLAVTAKKAPPPSPTXASSKSKSSAAASSLANPSYAALLAVAIIFLRML

SEQ ID NO: 20404 - protein, 201 aa, Triticum aestivum
  unsure (1)..(201): unsure at all Xaa locations
MAANPDREVCHRAGRGGKMLLPVMAVLAAVVLASLPSAAVATNYTVGDEKGWNPKVDYTSWVKKHRPFYKGDWLLFEYQNGRSDVVHVDEVGFDNCDKESAISSHSKGTSYAFQLKEAKDYFFICSYGYCYSGMKLPRPANKGPASSSPDSGSSSSSSPAAKSSSKSAAAPIAARKAAALAAAMLLRLLXSVDLASNSVFH

SEQ ID NO: 20405 - protein, 364 aa, Streptomyces coelicolor A3(2)
MVVSEHETFSAARPSPSKPQERCPMTDSPALPAVNREWHLVTRPVGWPKPEDFALVEAEVPTPGDGQVLVRNLYVSVDPYMRGRMSAAKSYAAPYELGKPMLGGAVGEVVASNAEGIAVGDHVLHFLGWREYAAVDAKSAVKVDPDAAPLSTYLGVLGMTGLTAYAGLLRTASFKEGDSVFVSGAAGAVGSQVGQIAKLKGASRVIGSAGSDEKVKLLLDEYGFDAAFNYKNGPVSEQLRAAAPDGVDVYFDNVGGDHLEAAIGSLNLNGRIAICGAISVYNNTEPAPGPKNLARLIQTRGRIEGFLVGDHYDLQPKFVEEVGPWVRTGELKYRETVVEGIENNLEAFLGVLRGDNTGKMIVKL

SEQ ID NO: 20406 - protein, 329 aa, Mus musculus
MVQAKSWTLKKHFEGFPTDGNFELKTTELPPLNNGEVLLEALFLSVDPYMRVAAKKLKEGDRMMGEQVARVVESKNSAFPKGTIVAALLGWTSHSISDGNGLTKLPVEWPDKLPLSLALGTVGMPGLTAYFGLLDICGVKGGETVMVSAAAGAVGSVVGQIAKLKGCKVVGTAGSDEKVAYLKKLGFDVAFNYKTVKSLEEALRTASPDGYDCYFDNVGGEFSNAVILQMKTFGRIAICGAISQYNRTGPCPQGPAPEVVIYQQLRMEGFIVNRWQGEVRQKALTELMNWVSEGKVQYHEHVTEGFEKMPAAFMGMLKGENLGKTIVKA

SEQ ID NO: 20407 - protein, 329 aa, Mus musculus
MVQAKSWTLKKHFEGFPTDGNFELKTTELPPLNNGEVLLEALFLSVDPYMRVAAKKLKEGDRMMGEQVARVVESKNSAFPKGTIVAALLGWTSHSISDGNGLTKLPVEWPDKLPLSLALGTVGMPGLTAYFGLLDICGVKGGETVMVSAAAGAVGSVVGQIAKLKGCKVVGTAGSDEKVAYLKKLGFDVAFNYKTVKSLEEALRTASPDGYDCYFDNVGGEFSNAVILQMKTFGRIAICGAISQYNRTGPCPQGPAPEVVIYQQLRMEGFIVNRWQGEVRQKALTELMNWVSEGKVQCHEYVTEGFEKMPAAFMGMLKGENLGKTIVKA

SEQ ID NO: 20408 - protein, 351 aa, Mus musculus
MIIQRVVLNSRPGKNGNTVAENFRVEEFSLPDALNEGQVQVRTLYLSVDPYMRCKMNEDTGTDYLAPWQLAQVADGGGIGVVEESKHQKLTKGDFVTSFYWPWQTKAILDGNGLEKVDPQLVDGHLSYFLGAIGMPGLTSLIGVQEKGHISAGSNQTMVVSGAAGACGSLAGQIGHLLGCSRVVGICGTQEKCLFLTSELGFDAAVNYKTGNVAEQLREACPGGVDVYFDNVGGDISNAVISQMNENSHIILCGQISQYSNDVPYPPPLPPAVEAIRKERNITRERFTVLNYKDKFEPGILQLSQWFKEGKLKVKETMAKGLENMGVAFQSMMTGGNVGKQIVCISEDSSL

SEQ ID NO: 20409 - protein, 351 aa, Mus musculus
MIIQRVVLNSRPGKNGNPVAENFRVEEFSLLDALNEGQVQVRTLYLSVDPYMRCKMNEDTGTDYLAPWQLAQVADGGGIGIVEESKHQKLAKGDFVTSFYWPWQTKAILDGNGLEKVDPQLVDGHLSYFLGAIGMPGLTSLIGVQEKGHISAGSNQTMVVSGAAGACGSLAGQIGHLLGCSRVVGICGTQEKCLFLTSELGFDAAVNYKTGNVAEQLREACPGGVDVYFDNVGGDISNTVISQMNENSHIILCGQISQYNKDVPYPPPLPPAVEAIRKERNITRERFTVLNYKDKFEPGILQLSQWFKEGKLKVKETVAKGLENMGVAFQSMMTGGNVGKQIVCISEDSSL

SEQ ID NO: 20410 - protein, 316 aa, Mus musculus
MIIQRVVLNSRPGKNGNPVAENFRVEEFSLPDALNEGQVQVRTLYLSVDPYMRCKMNEDTGTDYLAPWQLAQVADGGGIGVVEESKHQKLTKGDFVTSFYWPWQTKAILDGNGLEKVDPQLVDGHLSYFLGAIGMPGLTSLIGVQEKGHISAGSNQTMVVSGAAGACGSLAGQIGHLLGCSRVVGICGTQEKCLFLTSELGFDAAVNYKTGNVAEQLREACPGGVDVYFDNVGGDISNAVISQMNENSHIILCGQISQYSNDVPYPPPLPPAVEAIRKERNITRERFTVLNYKDKFEPGILQLSQWFKEGKLKFLF

SEQ ID NO: 20411 - protein, 329 aa, Rattus norvegicus
MVQAKTWTLKKHFEGFPTDSNFELRTTELPPLNNGEVLLEALFLSVDPYMRVAAKKLKEGDSMMGEQVARVVESKNSAFPTGTIVVALLGWTSHSISDGNGLRKLPAEWPDKLPLSLALGTVGMPGLTAYFGLLDICGLKGGETVLVNAAAGAVGSVVGQIAKLKGCKVVGTAGSDEKVAYLKKLGFDVAFNYKTVKSLEEALRTASPDGYDCYFDNVGGEFSNTVILQMKTFGRIAICGAISQYNRTGPCPPGPSPEVIIYQQLRMEGFIVTRWQGEVRQKALTDLMNWVSEGKIRYHEYITEGFEKMPAAFMGMLKGDNLGKTIVKA

SEQ ID NO: 20412 - protein, 147 aa, Rattus norvegicus
MPGLTSLIGVQEKGHVSAGSNQTMVVSGAAGACGSLAGQIGHLLGCSRVVGICGTHEKCLFLTSELGFDAAVNYKTGNVAEQLREACPDGVDVYFDNVGGDISNAVISQIKETVANGLENMGVAFQSMMTGGNIGKQIVRISEDSSP

SEQ ID NO: 20413 - protein, 329 aa, Cavia porcellus
MVKAKSWTLKKHFQGKPTQSDFELKTVELPPLKNGEVLLEALFLSVDPYMRIASKRLKEGAVMMGQQVARVVESKNSAFPAGSIVLAQSGWTTHFISDGKGLEKLLTEWPDKLPLSLALGTIGMPGLTAYFGLLEVCGVKGGETVLVSAAAGAVGSVVGQIAKLKGCKVVGAAGSDEKIAYLKQIGFDAAFNYKTVNSLEEALKKASPDGYDCYFDNVGGEFLNTVLSQMKDFGKIAICGAISVYNRMDQLPPGPSPESIIYKQLRIEGFIVYRWQGDVREKALRDLMKWVLEGKIQYHEHVTKGFENMPAAFIEMLNGANLGKAVVTA

SEQ ID NO: 20414 - protein, 356 aa, Nostoc sp. PCC 7120
MQKWKTSCTLVISLILWNNFPMADAVNQQIVLKSRPFGEPQESDFALVESPIPQPGEGEVLSRTIYLSLDPYMRGRLSANASYAASTELNSVIVGGTVSQVIKSHHLEFQAGDFVLSNHGWQTYAVAKGETLRKLDPNQAPLSYNLGVLGMPGLTAYAALLDIGQPKAGETVVISAASGAVGAVAGQIAKIKGARVVGIVGSDEKRDYIVNELGFDVGINRRTQEVSSALKEAAPDGIDVYFDNTAGEILEAVLQQINLGARIPLVGLISQYNASSPPPGPNLLPLLIKRALIKGFLVSDYQYRFPDFVRDVAGWLQSGQLKYKEDVVVGLENAPRAFIGLLRGDNFGKLIVKVSQ

SEQ ID NO: 20415 - protein, 426 aa, Rhodobacter sphaeroides
MHRCGSGHRHRAGTGLRSATGGPAARPLLPARTTEAQIVQAAAPAQERDRGSRSRRATVAASPAAAPSRAGLRHYIRPDSREKYMPQRSDINRRVVLAQRPKGTPDESTLRMEEVPISEPAEGQMLLRTVWLSLDPYMRGRMNDTKSYAKPVEIGGVMTGQVVAEVMQSSLPGFEAGDMVLAGSGWQDYALSDGTEVVNLGKAPERPSRALGILGMPGYTAYAGLLKIGEPQPGETVVVAAASGPVGATVGQIAKLKGCRAVGVAGGADKCRYVVETLGFDACIDHRAPDFEAQLAAACPNGIDIYFENVGGRVLYGVLPLLNPFARMPVCGIVSWYNSPGLPEGPDMAPALMGTILRMKVKLQGFIIFDSFPRSLYAEFAREMTGWLAEGKVKYREQVVEGLEAAPQALNDLLAGRNFGKMVVKL

SEQ ID NO: 20416 - protein, 341 aa, Rhodopseudomonas palustris
MPKGQRIVLASRPVGEPTPQNFRLEEFDVPAPGEGQVLLRTIWLSLDPYMRGRMSDGPSYAQPVPVGGVMEGGTVCEVIDSKSPGFAKGDIVLAHSGWATHAIADAKPLRKIDPALGPISTAVGVLGMPGMTAYTGLLDIGQPKEGETVVVAAASGAVGSAVGQIAKVKGARAIGIAGGKDKCDYVKQELGFDDCLDHRDPDLAAKLKAACPNGIDVYFENVGGEVFEAVFPLLNAFARIPVCGLIAQYNAFETPPTPKWATALMRHVLTKRLTIRGFIVSDFAGRRQEFLREMSGWVRDGKVKYREHVTDGLENAPEAFMGLLKGANFGKQLVRVGPERA

SEQ ID NO: 20417 - protein, 333 aa, Rhodopseudomonas palustris
MTATVNRQILLIEKPKEKLGPEHFRLAESPIPEPKDGEALVKVRYISLDAANRAWMQGATYRAAVETDSVMPGGSVAEVVSSKAPGLVSGDLVFADTGWQDYAVLPAKHLAKLPKVEPMTHLLSVYGIAGLTAYFGLLDIGKPRAGETVVVSAAAGSVGSIVGQIAKIKGCRVVGIAGGKQKCDWLVNELGFDAAVDYKDGALFKALRAAAPNGIDVYFDNVGGDILEACLPQMNLKGRIACCGAVSQYDRTPSATGPRGIPGLIVVKRLIMQGFIVMDYMDQRDEAVAKLQEWVTSGKLKVQEDVIDGLENTPQALIGLLAGENRGKRMVKV

SEQ ID NO: 20418 - protein, 337 aa, Ralstonia metallidurans
MSKQTYKRIVLASRPEAAVTPDNFRIEELPVPELADGQVLVRNHFLSLDPYMRGRMSDSKSYADPQPLNEVMIGGTVGEVIASKNPKWNVGDKVIGMFGWQELGVSDGGMMQKVDTTHIPLSAYLGSVGMPGVTAWYGLNKIIAPKAGETVVVSAASGAVGSVVGQLAKLAGCYVVGVAGGKEKCDYVVNELGFDACVDYKAAKDAKELYAMVKAVTPNGIDGYFENVGGDILDVVLSRLNPFARIAVCGLIAGYDGQDMPIRNPRAILVARAKIEGFIVSEHMELWPQALRELGTYVAQGKIKFRESIAEGLASAPEAFIGLLKGKNFGKQLVKLA

SEQ ID NO: 20419 - protein, 366 aa, Burkholderia fungorum
MSFARVRKARAVSAFVHAVRIIRRSSRQPMETIAMSQINRQLVLASRPQGAVTPDNFRLVEAPLAPLADGELRVRNHYLSLDPYMRGRMNDSKSYAPPQPLNEVMIGGTVGEVVESKNPKFAVGDKVVAMFGWQEYGTSNGTGLQKVDDTHVPLSAYLGPVGMPGVTAWYGLNRIIAPKAGETVVVSAASGAVGSVVGQLAKLAGARAVGIAGGADKCRYVTGTLGFDACVDYKAGNLYQDLKAATPNGVDGYFENVGGEVLDATLARMNPFGRIALCGFIAGYDGQPVPLRHPSLMLTQRLLVQGFIVSEHMDVWPEALKRLGTLVAQKKLHYRETIAQGLDAAPEAFMGLLKGKNFGKQLVKLI

SEQ ID NO: 20420 - protein, 376 aa, Escherichia coli O157:H7 EDL933
MLQRGGDGCKQNQSCEPATIDGFMPKAQESIMGQQKQRNRRWVLASRPHGAPVPENFRLEEDDVATPGEGQVLLRTVYLSLDPYMRGRMSDEPSYSPPVDIGGVMVGGTVSRVVESNHPDYQSGDWVLGYSGWQDYDISSGDDLVKLGDHPQNPSWSLGVLGMPGFTAYMGLLDIGQPKEGETLVVAAATGPVGATVGQIGKLKGCRVVGVAGGAEKCRHATEVLGFDVCLDHHADDFAEQLAKACPKGIDIYYENVGGKVFDAVLPLLNTSARIPVCGLVSSYNATELPPGPDRLPLLMATVLKKRIRLQGFIIAQDYGHRIHEFQREMGQWVKEDKIHYREEITDGLENAPQTFIGLLKGKNFGKVVIRVAGDD

SEQ ID NO: 20421 - protein, 333 aa, Staphylococcus aureus subsp. aureus Mu50
MQNKQILFNKIPEGMPQEDTFKIEEIDTPKLESDGVLVQTLYISVDPYMRGRMTKADSYVQPFEIGKPIVSHVVAKVIDSTLADYKKGDVVVGMLPWRIINHVQADQITKVPTTDVPLDLYLSVLGMPGQTAYHGLLDIGQPKAGDTVVVSAASGAVGSVVGQIAKIKGCRVVGIAGGDKKVNYLTETLGFDAGIDYKKEDFAEALAQAVPDGIDVYFENVGGTVGDEVFKHLNRFARVPVCGAISSYNHPEADIGPRIQGTLIKKQVMMRGFLVSEFANAFKEASEQLATWVQEGKIQSQVTIEDGFENAPHAFKNLFTGDNFGKQVIKVTE

SEQ ID NO: 20422 - protein, 333 aa, Pseudomonas putida KT2440
MTQTNRRFLLAKRPVGAVRRDDFSFETVPAEQPGEGQVLVRNLYLSLDPAMRGWMNEGKSYIPPVALGQVMRALGVGEVVASNHPGYQPGDHVSGALGVQDYFTGEPQGLHKIDPKLAPLPRYLSALGMTGMTAYFALLEVGQPKAGDTVVISGAAGAVGSIVGQIAKIKGCRVVGIAGGAEKCQYLKDELGFDGVIDYKAEDVLAGLKRECPKGVDVYFDNVGGDILDAVLTRINFKARIVICGAISQYNNKEAVKGPANYLSLLVNRARMEGFVVMDYTKDYGKAAQEIAGWLANGQVKSKEDVVEGLETFPETLLKLFSGENFGKLVLKV

SEQ ID NO: 20423 - protein, 344 aa, Pseudomonas putida KT2440
MPQSKLINRRVVLASRPHGAPLEANFRIEQSPIPEPAEGQVLLRTVYLSLDPYMRGRMSDAPSYAAPVEIGGVIVGGTVCRVEASKNPAYKVGDWVLSFAGWQDYTLSDGSDLTALGESPAHPSYALGIFGMPGFTAYMGLLDIGRPQAGETLVVAAATGPVGATVGQIGKIKGCHVVGVAGGAEKCRHAVEVLGFDACLDHRAPDFAEQLAKACPAGIDIYFENVGGKVFDAVLPLLNTKARVPVCGIIAHYNDTALPNGPDRLPALMGSILRKRIHVQGFIIFDDYGHRYNEFFNDMSSWFAQGRIKYREELVSGLEEAPKAFIGLLEGRNFGKLVVRVSED

SEQ ID NO: 20424 - protein, 334 aa, Staphylococcus epidermidis ATCC 12228
MNNEQIVFNKVPDGMPQDDTFKYEDIDVIEPSENELQLKTLYISVDPYMRGRMTNADSYVDPFKQGEPFNGHTVSKVLKSKDSNFDEGDIVVGMLPWRKINTVNSEYVNKVPTSDVPLHLYLSVLGMPGQTAYHGLLDIGQPKEGETVVISAASGAVGSVVGQIAKLKGCRVVGIAGGDKKVNYLKNELRFDAGIDYKKDNFPEALKEAVPNGIDVYFENVGGYIGDEVFKHLNTHARIPVCGAISSYNHPEKDIGPRIQQTLIKNQAMMRGFIVAEFADGFKEASKQLAQWVQENKIKTQVSVEDGFDKVPQAFRNLLTGDNFGKQVIKVASE

SEQ ID NO: 20425 - protein, 354 aa, Anopheles gambiae str. PEST
TRPTRNMKSLWQQLVRQRQYATDAAGAARKWIYAKAFQGEPHHGNFRLETEPLPATLQPGEFLAQAEYLSVDPYMRPYMLAYPEGSLMIGGQIARVTRSENAHFPVGATVFGQFGWRTHTVCDPARLEKDKPYVLPDFGGLPTSLGLGILGMPGNTAYFGLQELCQPQPGETVVVSGAAGAVGSVVGQIAKIKGCRAVGIAGTEEKCEWLRKIGFDAAINYKRNDVYGELKKAAPRGVDCYFDNVGGSVTETVLKQMNVYGRIAVCGAISNYNSAVGKVTDPQRQFVFKQLRMEGFLVWRWNDRWLEGIEGNLRWIREGRLAYEETVTEGFERMPDAFIDMLRGGNTGKAVVKV

SEQ ID NO: 20426 - protein, 343 aa, Anopheles gambiae str. PEST
LSVVYTPARPLKRMHIAKKWIYAKPFVDEPTLDNFELVEEPVPELQDGEFLIKALYLSVDPYMRIYMLPSPTGCTMIGGQVGEVIESRHADFPVGALAFAQVGWRTVSVCAPASFETRKPYVLPELGPLPASLGMGALGTVGNTAYFGLLEICQPQPGETVVVSGAAGAVGSLVGQIAKIKGCRVVGIAGSTEKCEWLRELGFDGVINYKEEDVGEALRQLAPDGVDCYFDNVGGRTAETVKGQMKPFGRIAVCGTISQYNGREPARVTDPQRDFVWKQLVQEGFSVHRWTDRWFEGVHQNLRWIQEGKLKVRETVTDGFENMPRAFIEMMRGGNVGKAVVKV

SEQ ID NO: 20427 - protein, 367 aa, Anopheles gambiae str. PEST
TVSGQSLAPDYIVRDQQDPKKGSKYSTSHGSVRKQRMVLARKWMYVRRPEGEPKETDFALKEEELPALEAEDFLVETEYFSLDAGLRGYMELGALPVGSPVIGMALAKVIESRNAQFPVGAVVCARLGWVTHAVLNQQQQKELRPYIVPEVAGQSRAVGLGPLGLSGNTAYFGLLEICKPKPGETVVVSAAAGAVGSLVGQIAKIKGCHVVGLAGTEEKCGWLRELGFDAVVNYRAGSVREQLAAATPRGVDCYFDNVGGELTELVRERMNLYGRISVCGAVSSYNGQPAQVADPQRDYVSKQLRQEGFVVFRWLPRWMEGIGQMREWLEQGKLVHRETVYEGFDSAPRSFISMLQGGNIGKAVVKV

SEQ ID NO: 20428 - protein, 340 aa, Anopheles gambiae str. PEST
NCVIVRRCASSRRDLLPVACMRARALCLVSKKKKKQYKMVVAKKWIYAKPFEGLPKDENFRLEEETLPEPGENEFVAEAVFLSVDPYMRPYMASYPAGTVMIGGQVAKVTASRHPQFPVGATVFGNFGWRTHTLVNPEQGAADSRPYVLPPFGAHPASLGLGVLGMPGNTAYFGFLELCQPKQGETVVVSGAAGAVGSLVGQIAKIKGCRVVGIAGSDDKCGWLRELGFDATINYRQAVLGQMNLYGRISVCGTISNYNAERAQVADPQRLFVFKQLRQEGFIVTRWAKRWMEGIRQNLQWIEEGRLRYQETVTDGFEQMPAAFVSMLTGGNTGKAVVKV

SEQ ID NO: 20429 - protein, 217 aa, Magnetospirillum magnetotacticum
MAVVNRRIVLAARPHGEPKPEHFRLEEARTSAPKQGEVLLRTRWLSLDPYMRGRMSAAKSYAKPVEIGEVMVGQTVSEVVASENPAFAEGDLVLGYSGWQEFALSDGKGLRRLDPADGPPSQFLGVLGMPGMTAYAGLLEIGRPQPQETVVVAAAAGPVGSLVGQIARLRARGRWHRRGRGEMRLPDRDAGLDAAIDTGPATSPMPGPRLPEGSTCI

SEQ ID NO: 20430 - protein, 342 aa, Xanthomonas campestris pv. campestris str. ATCC 33913
MTSLTNRRIVLASRPHGEPGTDNFRIEDAPVPPTGHNQILVRNRFLSLDPYMRGRMDEGPSYAAPVAIDAVMEGGTVGEVLESNHPDYHPGELLVLGGGWQTHTVLEPTAPLRKLPKDDALPLSTALGVYGMPGFTAYAGLHEIGKPQAGETLVVAAASGPVGATVAQLARLQGLRVVAIAGGEEKVRYLRDTLRVDVALDHRAEDFAAQLRAATPDGIDVYFENVGGKVFDAVMPQLNDFARIPVCGVVATYNSRGQVAPGPDRLPDFIGQVLRKRLTVRGFIQHDFIRLMPAFLREMGQWLREDKIQYREHVLHGLDSAPQGLISLLRGENFGKAVVALD

SEQ ID NO: 20431 - protein, 342 aa, Xanthomonas axonopodis pv. citri str. 306
MTSIINRRIVLASRPHGEPSADNFRIEEVPVAPTGHDQILVRNRFLSLDPYMRGRMDEGPSYAAPVAIDAVMEGGTVGEVIASNHADYHPGDLLVLPGGWQAHSLLTPTTPLRKLPKDDSLPPSTALGVYGMPGFTAYAGLHEIGKPQPGETLVVAAASGPVGATVAQLARLQGLRVVAIAGGAEKVRYLRDTLHVDVALDHRADDFAEQLRAATPNGIDIYFENVGGKVFDAVLPQLNEFARIPVCGVIATYNSRGQAHPGPDRLPDFMGQVLRKRLTVRGFIQHDFIRLMPAFLREMGQWLREDKIQYREHVLHGLDSAPQGLIDVLRGKNFGKAVVALA

SEQ ID NO: 20432 - protein, 341 aa, Caulobacter crescentus CB15
MTTSREIRLKARPVGMPKDSDFELATVELPAPGDGEIQVKNLWMSVDPYMRGRMYDRPSYVPPFQLGEALQGGAIGEVIASNDPDFKPGDIVSSMFGWREAYNAHPKSLAAAGMGAITKIETHGIPPQAFLGVAGMPGMTAYAGLLRVAALKDGDVVFVSAAAGAVGSIVCQIAKLKGHTVIGSAGGPEKVAFLKSIGVDHVIDYKATPDVVAELAKVAPKGIDVYFENVGGVHLEAAINSARPFARFALCGMISQYNETSKPEGPSNIILAVGKSLRLEGFIVSNHFDLYPQFAKDMAEWIKAGKITWKETVEDGVDRAPNAFLKLFTGENLGKMLVKLG

SEQ ID NO: 20433 - protein, 333 aa, Staphylococcus aureus subsp. aureus MW2
MQNKQILFNKIPEGMPQEDTFKIEETDTPKLESDGVLVQTLYISVDPYMRGRMTKADSYVQPFEIGKPIVSHVVAKVIDSTLADYKKGDVVVGMLPWRIINHVQADQITKVPTTDVPLDLYLSVLGMPGQTAYHGLLDIGQPKAGDTVVVSAASGAVGSVVGQIAKIKGCRVVGIAGGDKKVNYLTGTLGFDAGIDYKKEDFAEALAQAVPDGIDVYFENVGGTVGDEVFKHLNRFARVPVCGAISSYNHPEADIGPRIQGTLIKKQVMMRGFLVSEFANAFKEASEQLATWVQEGKIQSQVTIEDGFENAPHAFKNLFTGDNFGKQVIKVTE

SEQ ID NO: 20434 - protein, 398 aa, Shigella flexneri 2a str. 301
MLQRGCDGCKQNQSREPATIDGFMPKAQESIMGQQKQRNRRWVLPSRPHGAPVPENFRLEEDDVATPGEGQVLLRTVYLSLDPYMRGRMSDEPSYSPPVDIGGVMVGGTVSRVVESNHPDYQPGDWVLGYSGWQDYDISSGDDLVKLGDHPQNPSWSLGVLGMPGFTAYMGLLDIGQPKEGETLVVAAATEPVGATVGQIGKLKGCRVVGVAGGAEKCRHATEVLGFDVCLDHHADDFAEQLAKACPKGIDIYYENVGGKVFDAVLPLLNTSARIPVCGLVSSYNATELPPGPDRLPLLMATVLKKRIRLQGFIIAQDYGHRIHEFQKEMGQWVKEDKIHYREDITDGLENAPQTFIGLLKGKNFGKVVIRVAGDDKSFNGGVSRHKNPGKKLIFSFN

SEQ ID NO: 20435 - protein, 376 aa, Shigella flexneri 2a str. 2457T
MLQRGCDGCKQNQSREPATIDGFMPKAQESIMGQQKQRNRRWVLASRPHGAPVPENFRLEEDDVATPGEGQVLLRTVYLSLDPYMRGRMSDEPSYSPPVDIGGVMVGGTVSRVVESNHPDYQPGDWVLGYSGWQDYDISSGDDLVKLGDHPQNPSWSLGVLGMPGFTAYMGLLDIGQPKEGETLVVAAATEPVGATVGQIGKLKGCRVVGVAGGAEKCRHATEVLGFDVCLDHHADDFAEQLAKACPKGIDIYYENVGGKVFDAVLPLLNTSARIPVCGLVSSYNATELPPGPDRLPLLMATVLKKRIRLQGFIIAQDYGHRIHEFQKEMGQWVKEDKIHYREDITDGLENAPQTFIGLLKGKNFGKVVIRVAGDD

SEQ ID NO: 20436 - protein, 337 aa, Thermobifida fusca
MPTTAREFHLIARPQGEPAVTDFALVTRTLPDPGPGELLVRNLVLSVDPYMRGKMSGVRTYTDPYELNAPMEGGAVGVVEASTDPAVPTGTLVVHNAGWRSHALLPASRVRPLPADSPVDPSVYLGALGMPGLTAYVGLRHKAGIREGDTVFVSGAAGAVGSMVGQLAALYGARRVIGSAGSPEKVAYLRDELGFDAAFDYRAAPVREQLADAAPDGIDVYFDNVGGDHLEAAIACANDFARFAICGAISGYNATSAPRAPRNLFQIVTKRLTLRGFIVSDEPHLAEEFQREVAPAVADGRIKVRETVVEGLERTPEAFISMLRGGNIGKMVVRVAE

SEQ ID NO: 20437 - protein, 335 aa, Pseudomonas syringae pv. syringae B728a
MTDLSNRQFLLAKRPSGDARREDFTYQEVPVSALADGQILVRSKYLSLDPAMRGWMNEGKSYIPAVELGEVMRAIGVGEVIESKNPKFAVGDHVQGRLGVQDYFAGEPKGFYKVDTNLAPLPLYLSALGMTGMTAYLALLDVGQPKSGDTVVISGAAGAVGSIAGQIAKLKGCRVVGIAGGTKKCRLLTEELGFDAAIDYKSEDVMDGLKRHCPDGVNVYFDNVGGDILDAALSQLAVGARVVICGAISQYNSTKAIKGPANYMSLLVNRARMEGFIVLDHPERYAEAGQVMAGWIKEGKLKSKEHIVEGLETFPETFQMLFSGENQGKLILKVE

SEQ ID NO: 20438 - protein, 344 aa, Pseudomonas fluorescens PfO-1
MSDPLTLNQRFVLASRPVGAPTPENFRLEREALPDLEDGQVLLKTLYLSLDPYMRGRMSDAPSYAAPVQIGEVMTGGAVSRVEQSRHPKFHPGDLVVGATGWQSHSISDGRNIIPIPSGLPSPSMALGVLGMPGMTAYMGLMDIGQPKEGETLVVAAASGAVGSVVGQVAKIKGLRAVGVAGGAEKCKYVVEELGFDACIDHKAPDFAEQLAKACPDGIDIYYENVGGHVFDAVVPLLNSKARIPLCGLIAGYNASEAPKGPDRLPALQRTLLTKRVRIQGFIVFDDYGDRQPEFISAMVPWVRDGKVKFREDVVEGLEQAPQAFIGLLEGRNFGKLVVKVAQD

SEQ ID NO: 20439 - protein, 357 aa, Pseudomonas fluorescens PfO-1
MSQPCGIAHEGLSTRLHSTRVPVMTNQTNRQFLLAKRPAGAATRETFTYQELPVGEPAAGQILVKNEYLSLDPAMRGWMNEGKSYIPPVGLGEVMRALGVGKVVASNNPGFAVGDYVNGAIGVQDYFLGEPKGFYKVDPKLAPLPVYLSALGMTGMTAYFALLDVGAPKAGDTVVLSGAAGAVGSIAGQIAKIKGCRVIGIAGGADKCKFLVDELGFDGAIDYKSEDVLAGLKRECPKGVDVYFDNVGGDILDAVLSRLNFKARVVICGAISQYNNKEAVKGPANYLSLLVNRARMEGFVVMDYAAQYASAAQEMAGWMAKGQLKSKEDIVEGLETFPETLGKLFSGENFGKLVLKV

SEQ ID NO: 20440 - protein, 334 aa, Pseudomonas aeruginosa PAO1
MTSQINRQYQLAQRPSGLPGRDTFSFVETPLGEPAEGQILVKNEYLSLDPAMRGWMNDARSYIPPVGIGEVMRALGVGKVLVSKHPGFQAGDYVNGALGVQDYFIGEPKGFYKVDPSRAPLPRYLSALGMTGMTAYFALLDVGQPKNGETVVISGAAGAVGSVAGQIARLKGCRVVGIAGGAEKCRFLVEELGFDGAIDYKNEDLAAGLKRECPKGIDVFFDNVGGEILDTVLTRIAFKARIVLCGAISQYNNKEAVRGPANYLSLLVNRARMEGMVVMDYAQRFPEGLKEMATWLAEGKLQSREDIVEGLETFPETLLKLFSGENFGKLVLKV

SEQ ID NO: 20441 - protein, 345 aa, Pseudomonas aeruginosa PAO1
MSQSTQVNRRIVLASRPHGAPTRDNFRIEQVPLPEPGAGQVLLRTVYLSLDPYMRGRMSDAPSYAPPVELGAVMVGGTVSRVEASNHPGFKVGDWVLSANGWQDYALSDGSGLARLGESPEHPSYALGLLGMPGFTAYMGLLDIGKPQAGETLVVAAATGPVGATVGQIGKLKGCRVVGVAGGAEKCRHAVQVLGFDACLDHHAADFAERLAEACPDGIDIYYENVGGKVFDAVFPLLNAKARIPVCGIVAHYNDTELPPGPDRLPALMGTILRKRIKVQGFIIFDDYGHRYDEFQRDMSKWFADGLIQYREERVDGLENAPEAFFGLLQGRNFGKLVVRVGADA

SEQ ID NO: 20442 - protein, 343 aa, Vibrio vulnificus CMCP6
MTQPTNRQIVLASRPVGAPTADNFALTQSDIPTPAQGEMLLRSVYLSLDPYMRGRMSDAKSYAEPVGIDEVMVGGTVCQVEASNHAEFEVGEWVLAYTGWQDYALSDGEGLIKLGKQPSHPSYALGVMGMPGFTAYMGLLDIGQPKEGDTLVVAAATGAVGSMVGQIGKLKGCRVIGIAGGEEKCQFAKETLGFDECIDHKATDFAEQLAKVCHNGIDIYFENVGGKVFDAVMPLLNTGARIPLCGLISQYNATSLPEGPDRMSMLMAQLLIKRIKMQGFIIFDDYGHRYGEFAADMTQWLAQGKIHYREHLVQGLENAPDAFIGLLEGKNFGKMVVQTNQPR

SEQ ID NO: 20443 - protein, 339 aa, Oceanobacillus iheyensis HTE831
MSEQNQQIKLTKRPEGTPTNEHFEIVDIPINNPNDGEVLIKTIYLSVDPYMRGRMSAGKSYVKPFEVDKPMNGTIVGEVVTSESESFSKGDLVRGMLPWQRYNVVSASYVEKIDPSVAPLTAYLSVLGLTGLTAYFGLLDIGQPKEGETVVVSAAAGAVGSSVGQIAKIKGAHVVGIAGTDEKIDYLENQLGFDKAVNYKDADFKQQLKEACPNGVDVYFDNVGGEVTDNVISLLNDFARIPLCGAISTYNLKPGEDHGPSILPKILKTRTTMKGFIVSDYQEQFPEAIKDLAKWVAEDKLSYEVTTVDGFENTPTAFLDLFEGKNKGKQLVKVSEISS

SEQ ID NO: 20444 - protein, 386 aa, Pseudomonas syringae pv. tomato str. DC3000
MCHLQINMNVIATEHSYQPHGSNGIRWMIRSCLNTAPRLESTHKPLLRGPAMTDLSNRQFLLAKRPSGAVRRDDFTYQQVPVTSLADGQILVRNKFLSLDPAMRGWMNDGKSYIPAVQLGEVMRALGVGEVLESKNPKFAAGDHVQGALGTQDYFAGEPKGFYKVDTSLAPLPLYLSALGMTGMTAYLALLDVGQPKSGDTVLISGAAGAVGSIAGQIAKLKGCRVVGIAGGKDKCSLLTSELGFDAAIDYKSEDVMDAIKRHCPDGVNVYFDNVGGDILDAALSQLAVGARVVICGAISQYNNTTAIKGPANYMSLLVNRARMEGFIVLDHADRFAEAGQVMAGWIKEGKLKSKEHIVEGLETFPETFQMLFNGENQGKLILKVE

SEQ ID NO: 20445 - protein, 344 aa, Vibrio parahaemolyticus RIMD 2210633
MTNATNRRIVLASRPHGAPTTENFRLEEVAKPVPQAGEMLLRTVYLSLDPYMRGRMSDAESYAEPVALDDVMIGGTVCQVEASNHPDYEAGEWVLAYTVGWQDYAISTGEMVIKLGKEPQNPSYALGVAGMPGFTAYMGLLDIGQPKPGETIVVAAATGPVGATVGQIGKIKDCRVVGIAGGEEKCRYAKEVLGFDECIDHKADDFEQQLKDACYNGIDVYFENVGGKVFEAVMPLLNTSARIPLCGLISQYNATELPEGTDHLPLLMGKLLTKRIKVQGFIIFDDYGHRYGEFAQDINQWLAEGKIQYREHLVEGLDNAPEAFIGLLEGKNFGKLVVKINDPL

SEQ ID NO: 20446 - protein, 339 aa, Bacillus subtilis subsp. subtilis str. 168
MTASQQQIQLARRPQGIPVHEDFRFETIPVPEPKQGEVLVKTLYVSVDPYMRGRMQDTKSYVEPFALDKALSGGVIAEVVSDGNHLKKGDIVIGNLSWQEFSAVSESALRKIDTSLAPASAYLGILGMTGLTAYFGLLDIGRPKEGETVVVSGAAGAVGSTVGQIAKIKGARVVGIAGSDEKIDYLKQELQFDEAINYKTADDIQKALQNACPDGVDVYFDNVGGPISDAVMNLLNEFARIPVCGAISSYNAESEADDMGPRVQSKLIKTKSLMQGFIVSDYSDRFSEGAKQLAEWLKAGKLHYEETITEGFENIPDAFLGLFKGENKGKQLIKVSDPS

SEQ ID NO: 20447 - protein, 351 aa, Bradyrhizobium japonicum USDA 110
MTATSIQEEAIMSQAKRIVLAARPVGEPKPSDFRIEEFAVPTPGQGEVLLRTIWLSLDPYMRGRMSDGPSYAAPVPIDGVMEGEAVSEVAASNNPDFAKGDIVRARTGWQTHAISSGKGLIKVDPKLGPISTSIGVLGMPGMTAYTGLLDIGKPQEGETVVVAGASGAVGSAVGQIAKIKGARAVGIAGGKDKCDYVVKELGFDACIDHRDPDLAAKLKDACPKGIDVYFENVGGAVFEAVFPLLNPFARVPVCGLIAHYNDTEAKPPKWAASMMRATLTKRLTFRGFIVSDFAARHGDFLRDMSAWVREGKVKYKEFVTEGLESAPGAFMGLLKGANFGKQLVRVGQDKA

SEQ ID NO: 20448 - protein, 333 aa, Bradyrhizobium japonicum USDA 110
MSGSINRQILLVEKPSGKLGPEHFKMVDGAMPEPKDGEALLRVRYISLDAANRAWMHGATYRSAVEANSVMAGGGIAEVVSSKAPGLAAGDIVFGDTGWQEFAAVPAKHLTKMPKLEPMTHLLSVFGIAGLTAYFGLLEVGKPKEGETVVVSAAAGSVGSIVGQIAKIKGCRVIGIAGGADKCNWLTSELGFDAAVDYKDGAVFKALRAAAPTGIDVYFDNVGGDILEACLPQMNNYGRIACCGAISQYDGAPAAHGPRGVPGLIVVKRLVMQGFIVMDYMKDSQRALAELQGWVKSGKLKVQEDIIDGLENTPKALIGLLAGENRGKRMVKL

SEQ ID NO: 20449 - protein, 340 aa, Streptomyces avermitilis MA-4680
MTVTPQLPAVSREWHLASRPVGWPKPEDFALVEAEVQQPGEGQVLVRNKFVSVDPYMRGRMSAAKSYVAPFELNQPMQGGAVGEVVVSNAEGIEAGDHVLHFLGWREYAVVDAKQAVKVDPEAAPLSAYLGVLGMTGLTAYAGLLRTASFKEGDSVFVSGAAGAVGSQVGQIAKLKGASRVIGSAGSDDKVKLLVEEYGFDAAFNYKSGPVNEQLREAAPDGVDVYFDNVGGDHLEAAIGQLNRDGRIAVCGMISVYNDTEPAPGPKNLARLIQTRGRIQGFLVGDHYDLQSQFVQEVGGWIRSGELKYRETVVEGIENNLEAFLGVLRGDNTGKMIVKL

SEQ ID NO: 20450 - protein, 318 aa, Streptomyces avermitilis MA-4680
MKPDDWEHCSGPVEEPGPGRFAGRTRVISLDPAMRGWLDDRPSYLPPVGIGEVMRAGSVIEVTASNHPDFQPGDHVVGTFGVQEHVVSDGKGAMKIDTSLAPPSTYLGALGMPGMTAYFGLLEVGALKDGETVVVSGAAGAVGSMVGQIAKAKGCRVVGIAGGPEKCALLTDELGFDAAIDYRTEDVRKALRGHAPDGIDVYFDNVGGDILDAALTRLAMHARVVVCGAISQYNNATPVKGPSNYLSLLVRRARMEGLVVFDYAKRYPQATQEISGWIGAGHIKVKEHVVRGTVDDFPETLQMLFRSENVGKLVLELA

SEQ ID NO: 20451 - protein, 187 aa, Streptomyces avermitilis MA-4680
MVSGAAGAVGSVVGQIARIHGCRVIGVAGGPEKCRTIVDEFGCDVAIDYKSENLRDALRKHAPDGVDVYFDNVGGKTLDSVLTRLARGARIVICGSMSQYNATERPPGPANYMALLAARASMTGMVVFDYEDRYPQASAELARWLKDGRLRSREHIVEGGVRAFPETLLKLFSGENTGKLILALGNG

SEQ ID NO: 20452 - protein, 336 aa, Ralstonia solanacearum
MSNTYQRIVLASRPEGAVTPDNFRLETAQIPELQDGQVLVRNHFLSLDPYMRGRMNDSKSYAQPQPLGEVMIGGTVGVVEASRNPAYAVGDNVVGMFGWQEVGISDGRGMQKVDTRHVPLSAYLGSVGMPGVTAWYGLNRIMHPKPGQTVAVSAASGAVGSVVGQLAKLKGCRAVGFAGGKDKCDYVVNELGFDACIDYKAAKDPKELYAMLKEATPDGIDAYFENVGGDILDAVLRRMNPFGRIAMCGMIAGYDGQPLPLQNPQLILVSRLTVEGFIVSEHMDVWPEALRELGGSVAQGKLKFRESVAQGLASAPEAFIGLLKGKNFGKQLVKLV

SEQ ID NO: 20453 - protein, 350 aa, Arabidopsis thaliana
MGEVSVVENKKVILKNYVDGIPTETDMEVKLGETIELKAPKGSSCFLVKNLYLSCDPYMRGRMRDFHGSYLPPFVPGQRIEGFGLARVIDSDDTNYKPGDIVSGIIGWEEYSLLRSSDNLQLRNIQLDDDIPLSYHLGLLGMAGFTAYAGFNEICCPKKGDSVFVSAACGAVGQLVGQLAKLHGCYVVGSAGSKQKVEILKNELGYDEAFNYKEEADLDTALKRYFPEGIDIYFDNVGGSMLDAALLNMKVRGRIALCGMVSLQSLSTSSQGIKNLYSAIYKRLRLEGFLQSDYLHIFPQFLENVKRYYKEGKIVYVEDISEGLDLAPAALVGLFSGKNIGKQVVRVAKE

SEQ ID NO: 20454 - protein, 339 aa, Mesorhizobium loti
MSTETNIRIVLAARPQGRPKPSDFRIESVGIAEPGEGELLLQILYLSLDPYMRGRMNATKSYAKPVEIDGVMEGGTVARVVKSRHAGFAEGDIVLSHSGWQGFALSDGVGLRKLDPAAAPVTTALGVLGMPGFTAYAGLLTIGQPKAGETVVVAAASGAVGSAVGQIARIKGARAVGIAGGADKCAFVRRELGFDAVVDHRADNFAEQLKAACPDGIDVYFENVGGPVWDAVFPLLNEFARVPVCGLIAQYNTVAASADDRLPTLMQQVLHRSLTIRGFIQREFVDQRPAFYRDMAGWIASGQVRYREDIVDGLENAPQAFMGLLEGKNFGKLIVRVAQ

SEQ ID NO: 20455 - protein, 352 aa, Glycine max
  unsure (1)..(352): unsure at all Xaa locations
MAEEALLQNKQVLFKGYIDGVPKETDMELKVDSHIALKPPPQGSSAILVKNLYLSCDPYMRGRMRDFHGSYIPPFLPAQALEGFGVSKVIHSDNPNYKPGDFITGFTGWEEYSLIQRTXXQLRKIHPDDAIPLSFHVGLLGMPGFTAYAGFYEVSTPSKGEYVFVSAASGAVGQLVGQLAKLHGCYVVGSAGSKEKVDLLKNKPGFDEAFNYKEXELDFECRLYKRYFPEGIDIYFDNVGGDMLDAALLNMRIHGRIAVCGMVSQQSLSKPXXGIYNLFNLITKRIKMQGFLQSDYLHLYPRFLEDVSSYYKQGKIVYIEDMNEGLESAPAAFVGLFHGKNVGKQVIRVAHE

SEQ ID NO: 20456 - protein, 359 aa, Oryza sativa (japonica cultivar-group)
MEQQQAAPMARNRKVVLREYIAGRPPREDDMVLVDGGTVALRVPEAAAPAPAVLVKNLYLSCDPYMRGRMRDFHGSYIPPFKPGSVIEGLGVARVVDSTHPGFSAGDIVSGMTGWEEYSLIDRPEQLSKIQQSDIPLSYHLGLLGMPGFTAYAGFYEICSPKKGEFVFVSAASGAVGQIVGQLAKLHGCYVVGSAGTNQKVELLKGKFGFDAAFNYKEEPDLTAALKRYFPEGIDIYFENVGGPMLDAVLLNMRTHGRIAVCGMVSQNALTDPVGIHNIFCLVPKRIRMQGFIQSDHLHMFPQFVSDMAKHYRDGKIVYVEDMSIGLENAPAALVGLFSGKNVGKKVVCVSQELSQFTF

SEQ ID NO: 20457 - protein, 316 aa, Dictyostelium discoideum
MTEIKQITLDKYFERDNGMPDRNQFKITTCKFDENQKMEKDQIMIKLEYVSVDPYLRARMNSKKTFVDPFKLHDPINSGCIGKVLKSTSDRFKEGDHVSGYFDWKEIQIVKVSKEILMADPNIAPLSAYLGICGMPGVTAYYGTVLIGKPKKGETLVVNAAAGVVGTTVGQIGKILGLRVVGICGSDEKAKSLINDFHFDSGLNYHSPTYAEDLKKACPNGIDIFYENVGGEVTDDIGQRAQYIVFEKRITMQGFLVFDYSDEDYKDAFQHLSKWLKEGKMIEKHVINNGFDQIIPSFIKIFETSNKNIGKVIIKL

SEQ ID NO: 20458 - protein, 361 aa, Oryza sativa
  unsure (1)..(361): unsure at all Xaa locations
MEQQQAAPMGWNRKVVLREYIAGRPPREDDMVLVDGGTVALRVPEAAAPAPAVLVKNLYLSCDPYMRGRMRDFHGSYIPPFKPGSVIEGLGVARVVDSTHPGFSAGDIVSGMTGWEEYSLIDRPXXQLSKIQQSDIPLSYHLGLLGMPGFTAYAGFYEICSPKKGEFVFVSAASGAVGQIVGQLAKLHGCYVVGSAGTNQKVELLKGKFGFDAAFNYKEEPDLAAALKRYFPEGIDMSFENVGGPMVEAVVLNMRTHGXRNAVCGMVSQNALTDPVGIHNIFSLYPKRIRMQGFIQSDHLHMFPQFVSDMAKHYRDGKIVYVEDMSIGLENAPAALVGLFSGKNVGKKVVCVSQELSQFTF

SEQ ID NO: 20459 - protein, 358 aa, Triticum aestivum
  unsure (1)..(358): unsure at all Xaa locations
MEQANPRAGSARNRKVVLRDYISRAPREDDMALVDGGAVPLRVPEGAAGPAVLVKNLYLSCDPYMRGRMRDFHGSYIPPFKPGSVIEGLGVARVVDSTHPGFVAGDIVSGMTGWEEYSLIDKPEQLNKIQQSDIPLSYHLGLLGMPGFTAYVGFYEFCSPKEAEFVFVSAASGAVGQIVGQLAKLHGCYVVGSAGTNEKVKLLKDKFGFDAAFNYKEEPDLTAALKRYFPEGIDIYFENVGGPMLDAVLLNMRMHGRIAVCGMVSQHGMTDPAGIHNLFCLVPKRISMKGFIQSDYINLFPQFLDYMTKHYKDGKIAYVEDMSIGLENTPAAFVGLFSGKNVGKQVVCVSQEXSTCTF

SEQ ID NO: 20460 - protein, 339 aa, Novosphingobium aromaticivorans
MERTQATTRQITLARRPTGIPVPEDFALVEVPRPVPGPGEILVRMRVGSCDPAIRGFLDDRPSYLPPVALGAPINGMSLGEVIESNNPDWPVGTLLRTFAVWSEYYVVGADALGIEKVEQAPGVPLQHYMGALGPVGLTAWVGLFEIGKAKAGETVLVSAAAGATGSTVVQLAKAAGCRVIGLAGGPDKARLVRELGADVAIDYKAVADLGAAIEEAAPDGIDVYFDNVGGETLDAVLPLMRLHGRIAVCGMIAQYNDADNPHGNRNLWQLVVNRLTMRGFITYDHPEVLGEAQAMLDRLFAEGKLKPLENVREGLEKLPEAFIDLMSGRTTGKTLVLV

SEQ ID NO: 20461 - protein, 340 aa, Novosphingobium aromaticivorans
MTVNRRFLLARRPHGTPVPEDFSLVEQTVPDAPEGGFVVRNCYASLDPAQRGWMDDAPSYMPPIPLGTPVRASTVGVVATSRNPDFAVGDWVLGLNGLEDYSVNEPGGFTMKVDPSVVQSPSRFLSAMGAVGLTAYFGLTEVAKPKPGETLLVSGAAGAVGSAVGQIGKILGCRVIGIAGGPAKCRRLIDDYGFDVAIDYKGKSVEQLAAEIREAAPGGADVVFENVGGDVMDAELLNLAKHARIVLCGLISEYNSPTKIGVRNLWQVLTQQATLFGYLIMDYAPRFAEGGAVMAQWMAEGRLRIDEDVQVGLENAYDAFMRLFTGANTGKLVLKIADGL

SEQ ID NO: 20462 - protein, 336 aa, Novosphingobium aromaticivorans
MTENRFWRLDRHPEGSDFASALSLQTETLPALGEGEVRVRVGWLSMDAGTRMWMSPRTDGYQPPLPLGSKMAGLVLGRVSESRDPAFPAGTLVRGFGQWADYATVVPALSGLEAVDDGIADIRQHFGALGMNAWTAFVGVREVAAISPGEWLVVSAAAGATGSMACQVGRNLGAKVVGIAGGAEKCRYLVEELGVDIAIDYKNEDVAARLAEVPGGVNAYFDNVGGPMLDAVLPNMAHYGRVAVCGMVAAYDNDAPLPGPARFDQVLMRRLRIEGFFIPDFLHRGAEFMPILREWVDAGKLTVRLNETVGLENVLEGYERMLSGKAIGKVIVKVGD

SEQ ID NO: 20463 - protein, 349 aa, Schizosaccharomyces pombe
MVSNNAVIIKKYLDSTAGYPVIGEHLAFEKREFDLENAQVDEETPVLLKNIYTSVDPYLRMRMQSPKHASYIPPLELGKPFYNSTVAKVVKSTLDQYKPGMDVVFVSGWEEYTFVSKQALGFLQPINNPYKLPLIDFVGSLGMPSQTAYCGLKHIGKPKAGETIYISAASGAVGQMAGQLAKAMGLHVVGSVGSDEKFKICLDSGYDSVFNYKKESPFKALPRLCPKGIDIYFENVGGETMDAVLENMNLQGRIIFCGAISQYNNPNPYRVKNLGMVLVKSLTIQGFIVANILPQYQEQYFEEMPKLIAEGKIKYKCDVYDGLESAPEAFIGMLQGKNSGKTIVKIADE

SEQ ID NO: 20464 - protein, 365 aa, Saccharomyces cerevisiae
MVLAKQWVLKNLPTPGEPFNFHFHDPACTFELIEKELSSEQLKDGELLLETTYLSNDPAQKFWISSMDKNYAKGVQPGEIIPARGIGKVLASRNKAFSPGDYVSAVTGWTTHAIISQENVQGLRKLDKNKVGKLWWYLSVLGGTSLTAYFIFFTYAQLQEREEDYGKVYLISGAAGAVGTVCIQLALNVFKASKVIAIAGGPEKVAFVESFGDNVVGVDYKDPSFKQKLIEAAGGENTVDYFIDNVGSNVLEAGVLLLKQRAMLIACGAISAYNDPSKFVFKGYSFILTKRLVVKGVLVTDNIDDFPKALDKLGSLVKHGKIDLLKSATLEDGTGDKFKNVPLIWKGLFSGVNKGKLITKVNNEE

SEQ ID NO: 20465 - protein, 189 aa, Desulfitobacterium hafniense
ALAEGQVLVRHHYLSLDPYMRGRMNDSKSYAQPQPLGEVMIGGTVGEVVESRHPKFAVGDKVVGMGGWQEYSVVDGDAPGMLRKVDTTHVPLSHYLGAVGMPGVTAWYGLVKIIAPKAGETVVVSAATGAVGSAFAALAKARGCRVVGIAGGPEKCRYATEELGFDACIDYREHPDTKTMAKALKDACP

SEQ ID NO: 20466 - protein, 352 aa, Cochliobolus heterostrophus
MYQNKSLIFKNPPIGWPKPDVDFGVECRPIDINGDIPLGGVILKNCYVSLDPYQRGRMRAPTVDSYSPPFTIGDPMEGHVISRVIRSASTKLQPGDFVSGVGPIQEFSVLSAGVVDGFTRIENPYNLNLEIFLGPLGMPGLTAYSSFYEIGKPKKGETIFISAASCAVGQLVGQLAKREGLYVIGSVGDDEKVEFITKGLGFDVGFNYKKEVIGEALMRVAPEGIDIYFDNVGGQTLESALYAMRPRGRIVVSGMISQYNLQPSELYGVKNLFMVITNRITIQGFIVTDSDMGPKYSAEHLKNVSQWIYDGSLKPKIHVDTGMDHACQSFINMLKGRKIGKAVLQIADLNGD

SEQ ID NO: 20467 - protein, 362 aa, Neurospora crassa
MAPTHNKTLVFKKIPEGYPVPGEHIVIEDRGFDPDAAPPPGGMTVSILWASFDPYQRGRMRDASVKSYAPAYQLGGPVTNDTVAKVLKSDNPDYQPGDLVVAHLPIAEYAALTKTEVGSVMGGIVGQVVQTKIDNKYGFKDLGLFLGPLGMPGLTAWSSYKEIGQPKAGETIFISSAAGAVGQVVGQIAKREGLKVIGSVGAGEKLDFIINELGFDGGFNYKKEKPLDALKRLAPQGIDIYYENVGGEHLDAALECLNTFGRIVACGMISQYNVKPGEAYGVKNLIQVVAKRLTMRGFIVFDKDFGPKYAKEHQEQLSKWIAEGSVKFKLHVTEGIDNAPKGLVGIFKGENFGKAVLHIKDE

SEQ ID NO: 20468 - protein, 353 aa, Escherichia coli
MPKAQESIMGQQKQRNRRWVLASRPHGAPVPENFRLEEDDVATPGEGQVLLRTVYLSLDPYMRGRMSDEPSYSPPVDIGGVMVGGTVSRVVESNHPDYQSGDWVLGYSGWQDYDISSGDDLVKLGDHPQNPSWSLGVLGMPGFTAYMGLLDIGQPKEGETLVVAAATGPVGATVGQIGKLKGCRVVGVAGGAEKCRHATEVLGFDVCLDHHADDFAEQLAKACPKGIDIYYENVGGKVFDAVLPLLNTSARIPVCGLVSSYNATELPPGPDRLPLLMATVLKKRIRLQGFIIAQDYGHRIHEFQREMGQWVKEDKIHYREEITDGLENAPQTFIGLLKGKNFGKVVIRVAGDD

SEQ ID NO: 20469 - protein, 340 aa, Leishmania mexicana amazonensis
MSSPSNFKKLQVVSLSKDFRSSTSVVEAHLPEEVPEGMVRVSVKYAGVNASDLNFTNGSYFKNVQPPFDCGFEAAGTVVQIGAGVANVKVGDHVVLMQYGCFAEFLDAPAERCIPVPELKPEYSVLPVSALTAAVALGEVGRVKKGDVALVTAAGGGTGQIAVQLFKHVYGCTVIGTCSSEEKAEFLKSIGCDHVINYKTESLDGRLHELCPKGVDVVYECVGGHTFNDAVRHVAVHGRVVIIGSISSYKSGEVVPFSDPSGTSVTMLLLVKSASLNGFFLPQFHDVIPKYMANLLQYLKAGQVKLFVDKKVFHGLSSVADAVDHLYSGANYGKVLVEIQ

SEQ ID NO: 20470 - protein, 340 aa, Leishmania mexicana amazonensis
MSSPSNFKKLQVVSLSKDFRSSTSVVEAHLPEEVPEGMVRVSVKYAGVNASDLNFTNGSYFKNVQPPFDCGFEAAGTVVQIGAGVANVKVGDHVVLMQYGCFAEFLDAPAERCIPVPELKPEYSVLPVSALTAAVALGEVGRVKKGDVALVTAAAGGTGQIAVQLLKHVYGCTVIGTCSSEEKAEFLKSIGCDHVINYKTESLDGRLHELCPKGVDVVYECVGGHTFNDAVRHVAVHARVVIIGSISSYKSGEVVPFSDPSGTSVTMLLLVKSASLNGFFLPQFHDVIPKYMANLLQYLKAGQVKLFVDKKVFHGLSSVADAVDHLYSGANYGKVLVEIQ

SEQ ID NO: 20471 - protein, 342 aa, Leishmania major
MAAAARTYRHIVARELSTNFRAVASIVEAPFPTVLHPKAILVKNKYLGVNASDINFTAGIYQPDVRPPFACGFEAVGEVVDVGSGVKDLKAGAAVVTQSYGAFAEYQVVARRHAKPIPRVAREYLPLDLSATTASIALEHVLKPQPGERAVVTAAAGGTGQFAVQLLKHVYGCSVVGTCSSPSKEVFLTNTLKCDGVVNYKAEGGDTAAAFLRCYPRGVNIAYESVGGDLLEAVIQSLAPRGRILSLGCVSTYQCGSIEAACPSRKPLPLQLLAKSASLSTFFLPHFAKYGQLHFDRLCALHEQGLVQCCIDPTTFEGLEGVYDAIDWMFEQKNCGKVMVEL

SEQ ID NO: 20472 - protein, 335 aa, Geodia cydonium
MATKIRKYVLRSHFSGFPQRDALEIVEEELPPIKDGEFLCEAQWISVDPYMRPYTSRLPLGITMIGTQVAKVVESKNDKYSPGDLVSSNFGWVTHTISDGVQQWGGKQGPVLKLDPAIHSSPSTALGVLGMPGATSYFGFLEICQPKKGETLVVNGGAGAVGSLVGQIAKLKGCRVVGFAGSDAKVKYMLDLGFDAAYNYKTVESLDAAIKESCPNGVDLFFDNVGGEFFEVTLSNMNEFGRVSVCGAISLYNATEKPKFRSVSEIILFKQLKVEGFIVARWLDQWPKAFKEISEWIKEGKVKYDEHVTEGFDNMFDAFAGLFTGDNTGKAIVKI

SEQ ID NO: 20473 - protein, 529 aa, Caenorhabditis elegans
MRIFQARQMTSSSSSAHQPLPADNKVVIFVKRPGENNAPTIDCFDVVPIDSPSEKDITSDQCIVRTLFLSVDPAQRCRMNPSTGVDYLGPYEIGEPVDGMEGVGVVERVGSACTLEVGDLVTGCIRLWTWTKYFVCDSSDLVKVNLPSSRNFSPSVILSCAGLSGITALLGIRKKALIDRSRPQTIVVSGAAGSCGSLAGQIARIEGCSKVIGICGSDDKCTVLKREFGFNDTINYKTENVSERLGHLAPEGIDIYWDNVGGVISDDVIRAMNNEGRVVLCGQIAVYNTDLPYPPPLPEHTTKIIKERNIQRERYLVLMYKDEIDEAVAQLSEWLQQDKIKVKETIYDGLNAAPSAFVDMMNGKNIGKMLIHFSHYEKLNFFPKFKNFRFFFGKNSVKEIIMEVLKTRETMLTNQEVLSFLNALKKEEDNKQQHERCKQLSTVIYETKKYLNTSPAVTQNEAVICELIPKLAPFKLTGAETLQVINLRPSTTADIQLLIEETEERFPSEEDLEKLVSTVSECLPPPPKR

SEQ ID NO: 20474 - protein, 340 aa, Nostoc punctiforme
MSDLMNKQIILKSRPVGEPKESDFALVETPTPEPGEGEILSRTIYLSLDPYMRGRLSASESYAASVELNSAIVGGTVSQVVKSNHPQFQVGDFILSNNGWQTYAVSKAETLRKLDPTQAPLSYSLGVLGMPGLTAYAALLDIGQPKEGETVVVSAASGAVGAVAGQIAKIKGARVVGIVGSDDKRDYIVKELGFDVGINRKTQELDSALKEAAPNGIDVYYDNTAGVILETVLQQINLGARIPLVGLISEYNATSTPSGPNLMPLLVKRALIKGFLVTDYQHRFNDFLRDVSGWLQSGQLKYKEDVVMGLENAPHAFIGLLRGDNFGKLIVKVNDDPTAK

SEQ ID NO: 20475 - protein, 343 aa, Nostoc punctiforme
MTRAINRQFLLAARPVGDIKESDFEYREEPIPSPKDDEVLVRTIYLSLDPTNRIWMSDMEQYMPPVEIGEVMRGGIIGVVEESKNPNFKKGDLVSGLLGWQDYAIALGSSGFSLTRLPNPLPCPLNAFTGPLGATGFTAYFGLLDIGQPKVGETVVVSAAGGAVGSIVGQIAKIKGCRVVGITGSDEKCRWLTEELGFDAAINYKTGDLEKALAQACPNGIDVYFDNVGGIILDAVLTKINLRARLPLCGLISTYNASKPVPGPYNYSQILMKRALVQGFIILDYIPRFHEAIAEIGKWLNQGQIKYALEIVEGLENAPKAILKLFDGNKKGKLVIKVSNEPT

SEQ ID NO: 20476 - protein, 380 aa, Halobacterium sp. NRC-1
MHDRAAVNTYGCLPGVPVLGARSRTPEGAAGSVTTLPLGVVDDCMRDTSREWVFAERPEGEPDMDSFELRERDVPEPRHGELLVRVRYLSVDPYMRGRMRDSDSYADPWTVGEPLSGGVVGEVVESESDAYEAGDLVSGNGTWADYSLLDAANVAPVDPSVADLPAYLGVLGMPGRTAYFGLLEVGAPKPGDTVVVSGAAGAVGSVVGQIAKHNGCRVVGFAGSEEKVDWLTEDLGFDAGINYKQVDDYSAALDDAAPDGVDVYFDNVGGPISDAVFTKLNVDARVAVCGQIAHYNNEDVPTGPRKLPQLIAPRAKVQGLLVGDFATRFGEASEQLGQWVAAGDIEHRETVVSGLENAPDAFLGLFSGDNIGKQVVGVSE

SEQ ID NO: 20477 - protein, 376 aa, Escherichia coli K12
MLQRGCDGCKQNQSREPATIDGFMPKAQESIMGQQKQRNRRWVLASRPHGAPVPENFRLEEDDVATPGEGQVLLRTVYLSLDPYMRGRMSDEPSYSPPVDIGGVMVGGTVSRVVESNHPDYQSGDWVLGYSGWQDYDISSGDDLVKLGDHPQNPSWSLGVLGMPGFTAYMGLLDIGQPKEGETLVVAAATGPVGATVGQIGKLKGCRVVGVAGGAEKCRHATEVLGFDVCLDHHADDFAEQLAKACPKGIDIYYENVGGKVFDAVLPLLNTSARIPVCGLVSSYNATELPPGPDRLPLLMATVLKKRIRLQGFIIAQDYGHRIHEFQREMGQWVKEDKIHYREEITDGLENAPQTFIGLLKGKNFGKVVIRVAGDD

SEQ ID NO: 20478 - protein, 345 aa, Salmonella enterica subsp. enterica serovar Typhi
MKQQTNRNRRWVLASRPHGAPQMDNFRLEEDDVATPGEGQVLLRTVFLSLDPYMRGRMSDEPSYAPPVEPGCVMVGGTVSRVVASNHPDYRPDEWVLSYNGWQDYDISDGEGLVKLGDNPQHPSWSLGVLGMPGFTAYMGLLDIGQPKEGETLVVAAATGPVGATVGQIGKLKGCRVVGIAGGAEKCRHATDVLGFDLCLDHHADNFPQQLAQACPQGIDIYYENVGGKVFDAVLPLLNTSARIPLCGLVSGYNATTLPDGPDRLPLLMATLLKKRIRLQGFIINQDYGHRIHEFQQEMGRWIKEGKIHYREQITDGLENAPEAFIGLLAGKNFGKVVIRLADDA

SEQ ID NO: 20479 - protein, 329 aa, Homo sapiens
MVRTKTWTLKKHFVGYPTNSDFELKTSELPPLKNGEVLLEALFLTVDPYMRVAAKRLKEGDTMMGQQVAKVVESKNVALPKGTIVLASPGWTTHSISDGKDLEKLLTEWPDTIPLSLALGTVGMPGLTAYFGLLEICGVKGGETVMVNAAAGAVGSVVGQIAKLKGCKVVGAVGSDEKVAYLQKLGFDVVFNYKTVESLEETLKKASPDGYDCYFDNVGGEFSNTVIGQMKKFGRIAICGAISTYNRTGPLPPGPPPEIVIYQELRMEAFVVYRWQGDARQKALKDLLKWVLEGKIQYKEYIIEGFENMPAAFMGMLKGDNLGKTIVKA

SEQ ID NO: 20480 - protein, 329 aa, Homo sapiens
MVRTKTWTLKKHFVGYPTNSDFELKTAELPPLKNGEVLLEALFLTVDPYMRVAAKRLKEGDTMMGQQVAKVVESKNVALPKGTIVLASPGWTTHSISDGKDLEKLLTEWPDTIPLSLALGTVGMPGLTAYFGLLEICGVKGGETVMVNAAAGAVGSVVGQIAKLKGCKVVGAVGSDEKVAYLQKLGFDVVFNYKTVESLEETLKKASPDGYDCYFDNVGGEFSNTVIGQMKKFGRIAICGAISTYNRTGPLPPGPPPEIVIYQELRMEAFVVYRWQGDARQKALKDLLKWVLEGKIQYKEYIIEGFENMPAAFMGMLKGDNLGKTIVKA

SEQ ID NO: 20481 - protein, 351 aa, Homo sapiens
MIVQRVVLNSRPGKNGNPVAENFRMEEVYLPDNINEGQVQVRTLYLSVDPYMRCRMNEDTGTDYITPWQLSQVVDGGGIGIIEESKHTNLTKGDFVTSFYWPWQTKVILDGNSLEKVDPQLVDGHLSYFLGAIGMPGLTSLIGIQEKGHITAGSNKTMVVSGAAGACGSVAGQIGHFLGCSRVVGICGTHEKCILLTSELGFDAAINYKKDNVAEQLRESCPAGVDVYFDNVGGNISDTVISQMNENSHIILCGQISQYNKDVPYPPPLSPAIEAIQKERNITRERFLVLNYKDKFEPGILQLSQWFKEGKLKIKETVINGLENMGAAFQSMMTGGNIGKQIVCISEEISL

SEQ ID NO: 20482 - protein, 311 aa, Homo sapiens
MVRTKTWTLKKHFVGYPTNSDFELKTAELPPLKNGEVLLEALFLTVDPYMRVAAKRLKEGDTMMGQQVAKVVESKNVALPKGTIVLASPGWTTHSISDGKDLEKLLTEWPDTIPLSLALGTVGMPGLTAYFGLLEICGVKGGETVMVNAAAGAVGSVVGQIAKLKGCKVVGAVGSDEKVAYLQKLGFDVVFNYKTVESLEETLKKASPDGYDCYFDNVGGEFSNTVIGQMKKFGRIAICGAISTYNRTGPLPPGPPPEIVIYQELRMEAFVVYRWQGDARQKALKDLLKWVLEGKIQYKEYIIEGFENMPR

SEQ ID NO: 20483 - protein, 329 aa, Sus scrofa
MVRAKSWTLKKHFVGYPTPSNFELKTVELPPLKNGEVLLEALFLTVDPYMRIAARKLKEGDMMMGEQVARVIESKNAAFPTGTIVVALLGWTTHSISDGKNLERLLAEWPDTLPLSLALGTVGMPGLTAYFGLLDICGLKGGETVMVNAAAGAVGSVVGQIAKLKGCKVVGAAGSDEKVACLKKYGFDVAFNYKTIESLEETLKKASPEGYDCYFDNVGGEFSNAVTSQMKKFGRIAICGAISTYNRTGPPPPGPPPEVVIYNELCFQGFIVTRWQGEVRQKALRDLLKWVSEGKIQYHEHITEGFENMPAAFMGMLKGENLGKAIVKA

SEQ ID NO: 20484 - protein, 329 aa, Sus scrofa
MVRAKSWTLKKHFVGYPTPSNFELKTVELPPLKNGEVLLEALFLTVDPYMRIAARKLKEGDMMMGEQVARVIESKNAAFPTGTIVVALLGWTTHSISDGKNLERLLAEWPDTLPLSLTLGTVGMPGLTAYFGLLDICGLKGGETVMVNAAAGAVGSVVGQIAKLKGCKVVGAAGSDEKVACLKKYGFDVAFNYKTIESLEETLKKASPEGYDCYFDNVGGEFSNAVTSQMKKFGRIAICGAISTYNRTGPPPPGPPPEVVIYNELCFQGFIVTRWQGEVRQKALRDLLKWVSEGKIQYHEHITEGFENMPAAFMGMLKGENLGKAIVKA

SEQ ID NO: 20485 - protein, 356 aa, Salmonella typhimurium LT2
MMDYARHEENRMKQQTNRNRRWVLASRPHGAPQMDNFRLEEDDVATPGEGQVLLRTVFLSLDPYMRGRMSDEPSYAPPVEPGCVMVGGTVSRVVASNHPDYRPDEWVLSYNGWQDYDISDGEGLVKLGDNPQHPSWSLGILGMPGFTAYMGLLDIGQPKEGETLVVAAATGPVGATVGQIGKLKGCRVVGIAGGAEKCRHATDVLGFDLCLDHHADNFPQQLAQACPQGIDIYYENVGGKVFDAVLPLLNTSARIPLCGLVSGYNATALPDGPDRLPLLMATLLKKRIRLQGFIINQDYGHRIHEFQQEMGRWIKEGKIHYREQITDGLENAPEAFMGLLAGKNFGKVVIRLADDA

SEQ ID NO: 20486 - protein, 349 aa, Oryctolagus cuniculus
MVRAKNWTLKKHFHGHPTDSDFELKTVELPPLNNGEVLLEALFLSVDPYMRLGSKRLKEGDTMMGQQVARVVESKNPAWPVGTLVLAHSGWASHSISDGQQLEKLLTEWPDTLPLSLALGTVGMPGITAYFGLLEICGAKSGDTVLVNAAAGAVGAVVGQIAKIKGCRVVGAAGSEEKVDYLKKIGFDFAFNYKTVKSLEETLKKAAPDGYDCYFDNVGGEFSNTVIRQMKKFGRVAICGAISMYNSTGQLPPGPSPESVLYQEIRMEGFIFNRWKGEVGQKALKELLTWVLEGKIQYREFVIEGFENMPAAFMRMLKGENVGKARSESLKSGTCKPGDHPHDLIFPIT

SEQ ID NO: 20487 - protein, 345 aa, Arabidopsis thaliana
MTATNKQVILKDYVSGFPTESDFDFTTTTVELRVPEGTNSVLVKNLYLSCDPYMRIRMGKPDPSTAALAQAYTPGQPIQGYGVSRIIESGHPDYKKGDLLWGIVAWEEYSVITPMTHAHFKIQHTDVPLSYYTGLLGMPGMTAYAGFYEVCSPKEGETVYVSAASGAVGQLVGQLAKMMGCYVVGSAGSKEKVDLLKTKFGFDDAFNYKEESDLTAALKRCFPNGIDIYFENVGGKMLDAVLVNMNMHGRIAVCGMISQYNLENQEGVHNLSNIIYKRIRIQGFVVSDFYDKYSKFLEFVLPHIREGKITYVEDVADGLEKAPEALVGLFHGKNVGKQVVVVARE

SEQ ID NO: 20488 - protein, 350 aa, Arabidopsis thaliana
MATSGNATVANKQVILRDYVTGFPKESDLIFTDSTIDLKIPEGSKTVLVKNLYLSCDPYMRIRMGKPDPGTAALAPHYIPGEPIYGFSVSKVIDSGHPDYKKGDLLWGLVGWGEYSLITPDFSHYKIQHTDVPLSYYTGLLGMPGMTAYAGFYEICSPKKGETVFVSAASGAVGQLVGQFAKIMGCYVVGSAGSNEKVDLLKNKFGFDDAFNYKAEPDLNAALKRCFPEGIDIYFENVGGKMLDAVLLNMKLHGRIAVCGMISQYNLEDQEGVHNLANVIYKRIRIKGFVVSDYFDKHLKFLDFVLPYIREGKITYVEDVVEGLENGPSALLGLFHGKNVGKQLIAVARE

SEQ ID NO: 20489 - protein, 345 aa, Arabidopsis thaliana
MTATNKQVILKDYVSGFPTESDFDFTTTTVELRVPEGTNSVLVKNLYLSCDPYMRIRMGKPDPSTAALAQAYTPGQPIQGYGVSRIIESGHPDYKKGDLLWGIVAWEEYSVITPMTHAHFKIQHTDVPLSYYTGLLGMPGMTAYAGFYEVCSPKEGETVYVSAASGAVGQLVGQLAKMMGCYVVGSAGSKEKVDLLKTKFGFDDAFNYKEESDLTAALKRCFTNGIDIYFENVGGKMLDAVLVNMNMHGRIAVCGMISQYNLENQEGVHNLSNIIYKRIRIQGFVVSDFYDKYSKFLEFVLPHIREGKITYVEDVADGLEKAPEALVGLFHGKNVGKQVVVVARE

SEQ ID NO: 20490 - protein, 343 aa, Arabidopsis thaliana
MTTNKQVIFKDHVSGFPKESDFNFTTTTVELRVPEGSKSVLVKNLYLSCDPYMRSRMGKPDPSSALAQAYAPGKPIYGYGVSRVIESGHPDYKKGDLLWGIVGWEEYSVITPMAHMHFKIQHTDVPLSYYTGLLGMPGMTAYAGFYEVCSPKKGETVYVSAASGAVGQLVGQFAKMMGCYVVGSAGSKEKVDLLKTKFGFDDAFNYKEESDLSAALKRCFPKGIDMYFENVGGKMLDAVLLNMNPHGRIAVCGMISQYNLENQEGVHNLSNIIYKRIRIQGFVVADFYDKYPKFLELVLPRIKEGKITYVEDVADGLEKAPEALVGLFHGKNVGKQVVVIARE

SEQ ID NO: 20491 - protein, 351 aa, Arabidopsis thaliana
MTNAEAVTVTNKQIIFPDYVTGFPKESDLKITTTTIDLRLPEGSTSVLVKNLYLSCDPYMRICMGKPDPLSSSLVPPYKTGVPIIGLGVSKVIDSGHPDYKKGDLLWGLVGWEEYSVITLTTYSHFKIEHTDVPLSYYTGLLGMPGMTAYAGFYEVCSPKKGETVFVSAASGAVGQLVGQFAKLMGCYVVGSAGSKEKVDLLKTKFGFDDAFNYKEEKDFSAALKRYFPEGIDIYFENVGGKMLDAVLINMKLHGRVAVCGMISQYNLVDPEGVHNLPTILYKRIQLQGFGVCDFYDKYPKFLDFVLPYIREGKITYVEDIAEGFESGPSALLGLFEGKNVGKQLFVVARE

SEQ ID NO: 20492 - protein, 345 aa, Arabidopsis thaliana
MTATNKQVVLKNYVSGFPKESDFDFKTTTVEFKLPGGSNSVLVKNLYLSCDPYMRIRMGKPDPSTAALAQAYAPGKPIFGYGVSRVIESGHPDYKKGDLLWGIVGWEEYSVITPMTHMHFKIQHTDIPLSYYTGLLGMPGMTAYAGFYEVCSPKEGETVYVSAASGAVGQLVGQFAKMMGCYVVGSAGSTEKVDLLKTKFGFDDAFNYKEEPDLSAALKRCFPTGIDIYFENVGGKMLDAVLLNMNPHGRIAVCGMISQYNLENQEGVHNLSNIIYKRIRIQGFAVFDFYEKYSKFLDFVLPHIKEGKITYVEDVADGLEKGPEALVGLFHGKNVGKQVVVIARE

SEQ ID NO: 20493 - protein, 343 aa, Arabidopsis thaliana
  unsure (1)..(343): unsure at all Xaa locations
MTTNKQVIFKDHVXXFPKESDFNFTTTTVELRVPEGSKSVLVKNLYLSCDPYMRSRMGKPDPSSALAQAYAPGKPIYGYGVSRVIESGHPDYKKGDLLWGIVGWEEYSVITPMAHMHFKIQHTDVPLSYYTGLLGMPGMTAYAGFYEVCSPKKGETVYVSAASGAVGQLVGQFAKMMGCYVVGSAGSKEKVDLLKTKFGFDDAFNYKEESDLSAALKRCFPKGIDMYFENVGGKMLDAVLLNMNPHGRIAVCGMISQYNLENQEGVHNLSNIIYKRIRIQGFVVSDFYDKYPKFLELVLPRIKEGKITYVEDVADGLEKAPEALVGLFHGKNVGKQVVVIARE

SEQ ID NO: 20494 - protein, 351 aa, Arabidopsis thaliana
MTNAEAVTVTNKQIIFPDYVTGFPKESDLKITTTTIDLRLPEGSTSVLVKNLYLSCDPYMRICMGKPDPLSSSLVPPYKTGVPIIGLGVSKVIDSGHPDYKKGDLLWGLVGWEEYSVITLTTYSHFKIEHTDVPLSYYTGLLGMPGMTAYAGFYEVCSPKKGETVFVSAASGAVGQLVGQFAKLMGCYVVGSAGSKEKVYLLKTKFGFDDAFNYKEEKDFSAALKRYFPEGIDIYFENVGGKMLDAVLINMKLHGRVAVCGMISQYNLVDPEGVHNLPTILYKRIQLQGFGVCDFYDKYPKFLDFVLPYIREGKITYVEDIAEGFESGPSALLGLFEGKNVGKQLFVVARE

SEQ ID NO: 20495 - protein, 345 aa, Arabidopsis thaliana
MTATNKQVVLKNYVSGFPKESDFDFKTTTVEFKLPGGSNSVLVKNLYLSCDPYMRIRMGKPDPSTAALAQAYAPGKPIFGYGVSRVIESGHPDYKKGDLLWGIVGWEEYSVITPMTHMHFKIQHTDIPLSYYTGLLGMPGMTAYAGFYEVCSPKEGETVYVSAASGAVGQLVGQFAKMMGCYVVGSAGSTEKVNLLKTKFGFDDAFNYKEEPDLSAALKRCFPTGIDIYFENVGGKMLDAVLLNMNPHGRIAVCGMISQYNLENQEGVHNLSNIIYKRIRIQGFAVFDFYEKYSKFLDFVLPHIKEGKITYVEDVADGLEKGPEALVGLFHGKNVGKQVVVIARE

SEQ ID NO: 20496 - protein, 342 aa, Arabidopsis thaliana
MTTNKQVIFKDHVSFPKESDFNFTTTTVELRVPEGSKSVLVKNLYLSCDPYMRSRMGKPDPSSALAQAYAPGKPIYGYGVSRVIESGHPDYKKGDLLWGIVGWEEYSVITPMAHMHFKIQHTDVPLSYYTGLLGMPGMTAYAGFYEVCSPKKGETVYVSAASGAVGQLVGQFAKMMGCYVVGSAGSKEKVDLLKTKFGFDDAFNYKEESDLSAALKRCFPKGIDMYFENVGGKMLDAVLLNMNPHGRIAVCGMISQYNLENQEGVHNLSNIIYKRIRIQGFVVADFYDKYPKFLELVLPRIKEGKITYVEDVADGLEKAPEALVGLFHGKNVGKQVVVIARE

SEQ ID NO: 20497 - protein, 358 aa, Arabidopsis thaliana
MTATNKQVVLKNYVSGFPKESDFDFKTTTVEFKLPGGSNSVLVKNLYLSCDPYMRIRMGKPDPSTAALAQAYAPGKPIFGYGVSRVIESGHPDYKKGDLLWGIVGWEEYSVITPMTHMHFKIQHTDIPLSYYTGLLGMPGMTAYAGFYEVCSPKEGETVYVSAASGAVGQLVGQFAKMMGCYVVGSAGSTEKVDLLKTKFGFDDAFNYKEEPDLSAALKRFSELLISKRLMSLTVRIGIDIYFENVGGKMLDAVLLNMNPHGRIAVCGMISQYNLENQEGVHNLSNIIYKRIRIQGFAVFDFYEKYSKFLDFVLPHIKEGKITYVEDVADGLEKGPEALVGLFHGKNVGKQVVVIARE

SEQ ID NO: 20498 - protein, 353 aa, Arabidopsis thaliana
MANIGVVTTATNNQVILRNYVSGFPKESDLYIAATTVDLRVPPGSMAVLVKNLYLSCDPFSRIRMEKPDPSSPASLARAYSIGKPISGYGVAKAIDSGHPNYKTGDLLWGRVGWEEYSVINPTPSSHFKIHHADVPLSFYTGLLGIPGLTAYVGFYEICSPKKGETVFVSAASGAVGQLVGQFAKMAGCYVVGSASSKEKVDLLKTKFGYDDAFNYKEEHDLSAALKRCFPEGIDIYFENVGGKMLEAVLENMRTHGRIAACGMISQYNLKEPEGVHNLASIVYKRIRVQGFAAVEFFDKYSKFLDFILPYVREGKITYVEDIAQGLENGPSALIGLFHGKNVGKQLVAVARE

SEQ ID NO: 20499 - protein, 353 aa, Arabidopsis thaliana
MANISVVTTATNNQVILRNYVSGFPKESDLYIAATTVDLRVPPGSMAVLVKNLYLSCDPFSRIRMEKPDPSSPASVARAYSIGKPISGFGVAKAIDSCHPNYKTGDLLWGRVGWEEYSVITPTPSSHFKIHHTDVPLSFYTGLLGIPGLTAYVGFYEICSPKKGETVFVSAASGAVGQLVGQFAKMAGCYVVGSASSKEKVDLLKTKFGYDEAFNYKEEHDLSAALKRCFPEGIDIYFENVGGKMLDAVLENMRTHGRIAACGMISQYNLKEPEGVHNLASIVYKRIRVQGFAAVEFFDKYSKFLDFILPYVREGKITYVEDIAQGLENGPSALIGLFHGKNVGKQLVAVARE

SEQ ID NO: 20500 - protein, 353 aa, Arabidopsis thaliana
MANICIATTATNNQVILRDYVSGFPKQSDLYIATTTIDLRVPPGSMAVLVKNLYLSCDPHSRTRMGKPDPSSQASMAHAFTIGKPISGFGVAKAIDSGHPNYKTGDLLWGRVGWEEYSVITPTPSSHFKIHHTDVPLSFYTGLLGIPGLTAYVGFYEICSPKKGETVFVSAASGAVGQLVGQFAKMAGCYVVGSASSKEKVDLLKTKFGYDDAFNYKEEKDLSAALKRCFPEGIDIYFENVGGKMLDAVLQNMRTHGRIAACGMISQYNLKEPEGLHNTATIVHKRIRVQDFAAVEFFDRYSKFLDFILPHVREGKITYVEDIAQGLENGPSALIGLFHGKNVGKQLVEVARE

SEQ ID NO: 20501 - protein, 346 aa, Arabidopsis thaliana
MATKINKQVVLLDYVTGFAKESDLVITSTTIDLRVPKGSMTALVKNLYLSCDPYMRNRMRKPDPLSPATAQSFTPGKPISGFGVSKVIDSGHSDYEEGDLIWGAVGWEEYSVITPIPNLHFKIHHTNFPLSYYTGLLGMPGMTAYVGFYEICTPKKGDTVFVSAASGAVGQLVGQFAKLMGCYVVGSAGSKEKVDLLKNKFGFDDAFNYKEEHNLIGALKRCFPEGIDIYFENVGGKMLDAVILNMRPHGRIAACGMISQYNLKNPEGIYGLSLITYKRIRIEGFNCFDYFHKYSEFLEFVVPYIKEGKIKYVEDVADGLESAPAALVGLFHGKNVGKQLVLVSPS

SEQ ID NO: 20502 - protein, 346 aa, Arabidopsis thaliana
MATTINKQVVLLDYVTGFAKESDLVITSTTIDLRVLKGSMTALVKNLYLSCDPYMRNRMRKPDPLSPATAQSFTPGKPISGFGVSKVIDSGHSDYEEGDLIWGAVGWEEYSVITPIPNLHFKIHHTNFPLSYYTGLLGMPGMTAYVGFYEICTPKKGDTVFVSAASGAVGQLVGQFAKLMGCYVVGSAGSKEKVDLLKNKFGFDDAFNYKEEHNLIGALKRCFPEGIDIYFENVGGKMLDAVILNMRPHGRIAACGMISQYNLKNPEGIYGLSLITYKRIRIEGFNCFDYFHKYSEFLEFVVPYIKEGKIKYVEDVADGLESAPAALVGLFHGKNVGKQLVVVSPS

SEQ ID NO: 20503 - protein, 353 aa, Arabidopsis thaliana
MANICIATTATNNQVILRDYVSGFPKESDLYIAAATVDLRVPPGSMAVLVKNLYLSCDPHSRTRMGKPDPSSPTSMAHAFTIGKPISGFGVAKAIHSCHPNYKTGDLLWGRVGWEEYCVISPTPSSHFKIHHTDVPLSFYTGILGIPGLTAYVGFYEICSPKKGKTVFVSAASGAVGQLVGQFAKMVGCYVVGSASSKEKVDLPKTKFGYDDAFNYKEEQDLSAALKRCFPKGIDIYFENVGGKMLDAVLQNMRTHGRIAACGMISQYNLKESEVLHNTATIVHKRIRVQGFAAVEFFDRYSKFLDFILPHVREGKITYVEDIAQGLENGPSALIGLFHGKNVGKQLVEVARE

SEQ ID NO: 20504 - protein, 353 aa, Arabidopsis thaliana
MANIGVVTTATNNQVIFRNYVNGFPKESDLYIAASTVDLRVPPGSMAVLVKNLYLSCDPHSRTRMGKPDPSSPASMAHAFTIGKPISGFGVAKAIDSGHPNYKTGDLLWGRVGWEEYSVITPTPSSHFKIHHTDVPLSFYTGLLGIPGLTAYIGFYEICSPKKGETVFVSAASGAVGQLVGQFAKMAGCYVVGSASSEEKVDLLKTKFGYDDAFNYKEEKDLSAALKRCFPEGIDIYFENVGGKMLEAVLENMRTHGRIAACGMISQYNLKKPEVLHNTATIVHKRIRVQGFAAVEFFDRYSKFLDFILPHVREGKLTYVEDISQGLENGPSALIGLFHGKNVGKQLVEVARV

SEQ ID NO: 20505 - protein, 311 aa, Arabidopsis thaliana
MTTATNKQVILKDYVSGFPTESNFDFTTTTVELRVPEGTNSVLVKNLYLSCDPYMRICMGKPNPSTAALAQAYTPGQCYHLTHEHFKIQHTDVPLSYYTGLLGMPGMTAYVGFYEICSPKKGETVYVSAASGAVGQLVGQFAKMMGCYVVGSAGSKEKVDLLKTKFGFDYAFNYKEEPDLSAALKRCFPNGIDIYFENVGGKMLDAVLMNMNMHGRIAVCGMISQYNLENQEGVHNLSNIIYKRIRIQGFVVSDFYDEYSKFLEFLHPHIKEGKITYVEDVADGLEKGPEALVGLFHGKNVGKQVVVIARE

SEQ ID NO: 20506 - protein, 346 aa, Arabidopsis thaliana
METTVKNKQVILRNYVKGIPKESDLMIITASDPVELKVKPGSAAVMVRNLYLSCDPYMGILMREPTPSTLALLDAFIPGKPIAGIGVSQVIDSDDPSFTKGDMIWGIVNWEEFSTINPAAIFKIDVNINVPLSYYTGILGMIGLTAYAGFFEICSPKKGDTVFVSAASGAVGQLVGQFAKLMGCYVVGSAGSKQKVDLLLNKFGYDDAFNYKEEPDLDSALKRCVPKGIDIYFENVGGKMLDAVLLNMKTYGRIAVCGMISQYHLETRDRLQNLPDIIFKKIRMQGFASYDFIDRFPKFLEFVLPYIKEEKLAYVEDIVEGLENGPAALVGLLHGKNVGKQVLKVA

SEQ ID NO: 20507 - protein, 462 aa, Arabidopsis thaliana
METTVKNKQVILRNYVKGIPKESDLMIITASDPVELKVKPGSAAVMVRNLYLSCDPYMGILMREPTPSTLALLDAFIPGKPIAGIGVSQVIDSDDPSFTKGDMIWGIVNWEEFSTINPAAIFKIDVNINVPLSYYTGILGMIGLTAYAGFFEICSPKKGDTVFVSAASGAVGQLVGQFAKLMGCYVVGSAGSKQKVDLLLNKFGYDDAFNYKEEPDLDSALKRCVPKGIDIYFENVGGKMLDAVLLNMKTYGRIAVCGMISQYHLETRDRLQNLPDIIFKKIRMQGFASYDFIDRFPKFLEFVLPYIKEEKLAYVEDIVEGLENGPAALVGLLHGKNVGKQVLKGKKINPNSSDYNLRTTDSRVAMGILSWFTGSPKPSQSETSKPEMIQMPKSETPAPGMNGAIEVPRPDRATVFEFGSVAATGDRVTLAGYCPVSDDLEPCRWEILPADGKDAPQFRVVF

SEQ ID NO: 20508 - protein, 346 aa, Arabidopsis thaliana
METTVKNKQVILRNYVKGIPKESDLMIITASDPVELKVKPGSAAVMVRNLYLSCDPYMGILMREPTPSTLALLDAFIPGKPIAGIGVSQVIDSDDPSFTKGDMIWGIVNWEEFSTINPAAIFKIDVNINVPLSYYTGILGMIGLTAYAGFFEICSPKKGETVFVSAASGAVGQLVGQFAKLMGCYVVGSAGSKQKVDLLLNKFGYDDAFNYKEEPDLDSALKRCVPKGIDIYFENVGGKMLDAVLLNMKTYGRIAVCGMISQYHLETRDRLQNLPDIIFKKIRMQGFASYDFIDRFPKFLEFVLPYIKEEKLAYVEDIVEGLENGPAALVGLLHGKNVGKQVLKVA

SEQ ID NO: 20509 - protein, 329 aa, Botryotinia fuckeliana
MDGQKIKRSKNIMAQSTYQSVVLAKRPTGQIVPGETFEKKENPMVTEADLKDDQVLVEVLYLSLDPAMRDRRSYVPPVQIGEVMRGVSIGKVIASKSSKFNVGDYASGITGWKEVAIMASKDLTPIELPPNGKLTDALGVLGMTGLTAYFGILEVGKIKAGDFVVVSGAAGATGSVVCQIAKLKGAKVLGLAGSDDKVQWLKELGCDDALNYKDKEFPSKFKAATPNFIDVFFDNVGGEILELALSRAKPFSTFVMCGAISQYNSDTPVGPKNFSMIIAMRIRLQGFIVFDYASKYAEARKEMSQWLAEGKLQRKETIVKGGLGVAEKA

SEQ ID NO: 20510 - protein, 343 aa, Nicotiana tabacum
MAEEVSNKQVILKNYVTGYPKESDMEIKNVTIKLKVPEGSNDVVVKNLYLSCDPYMRSRMRKIEGSYVESFAPGSPITGYGVAKVLESGDPKFQKGDLVWGMTGWEEYSIITPTQTLFKIHDKDVPLSYYTGILGMPGMTAYAGFHEVCSPKKGETVFVSAASGAVGQLVGQFAKMLGCYVVGSAGSKEKVDLLKSKFGFDEAFNYKEEQDLSAALKRYFPDGIDIYFENVGGKMLDAVLVNMKLYGRIAVCGMISQYNLEQTEGVHNLFCLITKRIRMEGFLVFDYYHLYPKYLEMVIPQIKAGKVVYVEDVAHGLESAPTALVGLFSGRNIGKQVVMVSRE

SEQ ID NO: 20511 - protein, 377 aa, Triticum aestivum
QTHPTERRRGFHSTPYLRRLLQITNSSARPRKEAMAEVSNKRVILKRYVTGFPSEDDMELVPATARLAVPPGSAAVVVKNLYLSCDPYLRSRMSGNDEPSHVPDFVQGEVLTTLGVSKVVESGHQDYKPGDLVWGLTGCEEYTLITDLQSHFKINHPELPLSYYTGVLGMPGLTAYVGFFDVAKPKKGDYVFVSAASGAVGQLVGQLAKISGCYVVGSAGSDEKVNLLKTKFGFDDAFNYKKEQDLDATLKRCFPEGIDIYFENVGGAMLDAVLLNMRLHGRVSVCGLISQYNLEQSEGVRNLFCIITKRIRMEGFIVTDHYGSYRKFEEEMAGYLKEGKITYVEDVAEGIESFPTALIGLFYGRNIGKQLVVVARE

SEQ ID NO: 20512 - protein, 345 aa, Zea mays
  unsure (1)..(345): unsure at all Xaa locations
MAGQEVANKRVVLKRYVTGFPGADDMEVVTGTARVAVPPGSTAMVLKNLYVSCDPYMRGRMTKHESSYVPDFVVGEVLENFGVCKVIASGHQDFKVGDLVWGMTGWEEYTLIHNPESFFKINHPELPLSYYTGVLGMPGLTAWAGFFDVGKPKKGDCVFVSAASGAVGQLVGQFAKLTGCYVVGSAGSDEKVNLLKTKFGFDEAFNYKKEQDLDAAXLRRYFPEGIDIYFENVGGSTLEAVLPNMRIHGRIPTCGMISQYNLEEPEGVHNLFEIIAKRLRMEGFMVFDYYGQYHKFEQEMAGYLKAGKIAYVEDIAEGLEKAPEALIGLFTGRNVGKQLVAIARE

SEQ ID NO: 20513 - protein, 379 aa, Neurospora crassa
MFHHTHGYKSHSLQLELVHRPSGPIIPGHTFRVSAVPAPVPSDLNEGDLLLETLYISLDPAMRGWLDDVRSYVPPVQIGEVMRAFCICRVLASRSPKAAAGDIVTAMNGIREIGILSDRHIEKPAFLPPGGKTTDLLGVLGMTGLTAYFGMMKIGNVKRGDTVVVSAAAGATGSVAVQIARIQGAKRVVGTAGSDEKCRWLVEEGGADVALNYKDPEFRRKFKEATPDFVDVYFDNVGGEQLNMALARANRGARFVMCGGISQYNAEHKQGPKVGGFHLLGTISAMECSTDKFQNINNVITMRIRMEGFIVFDYKDEYPTALGQLAQWLAEGKLKRKETILKGGVRVADEGMVQLYKGGNIGKLLIEVKNPDEERQSRL

SEQ ID NO: 20514 - protein, 358 aa, Triticum aestivum
SCSPPTAAMAELKSRRVILKDYVEGYPTEAHMELLPAAPVDEAEEGSVLVKNLYLSCDPYMRPKMSRPLHQSYTAAFVPGAAITGYGVSEVVRSSRPGLAARAHVWGMTGWEDYSVITFTAIPGTIHRPPPPPPLPPGRRGGPRLPALRRRHHICSPEAGATVFVSAASGAVGQLVGQFARLLGCHVVGSAGSKEKVDLLINKFGFHDAFNYKEEDADLAGALKKRFPDGIDVYFENVGGKMLEAVLLNMKVHGRIAVCGLISQYNLTAGEKDADVGVRNLTSLVSKRIKMQGFIEPDHKHLYPEYMAWVLPHIKEGRVVYVEDVADGLDAAPAALIGLYHGRNVGKQVVRLTNPDPK

SEQ ID NO: 20515 - protein, 329 aa, Cavia porcellus
MATGQKLMRAIRVFEFGGPEVLKVQSDVAVPIPKDHQVLIKVHACGINPVETYIRSGTYTRIPLLPYTPGTDVAGVVESIGNDVSAFKKGDRVFTTSTISGGYAEYALASDHTVYRLPEKLDFRQGAAIGIPYFTACRALFHSARAKAGESVLVHGASGGVGLAACQIARAYGLKVLGTAGTEEGQKVVLQNGAHEVFNHRDAHYIDEIKKSIGEKGVDVIIEMLANVNLSNDLKLLSCGGRVIIVGCRGSIEINPRDTMAKESTISGVSLFSSTKEEFQQFASTIQAGMELGWVKPVIGSQYPLEKASQAHENIIHSSGTVGKTVLLM

SEQ ID NO: 20516 - protein, 368 aa, Rhodobacter sphaeroides
MPARAGGHFTAAAATGMRPRPPDSSGPDRRRSSPPIEEIRVSLPETMRAIEISRPGGPEVLRPATVPVPVPGHGQILIRVAYAGVNRPDALQRAGAYAPPPGASPLPGLEASGTVAAVGPGVTRWRVGEEVCALLPGGGYADYAVTPADHALPVPSGLTLREAACLPETCFTVWSNVALRGGLRAGERFLVHGGSSGIGTTAIQLAAALGARVFATAGSEEKCAACRALGAERAINYREEDFVAVLKAEGGADLILDMVGGSYLPRNVKALATEGRLVQIAFLEGTKVELNFAEVMMRRLTITGSTLRPQSDLAKARYARDIETQVWPLVARGALRPVIDSEFPIEQAAEAHARMEGSSHIGKIVLKL

SEQ ID NO: 20517 - protein, 2546 aa, Burkholderia mallei
MVNTKIAIIGASCRFPGGVAGLEEYWQLLKSERDAVTEIPPERFGTDFYRHPSKREPGKSYTFSAGVLDNVAGFDAAFFGISPREATQMDPQQRLLLELAWEAFEDAGVRPADMRGSNCGVYVGVAGTDYGNRSMDDLNAIDPYSATGNTLSIASNRVSYLFDLRGPSMSVDTACSSSLVALHQAVQALQSGEAETALAGGVNLLLHPFGFVSFSKASMLSPRGRCRAFDATGDGYVRAEGGAFVLLKPLDRAIADGDTIHAVIAGSGVNSVGHSPGGISVPGAAAQAALLRSVYARAGVDPQSLAYLEAHGTGTAVGDPIEARALIDVVSGARPADRPLLIGSVKTNIGHLETASGMAGLLKAVLCLKHRAVPRSLHFSIPNPAIDFDGGRLRVVDRYMPLEAGNAPLTVGVNSFGFGGTNAHIVLTEAPVSAAVADDVPTSATQAARAPSALVLTARSPNALGALANRYLAALENGGDWQALAAAAARRRQWLEHRAIVAPADAAEGRAALAALARPAPEGGPSCVTTGRAPADAPRTALVFSGNGCQWVGMGNALYAEDAVFRAALDEVDALWCADGSPSLVDVMRGGPGAQWLAGAGAEWLAATENAQPLLFAIQVGMIRVIDARGMRYDAAIGHSVGEVAAAWVTGALSLTDAVRVIKIRSRAQAMTRGCGRMAAVGIGDAAARELIARHGLARRVEIAGVNSPDAVTLAGEPQGLQVLEAALRGSGKFFQMLDLDYAFHSSHMDRIEPVVLAGLAGLRPQPGNGAFVSTVTGGALAGSELDARYWWRNIREPVRFGDGIAHLIEQGVRLFVEVSPHSILRTYVKQALAAAGVTGVALPTLKRDHGSAATLRQAILAAIAHGASVDPDRFAPGASRAALPSYPWQRERFWLTPTVEGYGLVNRRREHPLLGYRLHEHAFAWENQLDPAKLPMLADHVVDGGVAFPGAGYVEMALAAACTFFDTPDAALENVEIRMPVVFQPQQAKLFRLVIEPRTATFTIETRDRMSDGAWTLNVTGRMLESGNALGTASVVPSDMLERLLALPAADGDMLYANTAAIGLGYGPAFRWVRTVRLAEGDDAALADVAAPDACGDARTLSAYRLHPALMDSGFHPLFALLAAHARDGEHPAYVPVQIGRVDYLRGDTVARVLARIDRRSPHSIVAHFEFLDAQGAIVARLGACRFRRVDLVGRRQNLPARFVYRLEAMPLPGDVDAAGLPAPDALLARAVARLDAGHDGRRTRHLTEILPLLDVLASLYVLQAFDALGAFAGTWRPAHGCAALAARLADMLVEDGLAHRDGDRLVRDDAACAALPPLDELWRGLLAESPAHVAELTLLAHCGSALPGVLSGAKDGTRLLSPTGHSLVEHLLAASPTWQHVYALLTASVEQAVDAWQPARRLRVLELGATDGDVLQTLGMHLAPARCDHTIAATAGQLAGFGADAQAAVTTVALQPGERLSLAADEAGPYDVIVANRALSGRRDVADALNAMRSWLAPGGLLLLAESRRGRFSDIVFGMQAPSTQTDAPAPLAPADLEAALAHAGYVGVVRHVEQSLDLEGTPMFVIARNPASAVAAPSGGDSSDLDTLARSEQWLVLHAPDVVGGFGARLADALAHAGYPADIVEITHAADAIASLPAGQPAHVVFCAPETPLAEAATGDDLMAAQRNGVIALAALVRVLGAQPNATTRLTIVTRGGAPFAGTAHAHPEQATLWGLGRVLANEHPELACRLIDIDCAADRIPEALIRELTGAALEEEVVLGAHGRRVPRMLTAAQDAARNDGAIARAAVLAFDAPGSLRNLEWFALAESALGADEVEIEPVATGLNFRDVMYAMGLLSDEAVETGFAGATIGMELSGRVVRVGSAVTEFAPGDAILGFAPASFATRVRTRAQAIAPKPERLSFEEAATVPTTFFTAYYALVELARLRRGERVLVHGGAGGVGIAAIQLARYFGAEVFATAGSDEKREFVRLLGADHVLDSRSLAFADEIRAMTGGEGIDIVLNSLAGEAMVRSIDTLRPFGRFLELGKRDFYENSHIGLRPFRNNISYFGIDADQLMGALPELTARLFGDVMGLFAAGVLHPLPYRAFPAERAEDAFRYMQQARQIGKVLVTYPCGTPAPTHGAARADSLALDPHGAYLVVGGTGGLGFASARWMVERGARRLTLASRSGELAVAARDEIECWRATLGVAVDIVSCDVTDAAAVDAMIAAIVRRDIPLKGVLHSAMTIDDGLVRNLDDARMAAVLAPKVAGAWNLHRATRSLPLDLFVVYSSATTYLGNPGQSNYVAANSFLEALVEHRRAAGLPGTFMAWGPLEDVGFLARHADTREALQSRIGGASITSGEAMIALERALVAGAAGEAVVRLDWHAVARGMPAAKARRYSLLQSHANGGDARDGGTQLREEVLALPRDEAIALVAGTLQAQIARILHMTPDRIALDKSVLDMGMDSLMGMELGLAVEEAFEVKLSVMAIAEGASAMTLAGRIVDSIGASADAGAGAAADSAHEAVAALAAKHAIDGDARAVLDIRPAPVAGQVSPTLEVAR

SEQ ID NO: 20518 - protein, 184 aa, Enterococcus faecium
MQEQVVWRTAAIQLARQLSHAKIIVTAGSEEKLAFCKELGADELINYKKQDFQEEVRKIPEGRGVDVILDFIGASYWEKNLASIAVDGRWVLIGMLGGTIVPEIDLGVLIGKRVQLLGTLLTPRSDQYKAELAQTFMQKAGPFLENGKIRPIIDRTFQFSAVKQAHEYMEANKNIGKIILKITE

SEQ ID NO: 20519 - protein, 352 aa, Acinetobacter sp. SE19
MHCYCVTHHGQPLEDVEKEIPQPKGTEVLLHVKAAGLCHTDLHLWEGYYDLGGGKRLSLADRGLKPPLTLSHEITGQVVAVGPDAESVKVGMVSLVHPWIGCGECNYCKRGEENLCAKPQQLGIAKPGGFAEYIIVPHPRYLVDIAGLDLAEAAPLACAGVTTYSALKKFGDLIQSEPVVIIGAGGLGLMALELLKAMQAKGAIVVDIDDSKLEAARAAGALSVINSRSEDAAQQLIQATDGGARLILDLVGSNPTLSLALASAARGGHIVICGLMGGEIKLSIPVIPMRPLTIQGSYVGTVEELRELVELVKETHMSAIPVKKLPISQINSAFGDLKDGNVIGRIVLMHEN

SEQ ID NO: 20520 - protein, 328 aa, Lactococcus lactis subsp. lactis
MKAIGTIDSSKNFIDFEIEKPILRPHDLLIKVEAISINPVDTKVRKGIKGNLAEPKILGWDGLGTVVELGSETKLFKVGDKVFWAGDVTRSGSNAEFQAVDERIVGFAPKNLTKEKAVAMPLTSLTAYELLFEKLEVTDKSKGKSLLIINGAGGVGSVAIQMAKNAGLTVIATASNPQAIEWVKNFGADYTVNHHEKLVPQVHELGFKFVDYILILNAVVEHMPAVNELIAPQGSIANIVEPGQAINLDQLAHKSARFNFEWMFTKVVSNTSDLQSQHDILNKVSEWLDNDVLKSTMTQNLGPITAENVKKAHELIEENHTIGKIILS

SEQ ID NO: 20521 - protein, 167 aa, Bacillus cereus
LRKRASIPLVGLTSYQALHDIMQLQKGQKILIHAGSGGVGTFAIQLAKIMGATVTTTASEAGANLVTSLGADEIINYKTEKFEDILKNYDAVFDTIGGATLEKSFNIIKSEGNIVSVSGMPNARFGKEFGSGFFKTLLFSLASKKLTALEKKHNAQYSFLFMKPSGD

SEQ ID NO: 20522 - protein, 327 aa, Escherichia coli O157:H7 EDL933
MATRIEFHKHGGPEVLQAVEFTPADPAENEIQVENKAIGINFIDTYIRSGLYPPPSLPSGLGTEAAGIVSKVGSGVKHIKAGDRVVYAQSALGAYSSVHNINADKAAILPAAISFEQAAASFLKGLTVYYLLRKTYEIKPDEQFLFHAAAGGVGLIACQWAKALGAKLIGTVGTAQKAQSALKAGAWQVINYREENLVERLKEITGGKKVRVVYDSVGRDTWERSLDCLQRRGLMVSFGNSSGAVTGVNLGILNQKGSLYVTRPSLQGYITTREELTEASNELFSLIASGVIKVDVAEQQKYPLKDAQRAHEILESRATQGSSLLIP

SEQ ID NO: 20523 - protein, 317 aa, Vigna radiata
MTSIPSHMRAWIYSEYGNIEEVLKFDPNVPTPHLMENQVLIKVVAAAINPVDYKRALGHFKDIDSPLPTAPGYDVAGVVVKVGNQVKKFQVGDEVYGDINEVTLDHPKTIGSLAEYTAVEEKVLAHKPSNLSFVEAASLPLAIITAYQGLETAQFSVGKSILVLGGAGGVGSLVIQIAKHIFGASKIAATGSTGKLELFENLGTDLPIDYTKENFEELAEKFDVVYDAVGQSERALKSVKEGGKVVTIVAPATPPAIPFLLTSDGDLLEKLRPYLENGQVKPILDPKSPFPFSQTVEAFSYLKTNRATGKVVIYPIP

SEQ ID NO: 20524 - protein, 335 aa, Staphylococcus aureus subsp. aureus Mu50
MKMIGFEKPFKLEEGNLFKVYEQRKPTPENDDILVKVNSISVNPVDTKQRQMKVTQAPRVLGFDAIGTVEAIGPDVTLFSPGDVVFYAGSPNRQGSNATYQLVSEAIVAKAPHNISANEAVSLPLTGITAYETFFDTFKISHNPSENVGKSVLIINGAGGVGSIATQIAKRYGLTVITTASRQETTEWCEKMGADIVLNHKEDLVRQFKEKEIPLVDYIFCTYNTDLYYNTMIELIKPLGHITTIVAFNEDQDLNALKLKSITFTHEFMFARPIHRTPDMIKQHEYLEDITKNIELGHYQPTTTQVFEGLSPENLYQAHQLLEKQSMIGKLVINI

SEQ ID NO: 20525 - protein, 320 aa, Pseudomonas putida KT2440
MKALQGVDGHVEWVEAERPTCDAGQVRIRVAAAGLNRADLLQMKGLYPPPPGASPYMGLECSGVVEEVGAGAAWRVGDRVCALLASGAMAEEVVVDARHVLPVPEGLGLHEAAALPEVYATAWLNIFQLGAVKAGEKVLVHAGASGVGSAAIQLCKAFGSPVWVSVGSQDRLAYCQALGAAGGVVRNENLDALEGFGPFDVILDPVGASYGELNLKLLARDGRWVIIGLMGGRKFELDLAQVLGKRLEITGSTLRNRDDGFKAELLRELQQQVWPLFAEGRLSPQLVDTYPVEFAQAAYAELETNQVSGKLVMVIDPSLV

SEQ ID NO: 20526 - protein, 332 aa, Listeria innocua
MKVVGLTKASTDFVDMEIKQPVPENHDLLVKIKAISINPVDTKQREATKLTGDEVRILGWDAVGEVVEIGSKVTLFKTGQEVYFAGDVTRPGAYAEFTLIDERLVGLKPKHLSLEEAAAMPLTTITAWEALFDRLGIVEADKGKSILIINGAGGVGSIATQLAANIGLNVIATASREETIEWTKKHGANHIINHRENLTKQLKELGFEQGVDFILCLHNTNAHWDDMQEAIRPQGKICSIVELAEPVKMSLLKDKSATFSYEFMFTRSKYNTEDKIKQHEILTEAARMLDKGDLTSTLNKVLSPVNAKTIEEAHKIISSGKMIGKLVVKGFE

SEQ ID NO: 20527 - protein, 313 aa, Listeria innocua
MKAVVIENYGGKEELKEKEVAMPKAGKNQVIVKEVATSINPIDWKLREGYLKQMMDWEFPIILGWDVAGVISEVGEGVTDWKVGDEVFARPETTRFGTYAEYTAVDDHLLAPLPEGISFEEAASIPLAGLTAWQALFDHAKLQKGEKVLIHAGAGGVGTLAIQLAKYAGAEVITTASAKNHELLKSLGADQVIDYKEVNFKDVLSDIDVVFDTMGGQIETDSYDVLKEGTGRLVSIVGISNEDRAKEKNVTANGIWLQPNGEQLKKLGELLANKTVKPIVGATFPFSEKGVFDAHALSETHHAVGKIVISFNK

SEQ ID NO: 20528 - protein, 347 aa, Sulfolobus sp. RC3
MRAVRLVEIGKPLVLKDIDIPKPKGAQVLIKVEAAGVCHSDVHMRQGRFGNLRIVEDLGVKLPVTLGHEIAGKIEEMGDEVVGYSKGDLVAVNPWQGEGNCYYCRIGEEHLCDSPRWLGINFDGAYAEYVLNPHYKYMYKLRRLNAVEASPLTCSGITTYRAVRKASLDPTKTLVVVGAGGGLGTMAVQIAKAVGGATIIGVDVREEAVETAKRAGADYVINASVQDPLAEIRRITEGKGVDAVIDLNNSEKTLSVYPKALAKQGKYIMVGLFGADLHFHAPLITLSEIQFVGSLVGNQSDFLGIMRLAEAGKVKPMITKTMKLEEANEAIDNLENFKAVGRQVLIP

SEQ ID NO: 20529 - protein, 313 aa, Listeria monocytogenes EGD-e
MKAVVIENYGGKEELKEKEVAMPKAGKNQVIVKEAATSINPIDWKLREGYLKQMMDWEFPIILGWDVAGVISEVGEGVTDWKVGDEVFARPETTRFGTYAEYTAVDDHLLAPLPEGISFDEAASIPLAGLTAWQALFDHAKLQKGEKVLIHAGAGGVGTLAIQLAKHAGAEVITTASAKNHELLKSLGADQVIDYKEVNFKDVLSDIDVVFDTMGGQIETDSYDVLKEGTGRLVSIVGISNEDRAKEKNVTATGIWLQPNGEQLKELGKLLANKTIKPIVGATFPFSEKGVFDAHALSETHHAVGKIVISFNK

SEQ ID NO: 20530 - protein, 332 aa, Listeria monocytogenes EGD-e
MKAVGLTKASTDFVDIEIDKPVPENHDLLVKIKAISINPVDTKQREAAKLSGEEVRILGWDAVGEVVDTGSEVTLFQTGQDVYFAGDVTRPGVYAEYTLIDERLVGLKPHNLNVEEAAAMPLTTITAWEALFDRLTITENDKGKSILIINGAGGVGSIATQLAANTGLEVIATASRSETVEWTKSHGANYVINHRENIPEQLEELGFKKGVDFILCLHNTSAHWDEMQEAIRPQGKICSIVELTEPVEMTLLKDKSATFSYEFMFTRSKYDTADKIRQHEILTEAAHMLDKGNLTTTLNQVLSPVNAATIEEAHKIISSGKMIGKLVVKGFE

SEQ ID NO: 20531 - protein, 336 aa, Staphylococcus epidermidis ATCC 12228
MKAIGFKSSFQLDEGNCFEEFNFDIPHPSGHELLVKVQSISVNPVDTKQRTMPVDKVPRVLGFDAVGVIEKIGDQVSMFQEGDVVFYSGSPNQNGSNEEYQLIEEYLVAKAPTNLKSEQAASLPLTGLTAYETLFDVFGISKEPSENKGKSLLIINGAGGVGSIATQIAKFYGLKVITTASREDTIKWSVNMGADVVLNHKKDLSQQFKDNHIEGVDYIFCTFDTDMYYEMMVNLVKPRGHIATIVAFNSQQDLNLLKSKSVTFTHEFMFSRPLHHTDDVIKHHEYLKDITEKVEQGYYQPTTTKVIDGLDVDSLYEAHQILESHSMIGKLVINLK

SEQ ID NO: 20532 - protein, 315 aa, Staphylococcus epidermidis ATCC 12228
MRKVSYNEHGGPKVLEYSDNNEVPSIESNEILVKVISTSFNPADAMIREGMLKDVLPIAFPFTPNVDVAGKIEKVGPDVKNFNVGDNIIGFLNMHENGAAADYVVTHPENLVLAPSNISIEDSGVIPSVSLTAWQALFDHYHLQSNDRILITGAAGGVGTFAVQLAKDRGAYVIGTASERSYELLQDINIDEIINYKTEEVTKDRTGKLDYILNLAPISSEGLEQLLPLLKKGGTLVSTLNTVTDQALDKYDVNVVRMAVTMNQEELDQIVNKIDNGNIKPIITKRDTLENLQMIHENRNDYNGKVLITVNEKND

SEQ ID NO: 20533 - protein, 2110 aa, Mycobacterium bovis
MESRVTPVAVIGMGCRLPGGINSPDKLWESLLRGDDLVTEIPPDRWDADDYYDPEPGVPGRSVSRWGGFLDDVAGFDAEFFGISEREATSIDPQQRLLLETSWEAIEHAGLDPASLAGSSTAVFTGLTHEDYLVLTTTAGGLASPYVVTGLNNSVASGRIAHTLGLHGPAMTFDTACSSGLMAVHLACRSLHDGERDLALAGGCAVLLEPHACVAASAQGMLSSTGRCHSFDADADGFVRSEGCAMVLLKRLPDALRDGNRIFAVVRGTATNQDGRTETLTMPSEDAQVAVYRAALAAAGVQPETVGVVEAHGTGTPIGDPIEYRSLARVYGAGTPCALGSAKSNMGHSTASAGTVGLIKAILSLRHGVVPPLLHFNRLPDELSDVETGLFVPQAVTPWPNGNDHTPKRVAVSSFGMSGTNVHAIVEEAPAEASAPESSPGDAEVGPRLFMLSSTSSDALRQTARQLATWVEEHQDCVAASDLAYTLARGRRHRPVRTAVVAANLPELVEGLREVADGDALYDAAVGHGDRGPVWVFSGQGSQWAAMGTQLLASEPVFAATIAKLEPVIAAESGFSVTEAITAQQTVTGIDKVQPAVFAVQVALAATMEQTYGVRPGAVVGHSMGESAAAVVAGALSLEDAARVICRRSKLMTRIAGAGAMGSVELPAKQVNSELMARGIDDVVVSVVASPQSTVIGGTSDTVRDLIARWEQRDVMAREVAVDVASHSPQVDPILDDLAAALADIAPMTPKVPYYSATLFDPREQPVCDGAYWVDNLRNTVQFAAAVQAAMEDGYRVFADVSPHPLLTHAVEQTGRSLDMSVAALAGMRREQPLPHGLRGLLTELHRAGAALDYSALYPAGRLVDAPLPAWTHARLFIDDDGQEQRAQGACTITVHPLLGSHVRLTEEPERHVWQGDVGTSVLSWLSDHQVHNVAALPGAAYCEMALAAAAEVFGEAAEVRDITFEQMLLLDEQTPIDAVASIDAPGVVNFTVETNRDGETTRHATAALRAAEDDCPPPGYDITALLQAHPHAVNGTAMRESFAERGVTLGAAFGGLTTAHTPRREPRRCWPRSRCPRRSGSSRAPTESTRRCWTLVSSRSARASSRYGHWWPAVAVGCAQPACLRAYPQCPLLLHAVDQGLQRRDPRWEADLDVLDEHGTVLLAVRGLRMGTGTSERDERDRLVSERLLTLGWQQRALPEVGDGEAGSWLLIDTSNAVDTPDMLASTLTDALKSHGPQGTECASLSWSVQDTPPNDQAGLEKLGSQLRGRDGVVIVYGPRVGDPDEHSLLAGREQVRHLVRITRELAEFEGELPRLFVVTRQAQIVKPHDSGERANLEQAGLRGLLRVISSEHPMLRTTLIDVDEHTDVERVAQQLLSGSEEDETAWRNGDWYVARLTPSPLGHEERRTAVLDPDHDGMRVQVRRPGDLQTLEFVASDRVPPGPGQIEVAVSMSSINFADVLIAFGRFPIIDDREPQLGMDFVGVVTAVGEGVTGHQVGDRVGGFSEGGCWRTFLTCDANLAVTLPPGLTDEQAITAATAHATAWYGLNDLAQIKAGDKVLIHSATGGVGQAAISIARAKGAEIFATAGNPAKRAMLRDMGVEHVYDSRSVEFAEQIRRDTDGYGVDIVLNSLTGAAQRAGLELLPFGGRFVEIGKADVYGNTRLGLFPFRRGLTFYYLDLALMSVTQPDRVRELLATVFKLTADGVLTAPQCTHYPLAEAADAIRAMSNAEHTGKLVLDVPRSGRRSVAVTPEQRPLYRRDGSYIITGGLGGLGLFFASKLAAAGCGRIVLTARSQPNPKARQTIEGLRAAGADIVVECGNIAEPDTADRLVSAATATGLPLRGVLHSAAVVEDATLTNITDELIDRDWSPKVFGSWNLHRATLGQPLDWFCLFSSGAALLGSPGQGAYAAANSWVDVFAHWPRAQGLPVSAIAWGAWGEVGRATFLAEGGEIMITPEEGAYAFETLVRHDRAYSGYIPILGAPWLADLVRRSPWGEMFASTGQRSRGPSKFRMELLSLPQDEWAGRLRRLLVEQASVILRRTIDADRSFIEYGLDSLGMLEMRTHVETETGIRLTPKVIATNKTARALAQYLADTLAEEQAAAPAAS

SEQ ID NO: 20534 - protein, 336 aa, Mycobacterium leprae
MHAIVAESANQMVWREVPDVTAGPGEVLIEVAASGVNRADVLQVAGKYPHPPGASAIIGMEVAGVVAAVSSGVTEWSVGQEVCALLAGGGYAEYVAVPASQVMPIPKGVNVVDSAGIPEVACTVWSNLVMAAHLSAGQLLLLHGGTSGIGSHGIQVARALGAKVAVTAGSEEKLEFCRALGAQITINYRDEDFVARLQQQNGGADVILDIMGAAYLDRNIDALAIDGQLIVIGLQGGVKGELNLGKVLSKRARIIGSTLRARPVNGPNSKSEIVAAVTASIWPMIADGSVRPIIGARMAVQQAADAHQLLLSGKVSGKIVLTVAGSGTETLLSRHH

SEQ ID NO: 20535 - protein, 2201 aa, Mycobacterium leprae
MTASTPDRRAIITEALHKIDDLTARLEIAEKSSTEPIAVIGMGCRFPGGVNNPEQFWDLLCDGRSGIVRVPSDRWDADAYYTDDHTVPGTICSTEGGFLTGWQPDEFDAEFFSISPREASAMDPQQRLLIEVAWEALEDAGVAPHTIRGTQTSVFVGVTAYDYMLTLAGRLRPEDLDAYIPTGNSANFAAGRLAYILGVRGPAVVIDTACSSSLVAVHLACQSLRHRESDAALVGGTNLLLSPGPSIACSRWGMLSPAGQCKAFDVSADGYVRGEGAGVVVLKRLDDAVRDGNRILAIVRGSAVNQDGASSGVTVPNGPAQQELLRTALASSKLTAADIDYIEAHGTGTPLGDPIELDSLSKVFSDRQSRRGSVPLVIGSVKTNLGHLEAAAGIAGFIKAVLAVQRGFIPRHLNFHQLTTHASEAASRLNIASEGLEWPTVGRPRRAGVSSFGVSGTNAHVVLEQAPDPVAVPAPGPALRLVPAVSTLVVSGKTVQRVAATASVLADWMEGPGAAVPLTDVAHTLNHHRARHTKFGTVAAVDRGQAVAGLRALAAGQSTSGVVAPRDSVVGPGTVFVYSGRGSQWAGMGRQLMADEPAFAEAIAKLEHEFVVQAGFSLHEVIANGKELVGIEQIQLGLMGMQLALTELWRSYGVEPDAVIGHSMGEVAAAVVAGALTPTQGLRVTATRSRLMAPLSGQGTMALLELDAVATEALIADYPQVSLGIYASPRQTVIAGPTAMIDALIDKVRQQDGFATRVNIEVAPHNPAMDALQPQMRSELADLTPQQPTIPIISTTYEDFGSTPVFDVEHWATNMRNPVRFQQAITHASSGVGGDYHTFIEISAHPLLTHSISDILCSIAGTAEENAVGAGYLSIGTLQRDAHDTLEFHTNLNATHTSRPPRTPHPPEPHPVLPITPWQHTRHWISAMSAAYHRADTHPLLGVGVTDPTSGTRVWESQLGPDLLWLGDHVIDDLCVLPGAAYAEVALAAATDTFPNERVEGDQPWMIYELDLHQVLHVTEGTVLVTTLTGDQQRCRIEMRTRNGFSGWTTHATATVGPAESVQPSDREERTATPVDVVDELGPEDLYQRLCSAGQQHGPAFQGIVGLAVEESGAARAEVRLPSSARMGFRDFLLHPVMMDIALQTLGATRMATDLAGGPTARKTLVLPVRFAGVHVYGDVTRGVCAVGLLTATEGLDRLVGEVVLTDLDGQPLLVIDEVQMTVLGAGSDATELTDRLFTLEWEPTPLYKEVSRSSAQGGLLLIGDVAAGDPLLLALQSSLRARLSENGPPPVDCVSFSDEVKLQAAITRTDISWDGIVVVCPPRASDESLPDDAQLELAQTRTLQIAGVVQAVTQMGARKSPRLWIVTRGAQQLNAGESVTLAQTELRGIVRVLTFEHSELKATLLDIEADGTDSLDDLTEELLAGSNHDEVAYRDGQRYVNRLVPAPITPKGELAGETRRKVVELGGLGAVQLQIDQPGRLDALTVHQVKRGEPEGDQVEVRVVAAGLNFSDVLKAMGVYPGLDGGAPAIGGECVGYVTAIGDDVDSVEVGQRVIAFGPGTFGTYVGTIADLVVPIPDTLSDHEAATFGVAYLTAWHCLCEVGRLSPGERVLIHSATGGVGMAAVSIAKMLGARIYTTAGSDAKRQMLSELGVEYVGDSRSVDFADEILELTHGYGVDIILNSLADKAIQRGVQILAPGGRFIEIGKKDVYDDANLGLAALAKSASFSVVDLDLNLKLHPARYRQLLQHILAHVADGRLPVLPVTEFSLHNAADAFRLMASGKHTGKIVISIPYEGNIEAIASPPPVPLVSQDGGYLVVGGMGGLGFVFARWLAEQGAGLIVLNGRSSPSDDVTAAIADLTAAGHRIEVVTGDISEPGTADRLVHAVQSAGFRLAGVLHSAMVLADEIMLNMTDSAARRVFVPKVTGSWRLHQATAAFEVDWWLTFSSASSLLGTPGQGAYAAANAWVDGLVAYRRSLGLPAVGINWGPWAEVGRAQFFAGLGVSLLTAEQGLAAMQTVLAADRAQTGVFSLDARQWFQSFPAVAGSSLFANLRDTATLKSGERRGVGKIRAQLDVLDAAERPGHLASAIADEIRAVLRSSDPIDHDRPLEALGLDSLMGLELRNRLEASLGITLPVALVWAYPTTADLAAALCERMDYALPAEVQEATDTNAELSKAEMDLLSDLVEASELEAATRGES

SEQ ID NO: 20536 - protein, 2103 aa, Mycobacterium leprae
MTASVEGADQKSEKLISYLKKVVVELDETRARLREYEQRATEPVAVVGIGCRFPGGVDSPDRLWDVVSECRDVVSEFPTDRGWDVDGLFDPDPDAEGKTYTRWGAFLDDAAGFDAGFFGIAPSEVLAMDPQQRLMLEVSWEALEYAGIDPLSLRGSATGVFTGIFAPSYGSRDTGGLQGYGLTGTAVSVASGRVSYVLGLEGPAVSVDTACSSSLVAIHWAMSSLRSGECDLALAGGVTVMGLPSIFVGFSRQRGLAADGRCKAFARAADGTGWGEGAGVVVLERLSDAQRLGHTVLAVVRGSAVNQDGASNGLTAPNGLAQQRVIQAALTNAGLSSADVDVVEAHGTATTLGDPIEAQALLATYGQGRPADQPLWVGSIKSNMGHTQAAAGVAGVIKMVQAMRHHVMPATLHVDEPSPRVDWTTGAVSVLTEARDWSVEGRPRRAGVSSFGISGTNAHVILEEAPTPVEASYSTADQQRLSVVPWVVSGRSTAALMAQASRLAFYVQADPEVDPVDVGCALAARSVFEHRAVVVGESREQLIAGLAGLAVGESGAGVAIGQAAPLGKTVVVFPGQGAQRIGMGRELCSQLPVFAEEFDAVTGELDRHMRLPLRDVVWGADAGLLDSTEFAQPALFAVEVALFAVLQHWGLQPDFVMGHSIGELAAAYVAGVLAPADAAMLVVARGRLMQSMPAGGTMWAVAASEDEVVSLLGEGVGIAAINAPESVVISGPQAAVSAIADKFAAQGRRVHQLAVSHAFHSPLMEPMLEEFVRVAAQVEVRKPQIGLVSNVTGELAGPDFGSPQYWGEHVSRAVRFVDSARHLQTLGATHFIESGPSSGLMGAIEQSLAPAEAVVVSMMGKDRPELASVLGAAGQLFATGMPVEWPAVFAGSSRRRVTLPTYAFQRRRFWETPGTDGTASVSGLGLGSTEHALLGAVVERPDSGGVVLTGRLSLANQPWLADHVIGGVVLFPGAGFVELVIRAGDEVGCAGVEELVLAAPLVLHPGSGVQVQVVVAAADESSRRAVSVYSRGDQSHGGWLLNAEGLLEVDAAEATVDLSLWPPEGAESVDISDAYPQLAERGYAYGPAFQGLVAIWRRGSELFAEVVAPTGVVVDGMGMHPALLDAVLHALGLAIENTQATTEMRLPFCWRGVSLHAGGAGRVRARFTSAGADAIAVDIADSAGLPVLTVRSLVTRAMTAEQLRTAVTAAGGALEQGPMDLVWSPIPLSSDGHGGGLPSVVSWADYCAGRGNDTGVVVWEFGSASAGAQAPVDSVAAVYSATHAALQVLQFWFGQDRAGTLVVLTRGAVGLVGEGISDLAAAAVWGMVRSAQSEHSGKIVLIDTDSAVDVAVLADLGESQLLVRCNTVHAARLSPAPQLLALPVGESMWRLAADGGGTLEDLVIQPCPEVQAPLQAGHMRVAVAAVGVNFRDVVAALGMYPGQAPPLGAEGAGVVIEIGPEVTGVAVGDAVMGFLGGAGPLAVVHQQLITQMPQGWSLAEAAAVPVVFLTALFGLADLAGIRAGESVLIHAGTGGVGMAAVQFARHWGVEIFVTASRGKWDTLRDMGFDDDHIGDSRTLEFEEKFLAVTDGRGVDVVLDSLAGDFVDASLRLLVRGGRFLEMGKTDIRDAQEIAANYPGVQYRAFDLSEAGPVRMQEMLCEVRELFDTQVLHRLPVTSWDVRCAPAAFRFMSQARHIGKVVLTMPSALADGLAEGTVLITGASGAIGGVLARHMVSAYGVRHLVLASRRGDRAEGAVELAAELVGAGAKIQVVACDVADNDAVRGLFAQLSREFPPVRGVIHAAGVLDDGAITSLTPDRVDTVLRAKVDAAWNLHEATRDLDLLMFVLCSSIAATVGSPGQGNYSAANAFLDGLAAYRQAAGLAGTSLAWGLWEQPGGMNAHLSSRDLARISRSGLAPMNPAQALELFDAALVIDHPFMVTALLDRAALDAQAQAGALPPLFSRLVRRSRRRQIEDPGDATQSKLALVQRLQGLAANRQLELLVGVVCLQAAAVLGRPSPEDIDPNTKFQDLGFDSLTAVELRNRLKSATGLTLPPTVIFDHPTPTAVAEYVAQQMLKSRPAESGDETSQAVEPKVEEVSVHA

SEQ ID NO: 20537 - protein, 2116 aa, Mycobacterium leprae
METSVTPIAVIGMGCRLPGGINSPDKLWESLLRGDNLVTEVPPDRWDVDDFYDPEPGVPGRSVSRWGGFLDDVAGFDAEFFGISEREATSIDPQQRLLLETSWEAIEQGGLDPASLAGSSTAVFTGLTHEDYLVLTTAAGGLASPYVVTGLNNSVASGRISHTLGLHGPAMTFDTACSSGLMAVHLACRSLHDGESDLALAGGCAVLLEPHASVAASAQGMLSSTGRCKSFAADADGFVRSEGCAMVLLKRLPDALRDGNRIFAMILGTATNQDGGTETLMMPSEDAQVAVYQAALAVAGVEPETIGVVEAHGTGTPIGDPIEYRSLARVYGAGTPCALGSAKSNMGHSTASAGTVGLIKAILSLRNGLVPPLLHFDRLSDDLTEIETGLFVPQEVTPWPVGGYNTPKRVAVSSFGMSGTNVHVIVEEAPSEACAPDVPETSPGTGDATVGRQLFMLSSTSIAALRETARQLATWVEEHQDSVVLSDLAYTLARGRAHRPVRTAVVAADLPELVEGLCEIADGDALYDAVVGHGDRGPVWVFSGQGSQWASMGVQLLANEPVFAATITKLEPVIAAESSFSVTEAITAPETVTGIDKVQPSVFAVQVALATTMEQTYGVRPGAVIGHSMGESAAAVVAGALSLEDAARVICRRSKLMNRVAGSGAMGSVELPAKQVNSELMARGIDDVVISVVASPQSTVIGGATETVRDLIAQWEQRDVMAREVAVDVASHSSQVDPILDDLAAALADIAPMTPKVPYYSATLFDPRELPVCNGAYWVDNLRNTVQFAAAVQAAMEDGYRVFAELSPHPLLTHAVEQTARNLDMSVAALAGMRREQSMPYGLRGLLADLHSAGAALDFAALYPAGRLLDAPLPVWTHPRLFIDTDGQEQRAQGACTVTVHPLLGSHVRLLEEPERHIWQGDVGTAALSWLADHQVHNVAALPGAAYCEMALAAAVEVFGEAAEVRAIAFEQMLLLAAETPIDAIASVDAPGVINFVVQANQDGEKMRNATATLHAAEDDCPPPAYDIAALLEAHPNSVNGTDLRESFAERGVQLGAAFAGLATAHTAEAESGTVLAEVALPASIRFQQSSYQIHPALLDACFQSVGAGVDATKVGSRAGLLLPLGVRSLRVYRPTRNARYCYTRLTKIEPRGGEADLDVLDEHGAVLLAVRGLHMGTGTTERGELDRQLSERLLTIGWQQRTLPESVHVEPGSWLLIDTFNASAIPDMWASTLTDALKSYGTQGTECTNLSWLIQDDPVVSRERLGRQLRGRDGVVILCGPRAGAPDEQSLLAAREQVRHLVRIIRELAELEGELPRLFVVTRQAQIVQSGDAANLEQAGLRGLLRVISSEHPMLRTTLVDVDEHTDVERVAQQLLSGSEEDETAWRNGDWYVARLNPSPLSHEDRRTVVLNPEHDGLRVHVRKPGDLQSLELVASDRVPPGPGQLEVAVSMSSINFADVLIAFGRFPIIDDRDPQLGMDFVGVVTAVGEGVTGHQIGDRVGGFSEGGCWRTFLTCDANLAVTLPSGLTDEQAITAATAHATAWYGLNDLAGIKVGDKVLIHSATGGVGQAAISIARAKGAEIFATAGNPTKRAMLHDLGIEHVYDSRSVEFAEQIRRDTDGYGVDIVLNSLTGAAQRAGLELLTFGGRFVEIGKADVYGNTRLGLFPFRRGLTFYYLDLALMSVTQPDRVRELLATVFNLTADGVLTAPECTHYPLTDAANAIRAMSNAEHTGKLVLDIPRTGSRSVAVPPEQAPVYRRDGSYIITGGLGGLGLFFASKLAEAGCGRIVLTARSQPNPKARQTIERLCAAGADIVVECGNIAEPYTADRLVNAATATGLPLRGVLHSAAVVEDATLTNITDELIDRDWSPKVYGSWNLHCATIGQPLDWFCLFSSGAALLGSPGQGAYAAANSWVDLFAHWRRAQGLPVSAIAWGAWGEVGRATFLAEGGEIMITPDEGAYAFEMLVRYDRPYSGYIPILGAPWLPDLVRRSPWAEMFSSAGQGSRGPSKFRMELLALPQDEWSGRLRRLLVEQASVILRRTIDADRSFIEYGLDSLGMLEMRTHIESETGIRLTPKVIATNNTARALAQYLADTLAEEEGVAAPAAMVSPETP

SEQ ID NO: 20538 - protein, 2118 aa, Mycobacterium leprae
MRAANVTPVAVIGMACRLPGGIDSPQRLWEALLRGDDLVTEIPKERWDADLYYDPEPGVPGRSVSRWGAFLDDVGGFDCDFFGMTEREAIAIDPQHRLLLETSWDAIEHAGLDPATLAGSATGVFVGLTHGDYELLSADCGATEGPYGFTGTSNSFASGRVAYTLGLHGPAVTVDTACSSGLMAVHQARGSLDCGESDLALAGGVVVTLEPRKSVSGSLQGMLSPTGRCHAFDVAADGFVSGEGCVVLLLKRMPDAERDGDRILAVLRGTAANQDGHTVHIAAPSEQAQIAVYHKALAVGGVDPTTVGLIEAHGTGTPVGDPIEYASLAAVYGTAGRCALASTKTNFGHMQSTSGPLGMMKAILALQHGVVPKNLHFTRLPDQLAEITTELFVPQVNTPWPVDVQQPRRAAVSSYGMSGTNVHAILEQAPENSGKDSPAVSKVNGPLLFPLSATSVEQLRATAARMADWVDEHGSGTKHTGLWDLGYTLSRRRGYRPVRTMVLASSFAELSRGLREIAGSEIPYQSAVGQDDRGPVWVFSGQGSQWAGMGAELFAKEPVFAAAIAAMEPVIVEESGFSVTEALTVAEKVTGIDRVQPTIFAIQVALAATMKSYGVYPGAVIGHSLGEAAAAVAAGALSCEDGLRVICRRSQLMSRVAGSGAMASVELPGQQVLSELSIRGLSDVVLAVVASPTSTVVGGDTQAIRHLLAAWQAQDVMVREVAVDVASHTPQVEPILDDLVETLADLKPTEPKVPYYSATLWDPRERPSFTGEYWAENLRYTVRFAAAVQAALKDGFRVFGELAPHPLLTYAIEQNAASLDMPVSALAAMRREQELPFGLRGFIADVHSAGALVDFSVQYPNGCLVDAPLPTWTRRELMLSRESVDHPAHGAAVQAVHPLLGAHVHLFEEPERHVWQGRVGTEAHPWLGDHQIHDVAAFPGAAYCEMALTAARVTLGEASEVRDIKFEQTLLLDRETMASSAATVSAPGVLEFAVETYEEGERVRRASAVLRALEDRVNQQPASHSIDALIASHPLRTEGADLRATFDAIGIQYGLAFSGLTAVYTAAGTNEDVSTVLAEVALPGAIRSQQASYTSHPALLDACFQSVIVAPEVQKAGAGGLLLPVYVRRLLNYHSMRNAQYCLTRVKTSRAGECEVDLEVLDQSGAVLLLVEGLRLAGGASEHECANRVLDERLFTVEWEPRELPEVTQRERGSWLVLGASAEDPLVQQLGDALNADGGHCTAVSLPLGQIDTAQLCSLLSRDGVSSSIGHGALKGLTGVVVVTAPPATVAESPALRRGRDYVSHLITIVREISELPGERPRLFVVTRNAASIKTGDLANLEQVGLRGLIRVIDSEHPYLSVTQIDVEETNQATIATQVARQLRSGSDEDETGWRDGEWYTARLRPGPLRQAERRTVVVQNEHDGMRLEIRTPGDLDSLEFVAFDRVPPGPGEIEVAVTASTVNFADVLVAFGRYPTFEGYCQLLGIDFAGVVSAVGLNVTDHKVGDRVGGVSRNGCWTTFVICDARHAVTLSPEVPLEEAAAVPTVAATAWYGLHDLARISQTDKVLIHSGTGGVGQAAIAIARAAGCEIFATAGSPQRRQLLRDKGIEHVYDSRSLEFAEQIHRDTKGYGVDVVLNSLPGAAQRAGIELLAFGGRFVEIGKRDIYGDTRLGLFPFRRNLSLYAVDLALLTYTHPDTVRRLLTTVYQRTAEGVLPVPQTTHYPIHNTANAVRLVAGAGHTGKVLLDVPHTGSSVAVVPPEQVRTFRADGAYIVTGGLTGLGLFLGTEMAAAGCGRIVLNSRSAPNPQAQETIERLRAGGADIQVECGDIAEPRVADRLVVAATQSGLPVRGVLHAAGVVEDATLTNVTDDLIDRCWAPKVYGAWNLHQALQEGKTAQLLDWFCSFSTAAALVGSPGQGAYAAANSWLDGFSYWRRAQGLASTTIAWGAWGELGLATALAEMAGVAIAPTEGARVFQTLLRYNRPYSCYAPIMETPWLKSFAQHSRFAEAFRSISQGQKDKSKFLAELKVLPRDEWPSMIRRLVSEQISLLLRRTIDPDRLLSDYGLDSLGNLELRTRIETETGIRISPTKITTIRSLAEHLCEELAATEAESAVTAT

SEQ ID NO: 20539 - protein, 678 aa, Mycobacterium avium subsp. paratuberculosis
DQRLLTAVPPGLSLVAAAGVPVVFLTALYGLSVLAGLRPGERVLVHTATGGVGMAAVQLARHYGAEVFATASRGKWDTLRAMGFDDDHIGDSRSPDFEQKFLAATGGAGVDVVLNSLAGEFTDASLRLLAPGGRFIEMGKTDVRDPDVVAQRYRGARYRAFDLMEAGPDRTAAMLAEIVGLLQEGVLTPLPLKTFDVRCASAAYRYVSQARHIGKVVLTVPSGLGEVLSGCGGGLAQSTVLITGGTGMAGSALARHLVDRYRVGHVVLVSRTGAQAAGAAELVDELQRAGASASVLACDVADRDAVATMLAGLPAGYPLRGIVHAAGILDDGLLSSLIPDRVDAVLRAKVDGAWNLHELTKDLDLSAFVVFSSMAGIVGTPGQANYAAANSFLDGLVAHRRADGLAGLSLAWGLWEQASAMTAHLGDRDKARMSRIGLAPLSTEQALAAFDAAMLVETPVLVAARLDRAALSENIAALPPLLRELAAGPTRRVIDDADVTASMSGLAARLHGLSPEARRRELVDLVCGNAAMVLGVPNPADINAGRAFQDLGFDSLTAVELRNRLKNATGLTLSPTLIFDYPTPVVLAEHLDSRLAGSGGDDQPDLMGRFNDITRELQALLGAAHWNSDDKAVLRTRIHGLLGALPAGDGPDSAPLDEDLEAATESQLFAILDEELGR

SEQ ID NO: 20540 - protein, 331 aa, Pyrobaculum aerophilum str. IM2
MRAAAFSTPGLENLKLVEAETPRPGPGEVLIRVKYAGVNPLDYNVVAGAVKASPMPHIPGSEFAGVVEEAGPGVTGVSRGDPVVVYNRLYCGHCRQCLTGWTQMCEVTGGGIIGIVTQGGYAEYAVVPAKNAVATRADLKEAATLPIGALTAWNMAYRASISPGEKVAVVGATGNVGIYAVQFAKLLGGEVYAISRRKAKVESILKSAGADAVLTPDEAKSAAPFDVVLDPTGSASWDLSFGVLGRGGRYVTAGALTGAEVRLDLRRLYGMQILVIGATGGRRADFNTVVRLLEAGRIKAFLHNVYPLADVRKALEELRSPERVGKVLIAP

SEQ ID NO: 20541 - protein, 373 aa, Anopheles gambiae str. PEST
KEMRAVVLTGFGGFKNVKILKKPEPSPQAGEVLIRVKACGLNFQDLMVRLGAIDSPPKTPTILGFECAGEIEAVGEEVEGFKVGDRVVALPEFRAWSELVAVPTKYVYHIPDEMTFQDAAAIVMNYLVAYILIFDLVSLREGKSILLHSVGGGVGQAIVQLARTVPNVTIFGVCSKSKHEALEATGLIDHLIDRTDYVNEVRKITTEGVDIVMDCLCGEECNRGYGLLKPMGKYILYGSSNVVTGETKSFFSVARSWWQVDKVSPIKLFDENKSLGGFNLRHLLYQQDGSEYVRSTVDKIFGLWKDGKVRPVVDSAWALEDVAEAMQKMHDRKNIGKLVLDPSMEPKPKPATPAKSKSKKQASEDKGGKKDKE

SEQ ID NO: 20542 - protein, 398 aa, Anopheles gambiae str. PEST
GLNFQDLMVRLGAIDSPPKTPTILGFECAGEIEAVGEEVEGFKVGDRVVALPEFRAWSELVAVPTKYVYHIPDEMTFQDAAAIVMNYLVAYILIFDLVSLREGKSILLHSVGGGVGQAIVQLARTVPNVTIFGVCSKSKHEALEATGLIDHLIDRTDYVNEVRKITTEGVDIVMDCLCGEECNRGYGLLKPMGKYILYGSSNVVTGETKSFFSVARSWWQVDKVSPIKLFDENKSLGGFNLRHLLYQQDGSEYVRSTVDKIFGLWKDGKVRPVVDSAWALEDVAEAMQKMHDRKNIGKLVLDPSMEPKPKPATPAKSKSKKQASEDKGGKKDKEDDKKSAENGGGDEKKEGGEAADEAKTNGEEGGEAAHVNGDGGAAEQKEEPAAAAAATNGDATES

SEQ ID NO: 20543 - protein, 327 aa, Oceanobacillus iheyensis
MMRGLVHERNQVTIKDMDEPTPASNEVVVKLKAAGLNRRDLAIPKRRGDEQEALILGSDGAGVIDSIGDEVENVQVGDEVIINPSLRWKQNSDAPPKGFDILGMPDHGTIAEKIVIASDQVEPKPSYLSWEEAAVFSLAALTGYRAIFTKGKLQPGETVFIPGAGSGVASFLIHFAKNHGARVITTSRSKDKQEKAKDLGADVVLDTSDDWEAALQDETIDMVIDSVGKATFHRSLAVLKKGGRFVTFGATTEDVIDFDLRSFFYGQYQLIGTTMGCKEELEAALNHYIKYETRPVVDKVFNLEESLDALEYLKEGKQFGKVAIRIS

SEQ ID NO: 20544 - protein, 3816 aa, Streptomyces antibioticus
MTNDEKIVEYLKRATVDLRKARHRIWELEDEPIAITSMACHFPGGIESPEQLWELLSAGGEVLSEFPDDRGWDLDEIYHPDPEHSGTSYVRHGGFLDHATQFDTDFFGISPREALAMDPQQRLLLETSWQLFERAGVDPHTLKGSRTGVFVGAAHMGYADRVDTPPAEAEGYLLTGNASAVVSGRISYTFGLEGPAVTVDTACSSSLVALHLAVQALRRGECSLAVVGGVAVMSDPKVFVEFSRQRGLARDGRSKAFAASADGFGFAEGVSLLLLERLSDARRLGHRVLAVVRGSAVNQDGASNGLAAPNGPSQQRVIRAALADAGLAPADVDVVEAHGTGTRLGDPIEAQALLATYGQGRTSGRPVWLGSVKSNIGHTQAAAGVAGVMKMVLALERGVVPKTLHVDEPSPHVDWSTGAVELLTEERPWEPEAERLRRAGISAFGVSGTNAHVIVEEAPAEPEPEPEPGTRVVAAGDLVVPWVVSGRDAGALRAQAARLAAHVSSTGAGVVDVGWSLVATRSVFEHRAVMVGTDLDSMAGSLAGFAAGGVVPGVVSGVAPAEGRRVVFVFPGQGSQWVGMAAGLLDACPVFAEAVAECAAVLDPLTGWSLVEVLRGGEAVLGRVDVVQPALWAVMVSLARTWRYYGVEPAAVVGHSQGEIAAACVAGGLSLADGARVVVLRSRAIARIAGGGGMVSVSLPAGRVRTMLDTYGGRLSVAAVNGPSSTVVSGDAQALDELLAGCEREGVRARRVPVDYASHSAQMDQLRDELLEALADITPQHSSVPFFSTVTADWLDTTALDAGYWFTNLRETVRFQEAVEGLVAQGMGAFVECSPHPVLVPGIEQTLDTVEADAVALGSLRRDEGGLGRFLTSLAEAFVQGVPVDWSRTFEGASPRTVDLPTYPFQRQRFWLEGSPALSSNGVEGEADVAFWDAVEREDSAVVAEELGIDAKALHMTLPALSSWRRRERQRRKVQRWRYRVEWKRLPNSRAQESLQGGWLLVVPQGRAGDVRVTQSVAEVAAKGGEATVLEVDALHPDRAAYAEALTRWPGVRGVVSFLAWEEQALAEHPVLSAGLAASLALAQALIDVGGSGESAPRLWLVTEAAVVIGAADTGAVIDPVHAQLWGFGRVLALEHPELWGGLIDLPAVAGEPGSITDHAHADLLATVLATMVQAAARGEDQVAVRTTGTYVPRLVRSGGSAHSGARRWQPRDTVLVTGGMGPLTAHIVRWLADNGADQVVLLGGQGADGEAEALRAEFDGHTTKIELADVDTEDSDALRSLLDRTTGEHPLRAVIHAPTVVEFASVAESDLVRFARTISSKIAGVEQLDEVLSGIDTAHDVVFFSSVAGVWGSAGQSAYAAGNAFLDAVAQHRRLRGLPGTSVAWTPWDDDRSLASLGDSYLDRRGLRALSIPGALASLQEVLDQDEVHAVVADVDWERFYAGFSAVRRTSFFDDVHDAHRPALSTAATNDGQARDEDGGTELVRRLRPLTETEQQRELVSLVQSEVAAVLGHSSTDAVQPQRAFREIGFDSLTAVQLRNRLTATTGMRLPTTLVFDYPTTNGLAEYLRSELFGVSGAPADLSVVRNADEEDDPVVIVGMACRFPGGIDTPEAFWKLLEAGGDVISELPANRGWDMERLLNPDPEAKGTSATRYGGFLYDAGEFDAAFFGISPREALAMDPQQRLLLETVWELIESAGVAPDSLHRSRTGTFIGSNGQFYAPLLWNSGGDLEGYQGVGNAGSVMSGRVAYSLGLEGPAVTVDTACSSSLVALHLAVQALRRGECSLAIAGGVTVMSTPDSFVEFSRQQGLSEDGRCKAFASTADGFGLAEGVSALLVERLSDARRLGHRVLAVVRGSAVNQDGASNGLTAPNGPSQQRVIRAALADAGLAPADVDVVEAHGTGTRLGDPIEAQALLATYGQGRAGGRPVVLGSVKSNIGHTQAAAGVAGVMKMVLALERGVVPKTLHVDEPSPHVDWSAGEVELAVEAVPWSRGGRVRRAGVSSFGISGTNAHVIVEEAPAEPEPEPGTRVVAAGDLVVPWVVSGRDAGALREQAARLAAHVSSTGAGVVDVGWSLVATRSVFEHRAVMVGSELDSMAESLAGFAAGGVVPGVVSGVAPAEGRRVVFVFPGQGSQWVGMAAGLLDACPVFAEAVAECAAVLDPVTGWSLVEVLRGGGEAVLGRVDVVQPALWAVMVSLARTWRYYGVEPAAVVGHSQGEIAAACVAGGLSLADGARVVVLRSRAIARIAGGGGMVSVGLSAERVRTMLDTYGGRVSVAAVNGPSSTVVSGDVQALDELLAGCEREGVRARRVPVDYASHSAQMDQLRDELLEALADITPQHSSVPFFSTVTADWLDTTALDAGYWFTNLRETVRFQEAVEGLVAQGMGAFVECSPHPVLVPGIEQTLDALDQNAAVLGSLRRDEGGLDRLLTSLAEAFVQGVPVDWTHAFEGMTPRTVDLPTYPFQRQHYWPKPAPAPGANLGDVASVGLTAAGHPLLGAVVEMPDSDGLVLTGQISLRTHPWLADHEVLGSVLLPGTAFVELAVQAADRAGYDVLDELTLEAPLVLPDRGGIQVRLALGPSEADGRRSLQLHSRPEEAAGFHRWTRHASGFVVPGGTGAARPTEPAGVWPPAGAEPVALASDRYARLVERGYTYGPSFQGLHTAWRHGDDVYAEVALPEGTPADGYALHPALLDAAVQAVGLGSFVEDPGQVYLPFLWSDVTLHATGATSLRVRVSPAGPDTVALALADPAGAPVATVGALRLRTTSAAQLARARGSAEHAMFRVEWVEEGSAADRCRGGAGGTTYEGERAAEAGAAAGTWAVLGPRVPAAVRTMGVDVVTALDTPDHPADPQSLADLAALGDTVPDVVVVTSLLSLASGADSPLGNRPRPTAAEQDTAATVAGVHSALHAALDLVQAWLADERHTASRLVLVTRHAMTVAESDPEPDLLLAPVWGLVRSAQAENPGRFVLADIDGDEASWDALPRAVASAASEVAIRAGAVYVPRLARATDEGLVVADEAAGPWRLDVTEAGTLANLALVPCPDASRPLGPDEVRIAVRAAGVNFRDVLLALGMYPDEGLMGAEAAGVVTEVGGGVTTLAPGDRVMGLVTGGFGPVAVTHHRMLVRMPRGWSFAEAASVPVAFLTAYYALHDLAGLRGGESVLVHSAAGGVGMAAVQLARHWDAEVFGTASKGKWDVLAAQGLDEEHIGSSRTTEFEQRFRATSGGRGIDVVLNALSGDFVDASARLLREGGRFVEMGKTDIRTDLGVVGADGVPDIRYVAFDLAEAGAERIGQMLDEIMALFDAGVLRLPPLRAWPVRRAHEALRFVSQARHVGKVVLTVPAALDAEGTVLITGAGTLGALVARHLVTEHDVRRLLLVSRSGVAPDLAAELGALGAEVTVAACDVANRKALKALLEDIPPEHPVTGIVHTAGVLDDGVVSGLTPERVDTVLKPKVDAALTLESVIGELDLDPALFVIFSSAASMLGGPGQGSYAAANQFLDTLARHRARRGLTSVSLGWGLWHEASGLTGGLADIDRDRMSRAGIAPMPTDEALHLFDRATELGDPVLLPMRLNEAALEDRAADGTLPPLLSGLVRVRHRPSARAGTATAAPATGPEAFARELAAAPDPRRALRDLVRGHVALVLGHSGPEAIDAEQAFRDIGFDSLTAVELRNRLNAETGLRLPGTLVFDYPNPSALADHLLELLAPATQPTAAPLLAELERVEQLLSAAASPGGPASAVDEETRTLIATRLATLASQWTHLPVGSPGNADNRSGPGESGQAQESGATGEHTAAWTSDDDLFAFLDKRLET

SEQ ID NO: 20545 - protein, 337 aa, Leptospira interrogans serovar lai str. 56601
MKVYEIQNQFGLENLKISERPDPVPVQGEVLVRFRAASLNYRDYLMAIGRYNPKQKLPLIPLSDGAGEVVQVGPGVTRWKIGDKVCANFAQTWFDGAPEKDMLKNTLGGPLDGTLCEYRIFREEGLVLMPENLSFAEASTLPCAALTAYTAIVTHGNIQPGATVVVQGTGGVSIFALQFAKMMGCRVIATSSSEEKLAKVKELGADEVINYNEKTNWDREVRKITEMKGADLVIEVGGAGTLQKSISSTKPWGTIALIGVLAGGESNNLSLFPILMQGIRIQGIIVGSKRNFEDMNLAINTNKIKPVVDQVYSFEEVPKAFESLKAGKHFGKICIEI

SEQ ID NO: 20546 - protein, 4038 aa, Streptomyces cinnamonensis
MSSAEESSPDVSGTGVSGTGESATGTSSTEAKLRQYLKRVTVDLGQARRRLREVEERAQEPIAIVSMACRFPGDTRTPEALWDLVAEGGDAIDDFPTNRGWDLESLYHPDPDHPGTSYVRRGGFLYDAPAFDASFFGISPREALAMDPQQRVLMETAWQLLERAGIDPASLKLSATGVYIGAGVLGFGGAQPDKTVEGHLLTGSALSVLSGRISFTLGLEGPSVSVDTACSSSLVSMHLAAQALRQGECDLALAGGVTVMSTPGAFTEFSRQGALSPDGRSKAFAASADGTGFSEGAGLLLLERLSDARRNGHKVLAVIRGSAVNQDGASNGLTAPNGPSQERVIRAALANAGLGAAEVDAVEAHGTGTKLGDPIEAGALLATYGRDRDEDRPLWLGSVKSNIGHPQGAAGVAGVIKMVMALQRELLPATLYVDEPTPHVDWSSGSVRLLTEPVPWTRGERPRRAGVSAFGMSGTNAHVILEEAPPEEAAAAETPAEGTGAVVPWVVSGRGEEALRAQAAQLAEHVRDDDQRPASPLEVGWSLATTRSVFENRAVVVGDDRDALLDGLRSLAAGEASPDVVSGAVGPTGPGPVMVFPGQGGQWVGMGARLLDESPVFAARIAECEQALSAYVDWSLTDVLRGDGSELARIDVVQPVLWAVMVALAAVWADQGIEPAAVVGHSQGEIAAACVVGAISLDEAARIVAVRSVLLRQLSGRGGMASLGMGQEQAADLIDGHPGVVVAAVNGPSSTVISGPPEGIAAVVADAQERGLRARAVASDVAGHGPQLDAILDQLTEGLAGIRPAATDVAFYSTVTAGHLTDTTELDTAYWVRNVRRTVRFADTIDALLADGYRLFIEVSPHPVLNLALEGLIERAAVPATVVPTLRRDHGDTTQLARAAAHAFAAGADVDWRRWFPADPAPRTVDLPTYAFQRQDFWPAPAGGRSGDPAGLGLAASGHPLLGASVGLASGDVHLLSGRVSRQSAAWLDDHVVAGQALVPGAAQVEWVLRAGDDAGCSALEELTLQTPLVLPDTGGLRIQVVVEAADAHGRRDVRLFSRPDDDDAFASTHPWTCHATGVLAPAPTDGTNGTRDAADTLDGAWPPADAEPVPADDLYAQADRTGYGYGPAFRGVRALWRHGKDVLAEVTLPKEAGDPDGFGIHPALLDAVLQPAALLLPPTDAEQVWLPFAWNDVALHAVRATTVRVRLTPLGERIDQGLRITVADAVGAPVLTVRDLRSRPTDTGRLAAAATRDRHGLFDLEWIAPENAAENAAGPARDASEGWVTLGEDAASLADLLASVEAGAPAPQLVAAPVEPDRTDDGLALATHVLDLVQTWLASPLHDSRLVLVTRGAVTDADVDVAAAAVWGLVRSAQSEHPGRFTLIDLGPDDTLAAAMQAAHLEEPQLAVHGGEIRVPRLVRATTDPTAPNGTPEADRTADPSEGLHRNGTVLITGGTGVLGRLVAEHLVTEWGVRHLLLASRRGDQAPGSAELRARLSELGASVEIAPADVGDAEAVAALIASVDPAHPLTGVIHAAGVLDDAVITAQTPESLARVWATKATAARHLHEATRETPLDFFVVFSSAAASLGSPGQANYAAANAYCDALVQHRRAQGLAGLSIAWGLWQATSGMTGQLSETDLARMKRTGFAALTDEGGLALLDAARAHDRAYVVAADLDPRAVTDGLSPLLRALTAPATRRRVASEGLADGALATRLAGLDADGRLRLLTDVVREYVAAVLGHGSAARVGVDIAFKDLGFDSLTAVELRNRLSAACDVRLPATLIFDHPTPQALATHLVDRLAGSTSATTTVNATAPAAAHVAAGADVDADTDDPVAIVAMTCRFPGGVASPDDLWDLLDARKDAMGAFPTDRGWDLERLFHPDPDHPGTSYTDQGGFLPDAGDFDAAFFGINPREALAMDPQQRLLLEASWEVLERAGIDPTTLKGTPTGTYVGLMYHDYAKSFPTADAQLEGYSYLASTGSMVSGRVAYTLGLEGPAVTVDTACSSSLVSIHLATQALRHGECDLALAGGVTVMADPDMFAGFSRQRGLSPDGRCKAYAAAADGVGFSEGVGVLLLERLSDARRHGRRVLGVVRGSAVNQDGASNGLTAPNGPSQERVIRQALASGGLSSVDVDVVEGHGTGTTLGDPIEAQALLATYGQGRPEDRPLWLGSVKSNIGHTQAAAGVAGVIKMVMAMRHGVVPASLHVDVPSPHVEWDSGAVRLAVESVPWPQVEGRPRRAGVSSFGASGTNAHVIVESVPDGLEEDSVSVGGEALETETDGRLVPWVVSARSPQALRDQALRLRDFASDASFRAPLADVGWSLLKTRALHEHRAVVVGAERAELIAALEALATGEPHAALVGPACSQARVGGDDVVWLFSGQGSQLVGMGAGLYERFPVFAAAFDEVCGLLEGPLGVEAGGLREVVFRGPRERLDHTVWAQAGLFALQVGLARLWESVGVRPDVVLGHSIGEIAAAHVAGVFDLADACRVVGARARLMGGLPEGGAMCAVQATPAELAADVDGSAVSVAAVNTPDSTVISGPSDEVDRIAGVWRERGRKTKALSVSHAFHSALMEPMLAEFTEAIRGVKFRQPSIPLMSNVSGERAGEEITDPEYWARHVRNAVLFQPAIAQVADSAGVFVELGPAPVLTTAAQHTLDESDSQESVLVASLAGERPEESAFVEAMARLHTAGVAVDWSVLFAGDRVPGLVELPTYAFQRERFWLSGRSGGGDAATLGLVAAGHPLLGAAVEFADRGGCLLTGRLSRSGVSWLADHVVAGAVLVPGAALVEWALRAGDEVGCVTVEELMLQAPLVVPEASGLRVQVVVEEAGEDGRRGVQIYSRPDADAVGGDDSWICHATGVLSPESARLDTELGGVWPPAGAEPLDVDGFYAQAGEAGYGYGPAFRGLRAVWRHGQDLLAEVVLPEAAGAHDGYGIHPALLDATLHPLLAARFMDGSEDDQLYVPFGWAGVSLRAVGATTVRVRLRPVGESVDQGLSVTVTDATGGPVLSVDSLQTRPVKPSQLAAAQQPDVRGLFTVEWTPLPQTDADGEADWVVLSDGVGRLADVVSAAGGEAPWAVVAPVDASVGDGREGLDGRLVVERVLSLVQEFLALPELAESRLLVVTRGAVATGVDGDGDVDASAAAVWGLVRSAQSENPGRFILLDVDGDGDDQGPDLNGRHLPHATLRHAAEELDEPQLALREGTLYVPRLTQARQSAELVVPPGEPAWRLRMVHDGSLDALAAVACPEALEPLAPGQVRIAVHAAGINFRDVLVALGMVPAYGAMGGEGAGVVTEVGPEVTHVSVGDRVMGVFEGAFGPVVIAEARMVTPVPQGWDMREAAGIPAAFLTAWYGLVELAGLKAGERVLVHAATGGVGMAAVQIARHVGAEVFATASPGKHAVLEEMGIDAAHRASSRDLAFEGTFREATGGRGMDVVLNSLAGEFIDASLRLLGDGGRFLEMGKTDVRAAEEVAAEHADVSYTAYDLVGDAGPDRISNMLDKLVELFASERLKPLPVRSWPLDKAQEAFRFMSQAKHTGKLVLEIPPALDPEGTVLVTGGTGALGQVVAEHLVREWGVRHLLLASRRGPEAPGSDELASKLTGLGAEVTIVAADVSDPASVVELVGKTDPSHPLTGVVHAAGVLEDGVVTAQTPEGLARVWAAKAAAAANLHEATREMRLGLFVVFSSAAATLGSPGQANYAAANAYCDALMQHRRAVGQVGLSVGWGLWEAPDAKPGVAADAKASAATVGKASALSDGTNGSAPQDTTGTAPQGMTGGLTDTDVARMARIGVKGMSNAHGLALFDAAHRHGRPHLVGFNLDLRTLATHPLHTRPALLRGLATPTAGGASRPTATAGGQPADLAGRLAALSPSDRHHTLVRLIREQAATVLGHHPDSLTTGSTFKELGFDSLTAVELRNRLSAATGLRLPAGLVFDHPDADILAEHLGAQLAPDGDTPAGAEATDPVLRDLAKLENALSSTLVEHLDADAVTARLEALLSNWKAASAAPGSGSTKEQLQVATTDQVLDFIDKELGV

SEQ ID NO: 20547 - protein, 2238 aa, Streptomyces cinnamonensis
MASEEQLVEYLRRVTTELHDTRRRLVQEEDRRQEPVALVGMACRFPGGVASPEDLWDLVAAGKDAIEDFPTDRGWDLEALYDPDPAAYGTSYVRHGGFVDDAGSFDADFFGISPREALAMDPQQRLMLETSWELFERAGIEPVSLKGSRTGVYAGVSSEDYMSQLPRIPEGFEGHATTGSLTSVISGRVAYNYGLEGPAVTVDTACSASLVAIHLASQALRQRECDLALAGGVLVLSSPLMFTEFCRQRGLAPDGRCKPFAAAADGTGFSEGIGLLLLERLSDARRNGHKVLAVIRGSAVNQDGASNGLTAPNDAAQEQVIRAALDNARLTPSEVDAVEAHGTGTKLGDPIEAGALLATYGQHRARPLLLGSLKSNIGHTHATAGVAGVIKTVMAIRNGLLPATLHVEELSPHVDWDAGAVEVVTEPTPWPETGHPRRAGVSAFGISGTNAHLILEEAPPEEDVPAPVVVESGGVVPWVVSGRTPEALREQARRLGEFVAGDTDALPNEVGWSLATTRSVFEHRAVVVGRDRDALTAGLGALAAGEASAGVVAGVAGDVGPGPVLVFPGQGAQWVGMGAQLLDESAVFAARIAECERALSAHVDWSLSAVLRGDGSELSRVEVVQPVLWAVMVSLAAVWADYGVTPAAVIGHSQGEMAAACVAGALSLEDAARIVAVRSDALRQLQGHGDMASLSTGAEQAAELIGDRPGVVVAAVNGPSSTVISGPPEHVAAVVADAEARGLRARVIDVGYASHGPQIDQLHDLLTERLADIRPTNTDVAFYSTVTAERLTDTTALDTDYWVTNLRQPVRFADTIEALLADGYRLFIEASAHPVLGLGMEETIEQADMPATVVPTLRRDHGDTTQLTRAAAHAFTAGADVDWRRWFPADPAPRTIDLPTYAFQRRRYWLADTVKRDSGWDPAGSGHAQLPTAVALADGGVVLNGRVSAERGGWLGGHVVAGTVLVPGAALVEWVLRAGDEAGCPSLEELTLQAPLVLPESGGLQVQVVVGAADEQGGRRDVHVYSRSEQDASAVWQCHAVGELGRASVARPVRQAGQWPPAGAEPVEVGGFYEGVAAAGYEYGPAFRGLRAMWRHGDDLLAEVELPEEAGSPAGFGIHPALLDAALHPLLAQRSRDGAGAGAHGGQVLLPFSWSGVSLWASEATTVRVRLTGLGGGDDETVSLTVTDPAGGPVVDVAELRLRSTSARQVRGSAGPGADGLYELRWTPLPEPLPVPAPANGRDVAADLSGCAVLGELVAEPGPGIDLEGCPCYPGVGALADNASPPSMILAPVHSDTTGGDGLALTERVLRVIQDFLAAPSLEQKQTRLAFVTRGAADTGSTTGGSAAPAEAVDPAVAAVWGLVRSAQSENPGRFVLLDTDAPLDQASVAPLVDAVRSAVEADEPQVALRGGRLLVPRWARAGEPVELAGPAGARAWRLVGGDSGTLEAVVAEACDDIVLRPLAPGQVRVAVHTAGVNFRDVLIALGMYPDPDALPGTEAAGVVTEVGPGVTRLSVGDRVMGMMDGAFGPWAVADARMLAPVPPGWGTRQAAAAPAAFLTAWYGLVELAGLKAGERVLIHAATGGVGMAAVQIARHVGAEVFATASPGKHAVLEEMGIDAAHRASSRDLAFEDAFRQATDGRGVDVVLNSLTGELLDASLRLLGDGGRFVEMGKSDPRDPELVALEHPGVSYEAFDLVADAGPERLGLMLDRLGELFAGGSLVPLPVTAWPLGRAREALRHMSQARHTGKLVLDVPAPLDPDGTVLVTGGTGTIGAAVAEHLARTGESKHLLIVSRSGPAAHGAEELVSRIAEFGAEATFVAADVSEPDAVAALIEGIDPAHPLTGVVHAAGVLDNALIGSQTTESLTRVWAAKAAAAQQLHEATRESRLGLFVMFSSFASTMGTPGQANYSAANAYCDALAALRRAEGLAGLSVAWGLWEATSGLTGTLSAADRARIDRYGIRPTSAARGCALLAAARAHGRPDLLAMDLDARVPAASDAPVPAVLRTLAAAGAPATARPTAAAAADGATDWSGRLAGLTEEARLELLTELVCTHAAGVLGHADAGAVQVDAPFKELGFDSLTAVELRNRIAAATGLKLPAALVFDYPQARVLAAHLAERLVPEGAGAMGGVSGAEGVRDAYGAGGPGGDMTAQVLLEVARVEHTLSAAVPHGLDRAAVAARLEALLARCTATTAATGAAGAAVEGDGDSDGDGAVDQLETATAEQVLDFIDNELGV

SEQ ID NO: 20548 - protein, 4132 aa, Streptomyces cinnamonensis
MVSEEKLVDYLKRVSADLHATRQRLREAEERGQEPVAVVEAACRYPGGIRTPEDLWDLVAAGGNALGAFPDNRGWDLRRLFHPDPDHPGTTYAREGGFLHDADLFDPEFFGISPREAAVLDPQQRLLLECAWEALERAGIDPRSLQGSRTGVYAGAALPGFGTPHIDPAAEGHLVTGSAPSVLSGRLAYTFGLEGPAVTIDTACSSSLVAVHLAAHALRQRECDLALAGGVTVMTTPYVFTEFSRQRGLAADGRCKPFAAAADGTAFSEGAGLLVLERLSDARRAGHRVLAVIRGSAVNQDGASNGLTAPNGPAQQRVIRAALAGARLSPAEVDAVEAHGTGTRLGDPIEADALLATYGQERHGGRPLWLGSVKSNIGHTQGAAGAAGLIKMVQALRHETLPATLYADEPTPHADWESGAVRLLSAPVAWPRGEHGEHTRRAGISSFGISGTNAHLILEEAPAADAEGAGGDGDGDGGGVRPVVRVGATGPREEQGQGQGQEQHQQQRQQRQRSSMMPTPHLPWLLSARSPAALRAQADALANHVAHADHSIADIGGTLLRRTLFEHRAVVLGTDRDERAAALAALAAGRAHPALTRAAGPARNGGTAFLFTGQGSQRPGMGRQLYDTFDVFAESLDETCARLDPLLEQPLKPVLFAPADTAQAAVLHGTGMTQAALFALEVALYRQVTSFGIAPSHLTGHSVGEIAAAHVAGVFSLADACTLVAARGRLMQALPAGGAMLAVQAAEDDVLPLLAGQEERLSLAAVNGPTAVVVSGEAAAVGEVEKALRGRGLKTKRLNVSHAFHSPLIEPMLDDFREVARGLTFHAPTLPVVSNLTGRLADAELMADAEYWVRHVRRPVRFHDGLRALSEQGVVRYLELGPDPVLATMVQDGLPAPAEGEEPEPVVAAALRSKHDEGRTLLGAVAALHTDGQPADLTALFPADAGQVPLPTYRFQRRRYWRVAPDAAAPARAAGLQETGHPLLPAVIRQADGGILLAGRLSLRTHPWLADHTIAGGVPLPATAFVELALLAGRHAACDTIDDLTLETPLLLDDTGTGVGAAVGAGADALVDAIEVQLALGAPDGSGRRALTVHSRPADDAADDGDAADAADAAGRGGPGGSGDLGDPGDPGDLGDGGGSRGWRRHATGILSAGPAAEPAAPDAAPWPPADATALDVDALYARLDAQGYSYGPAFRAVHAAWRHGDDLYADVRLADEQRAEADAFALHPALLDAALHAVDELYRGSEGRGQEQGQGGQEPEQGRGDADAPVRLPFSFSDIRHHATGATRLWVRLSPQGDDRLRLSLTDGEGGQVATVDALQLRLIPADRWRAARPTTAAPLYHLDWHELPLPEPAETDPAAHSWAVLGAHDAGLAPAAHYPDLAALKAAVEAGEPVPDIVFAPFPAQGTETDVPAQVRAHARHALELLRDWLTTEAFAAARLVVLTTGAVTARPEDGPADLATAPVWGLVRAAQAEQPDHVVLVDIDKDIDKDTDEETDQATDAGTASRHALPAALAAAAAQAETQLALRAGTVLVPRLAVVPPRTDTPALHATAPESTTDTVDSTGIAGAAESGGTVLITGGTGGLGQAVARHLAAAHGARHLLLVSRRGDAAEGVAELRADLADDGVDVRVAACDITDRDALAGLLADIPAAHPLTAVVHTAGVIDDSLITAMTPERLDAVLAPKADAAWHLHELTRDKDLSAFVLFSSGASVLGNGGQANYAAANTFLNTLAEHRRAAGLAATSVAWGLWESASGGMAARLGDADRARIHRTGVTGLTDEQALALFDAALTAEHPTVLATRFDRAVLRGQAAARTLQPALRGLVRTPRPTASAGAIGSTAATGSATDENAPSSWAARLARLSAADRDRALNELIREQIATVLAHPSPDTIELGRAFQELGFDSLTALELRNRLSTATGIRLPATLVFDHPSPTALVRHLHSHLPDEAQHTSPTAPGASAEGTAATATGIDDDPIAIVGMACRYPGGVTSPEQLWQLVATGTDAIGPFPEDRGWDTAGLFDPDPDQVGHSYTREGGFLYDAARFDAGFFGISPREAAATDPQQRLLLETAWQAFEHAGIDPAALRGTPCGVITGIMYDDYGSRFLARKPDGFEGRIMTGSTPSVASGRVAYTFGLEGPAITVDTACSSSLVAMHLAAQALRQGECELALAGGVTVMATPNTFVEFSRQRGLAPDGRCKPFAAAADGTGWGEGAGLVVLERLSDARRKGHRVLALLRGSAVNQDGASNGMTAPNGPSQERVIRTALAGAGRGPEDIDVVEAHGTGTTLGDPIEAQALLATYGQGRPEDRPLWLGSVKSNIGHTQAAAGVAGVIKMVMALRHEQLPTTLHADEPTPHVQWDGGGVRLLTEPVPWSRGERTRRAGVSSFGISGTNAHLILEEPPEEDLPEPVAAEPGGVVPWVVSGRTPDALREQARRLGEFVVGAGDVSAAEVGWSLATTRSVFEHRAVVAGRDRDDLVAGMQALAAGETPTDVVSGAAASSGAGPVLVFPGQGSQWVGMGAQLLDESPVFAARIAECEQALSAYVDWSLSDVLRGDGSELSRVEVVQPVLWAVMVSLAAVWADYGVTPAAVVGHSQGEMAAACVAGALSLEDAARIVAVRSDALRQLQGHGDMASLGTGAEQAAELIGDRPGVVVAAVNGPSSTVISGPPEHVAAVVAEAEARGLRARVIDVGYASHGPQIDQLHDLLTEGLADIRPANTDVAFYSTVTAERLTDTTALDTDYWVTNLRQPVRFADTIEALLADGYRLFIEASAHPVLGLGMEETIEQADIPATVVPTLRRDHGDTTQLTRAAAHAFTAGADVDWRRWFPADPTPRTVDLPTYAFQHQHYWLEEPSGLTGDAADLGMVAAGHPLLGACVELAESDSYLFTGRLSRRAPSWLAEHVVAGTVLVPGAALVEWVLRAGDEAGCPTIEELTLQAPLVLPESGGLQVQVVVGATDEQSGRRDVHVYSRSEQDASAVWVCHAVGVVSSEMPEAAAELSGQWPPAGAEAVDVEDFYARAAEAGYAYGPAFQGLRALWRHGTELFAEVVLPEQAGGHDGFGIHPALLDAALHPLMLLDRPADGQMWLPFAWSGVSLNADRATHVRVRLSPRGEAAERDLRVVIADATGAPVLTVDALTLRAADPGRLGAAARGGVDGLYTVDWTPLPLPQPLPLPRTDAGGSADWVILSDNSSAALADAVSSATAAGGGAPWALLAPVGGGSADDGLPVVRRTLSLVQEFLAAPELTESRLVIVTRGAVATDADGDVAASAAAVWGLIRSAQSENPGRFVLLDVEEEHLHPDGGELPYAALRHAVEELDEPQLALRSGKFLVPRMTPAAAPEELVPPVGTSGWRLGTSGTATLENLSVIDAPEAFAPLEPGQVRISVRAAGMNFRDVLIALGMYPDKGTFAGSEGAGHVTEVGPGVTHLSVGDRVMGLFEGAFAPLAVADARMVVPIPEGWSFQEAAAVPVVFLTAWYGLVDLGRLRAGESLLIHAGTGGVGMAATQIARHLGAEVFATASPAKHGVLDGMGIDAAHRASSRDLDFEETLRAATGGRGMDVVLNSLAGEFTDASLRLLAEGGRMVDMGKTDKRDPDRVAAEHAGAWYRAFDLVPHAGPDRIGEMLAELGELFASGALAPLPVQTWPLGRAREAFRFMSQAKHTGKLVLEIPPALDPDGTVLITGGTGVLAAAVAEHLVREWGVRHLLLAGRRGSEAPGSSELAEELTELGAEVTFAAADVSDPDAVAELVGKTDPAHPLTGVIHAAGVLDDAVVTAQTPESLARVWAAKATAAHLLHEATREARLGLFLVFSSAAATLGSPGQANYAAANAYCDALVRQRRAEGLAGLSIGWGLWQTASGMTGHLGETDLARMKRTGFTPLTTEGGLALLDAARAHGRPHVVAVDLDARAVAAQPAPSRPALLRALAAGATPGARTARRTAAAGSVAPAGGLADRLAGLPHPERRRLLLDLVRGNVAGVLGHSDHDAVRPDTSFKELGFDSLTAVELRNRLAAATGLKLPAALVFDYPESATLVDHLLERLSPDGAPPPVKDAADPVLNDLGRIESSLDALALDADARSRVTRRLNTLLSKLNGAATAGSPADVTDLDALDALDDVSDDEMFEFIDREL

SEQ ID NO: 20549 - protein, 4106 aa, Streptomyces cinnamonensis
MASEEELVDYLKRVAAELHDTRQRLREVEDRRQEPVAVVGMACRFPGGIETPEGLWELVAAGDDAIEPFPTDRGWDLEGIYHPDPDHPGTCYVREGGFLAAPDRFDSDFFGFSPREALASSPQLRLLLETSWEALERAGINPASLKGSPTGVYVGAATTGNQTQGDPGGKATEGYAGTAPSVLSGRLSFTLGLEGPAVTVETACSSSLVAMHLAANALRQGECDLALAGGVTVMSTPEVFTGFSRQRGLAPDGRCKPFAAAADGTGWGEGAGLILLERLSDARRKGHKVLAVIRGSAINQDGASNGFTAPNGPSQRRVIRQALSSAHLSTSEIDVVEAHGTGTRLGDPIEAEALIATYGKEREDDRPLWLGSVKSNIGHTQAAAGVAGVIKMVMALQRELLPATLNVDEPTPHVQWEGGGVRLLTEPVPWSRGERPRRAGISSFGISGTNAHVVLEEAPPEEDVPGPVAAEPEGVVPWVVSARTEEALSEQARRLGEFVADTDPSTADVGWSLTTSRAILEHRAVVVGRDRDALTAGLAALAAGEESADVVAGVAGDVGPGPVLVFPGQGSQWVGMGAQLLDESPVFAARIAECEQALSAYVDWSLSAVLRGDGSELSRVEVVQPVLWAVMVSLAAVWADYGVTPAAVIGHSQGEMAAACVAGALSLEDAARVVAVRSDALRQLMGQGDMASLGASSEQAAELIGDRPGVCIAAVNGPSSTVISGPPEHVAAVVADAEERGLRARVIDVGYASHGPQIDQLHDLLTDRLADIRPATTDVAFYSTVTAERLTDTTALDTDYWVTNLRQPVRFADTIDALLADGYRLFIEASAHPVLGLGMEETIEQADIPATVVPTLRRDHGDTTQLTRAAAHAFTAGATVDWRRWFPADPTPRTIDLPTYAFQRRSYWLPVDGVGDVRSAGLRRVEHSLLPAALGLADGALVLTGRLAASGGGGGWLADHAVAGTTLVPGAALVEWALRAADEAGCPSLEELTLQAPLVLPGSGGLQVQVVVGPADGQGGRREVRVFSRVDSDDEAAGQDEGWSCHATGVLSPEPGAVPDGLSGQWPPTGAEPLEISDLYEQAASAGYEYGPSFRGLRSVWRHGHNLLAEVELPEQAGAHDDFGIHPVLLDAALHPALLLDQNAPGEEQEPAQPALRLPFVWNGVSLWATGAATVRVRLAPHGGGETDDSAGLRVTVADATGAPVLSVDSLALRPADPELLRTAGRAGSGTNGLFTVEWTALPPADVADHAAGDGWAVLGQDVPDWAGADMPRHPDMASLSAALDEGTQAPAAVFVETTATSHATPNTAADVTLDASGRAVAERTLHLLRDWLAEPRLAETRLVLITHHAVTTPADDDVNAAPLDVPAAALWGLIRSAQAEHPDRFVLLDTDAKANTDPGPDTSTDHSTASGTYRTVIARALATGEPQLAVRAGELLAPRLARAATPTPETPTPETQPDTGSGSEAGAGSGSGPGATLDPDGTVLIAGGTGMMGGLVAEHLVRAWSVRHLLLVSRQGPDAPDARDLADRLVGLGATVRIVAADLTDGRATADLVASVDPAHPLTGVIHAAGVLDDAVVTAQTSDQLARVWAAKASVAANLDAATSELPLGLFLMFSSAAGVLGNAGQAGYAAANAFVDALVGRRRATGLPGLSIAWGLWARGSAMTRHLDDADLARLRAGGVKPLLDEQGLALLDAARATAAHTSLVVAAGIDVRGLNRDDVPAILRDLAGRTRRRAAADSTVDQAALERRLTGLDEAERRAVVTDVVRECVAAVLGHRSAADVRTEANFKDLGFDSLTAVQLRNRLSAASGLRLPATLAFDHPTPQALAAYLGTRLSGRTATPVAPVAPSAAATDEPVAIVAMACKYPGGATSPEGLWDLVAEGVDAVGAFPTGRGWDLERLFHPDPDHPGTSYADEGAFLPDAGDFDAAFFGINPREALAMDPQQRLLLEASWEVLERAGIDPTTLKGTPTGTYVGVMYHDYAAGLAQDAQLEGYSMLAGSGSVVSGRVAYTLGLEGPAVTVDTACSSSLVSIHLAAQALRQGECTLALAGGVTVMATPEVFTGFSRQRGLAPDGRCKPFAAAADGTGWGEGVGVLLLERLSDARRHGRRVLGVVRGSAVNQDGASNGLTAPNGPSQERVIRQALASGGLSSVDVDVVEGHGTGTTLGDPIEAQALLATYGQGRPVDRPLWLGSVKSNIGHTQAAAGVAGVIKMVMAMRHGVVPASLHVDVPSPHVEWDSGAVRLAVESVPWPEVEGRPRRAGVSSFGASGTNAHVIVESVPDGLGEDSVSVSGEAPETETDGRLVPWVVSARSPQALRDQALRLRDAVAADSTVSVQDVGWSLLKTRALFEQRAVVVGRERAELLSGLAVLAAGEEHPAVTRSREDGVAASGAVVWLFSGQGSQLVGMGAGLYERFPVFAAAFDEVCGLLEGPLGVEAGGLREVVFRGPRERLDHTMWAQAGLFALQVGLARLWESVGVRPDVVLGHSIGEIAAAHVAGVFDLADACRVVGARARLMGGLPEGGAMCAVQATPAELAADVDDSGVSVAAVNTPDSTVISGPSGEVDRIAGVWRERGRKTKALSVSHAFHSALMEPMLAEFTEAIREVKFTRPKVSLISNVSGLEAGEEIASPEYWARHVRQTVLFQPGIAQVASTAGVFVELGPGPVLTTAAQHTLDDVTDRHGPEPVLVSSLAGERPEESAFVEAMARLHTAGVAVDWSVLFAGDRVPGLVELPTYAFQRERFWLSGRSGGGDAATLGLVAAGHPLLGAAVEFADRGGCLLTGRLSRSGVSWLADHVVAGAVLVPGAALVEWALRAGDEVGCVTVEELMLQAPLVVPEASGLRVQVVVEEAGEDGRRGVQIYSRPDADAVSGDDSWICHATGTLTPQHTDAPNDGLAGAWPAAGAVPVDLAGFYERVADAGYAYGPGFQGLRAVWRHGQDLLAEVVLPEAAGAHDGYGIHPALLDATLHPALLLDWPGEVQDDDGKVWLPFTWNQVSLRAAGAATVRVRLSPGEHDEAEREVQVLVADATGTDVLSVGSVTLRPADIRQLQAVPGHDDGLFSVDWTPLPLSRTDVSQTDADGDADWVVLSDGVGSLADVVSAAGGEAPWAVVAPVGASAGGGLAGFDRREGLDGRLVVERVLSLVQEFLAAPELAESRLLVLTRGAVATGGDGDGDVDASAAAVWGLVRSAQSENPGRFILLDVDMDVDVDVDMDVDVDVDVDVDVDGDGNGSDLDPDLNGRRLPHATLRHAAEELDEPQLALRDGQLLVPRLVRATGGGLVVAPTDRAWRLDKGSAETLESVAPVAYPGVMEPLGPGQVRLGIHAAGINFRDVLVSLGMVPGQVGLGGEGAGVVTETGPDVTHLSVGDRVMGVLHGSFGPTAVADTRMVAPVPQGWDMRQAAAMPVAYLTAWYGLVELAGLKAGERVLIHAATGGVGMAAVQIARHLGAEVFATASAAKHVVLEEMGIDAAHRASSRDLAFEDTFRQATDGRGMDVVLNSLTGEFIDASLRLLGDGGRFLEMGKTDVRTPEEVAAEYPGVTYTVYDLVTDAGPDRIAVMMSELGERFASGALDPLPVRSWPLDKAREAFRFMSQAKHTGKLVLDVPAPLDPDGTVLITGGTGALGQVVAEHLVREWGVRHLLLASRRGLDAPGSGELADRLSDLGAEVTVAAADVSDPASVVELVGKTDPSHPLTGVVHAAGVLEDGIVTAQTPEGLARVWAAKAAAAANLHEATREMRLGLFVVFSSAAATLGSPGQANYAAANAYCDALMQRRRAAGQVGLSVGWGLWEAPDAKPGVAADAKPDVAADAKTGVAADGTPQGMTGTLSGTDVARMARIGVKAMTSAHGLALLDAAHRHGRPHLVAVDLDTRVLAHKPAPALPALLRAFAGDQGGQGGGRGGGRGGGPARPAAATTRQNVDWAAKLSVLTAEEQHRTLLDLVRTHAAAVLGHAGTDAVRADAAFQDLGFDSLTAVELRNRLSASTGLRLPATFIFRHPTPSAIADELRAQLAPAGADPAAPLFGELDKLETVITGHAHDESTRTRLAARLQNLLWRLDDTSARSDHAAGASDADGDAVENRDLESASDDELFELIDRELPS

SEQ ID NO: 20550 - protein, 3729 aa, Streptomyces fradiae
MSTENSTNVPASEDKLRAYLRRAMADLHESRERLRATEARAQEPIAVVGMGCRFPGGVGSPEALWRLVVEGVDAVSPFPGDRGWDVEGLYDPEPGVAGKSYVREGGFLHDAAEFDAEFFGISPREAVAMDPQQRLLLETSWEAIERAGIDPHSLHGSRTGVYAGVMYHDYGTGQTSATDTSGYSGTGTSGSVVSGRVAYTLGLEGPAVTVDTACSSSLVALHLAVQALRGGECDMALAGGVTVMAGPGMFVEFSRQRGLAADGRCKAFADGADGTAWAEGAGVVLVERLSDARRLGHPVLAVVCGSAVNQDGASNGLTAPSGPSQERVIRQALANARLTVADVDVVEAHGTGTRLGDPIEAQALLGTYGRDRDGGRPVWLGSLKSNIGHAQAAAGVAGVIKMVLAMRYGWLPRTLHVDEPSRHVDWSAGGVWLLTEAREWPGVDRPRRAAVSAFGVSGTNAHLILEAPDTAEAESATTPVRSEVSESAAVFDARSGVVPVVVSGRSRVVVREAAGRLAEVVEAGGVGLADVAVTMAGRSRFGYRAVVLARGEAELAGRLRALAGGDPDAGVVTGAVVDPETGSGGGGVVLVFPGQGTQWVGMGAGLLGSSEVFAASMRECARALSVHVGWDLLEVVSGGAGLERVDVVQPVTWAVMVSLARYWQAMGVDVAAVVGHSQGEIAAATVAGALSLEDAAAVVALRAGLIGRYLAGRGAMAAVPLPAGEVEAGLAKWPGVEVAAVNGPASTVVSGDRRAVAGYVAVCQAEGVQARLIPVDYASHSRHVEDLKGELERVLSGIRPRSPRVPVCSTVAGEQPGEPVFDAGYWFRNLRNRVEFSAVVGGLLEEGHRRFIEVSAHPVLVHAIEQTAEAADRSVHATGTLRRQDDSPHRLLTSTAEAWAHGATLTWDPALPPGHLTTLPTYPFNHHHYWLDTTPTTPATTTQSPTDAQNPADALPYKVSWKRLRDQDSLTARLDGRWLLVVPEASADPSVAEGVARELTARGATVESLTVEPGADRSRLRGLLVDATERDEAGPLRGIVSLLALAGDHAGADGARPVVPAGLAASLALIQAAGDAGTEAGLWAVTRGAVAAVPGDVPAPSQALLWGFGRVAGIELPHCWGGLLDLPTGPGDSGFRQLAATLAGRPAEDQVALRASGAYGRRLVRASAAGGADGWRPRGTVLVVGDTAEVAGPLVRWLLGNGARRVTLSGLSGPLPEELADVAARVTVAPCDPADRPALRTLLAEQAPTAVLVAPPAVPPTPLAEMTAEALAIALSAKTGLVDRLDSLLDEPDPLLEDGELDAFVVFSSVAGVWGGAGQGGYAAGTAYLDALAECRRAGGLPVTSVAWTPWLGTPAADSLGEQMSRAGITPLDPAASLDALARAVGRRAGCVTVADIDWERFASAYTATRPTPMFDEVPEVRRIQAAWAEAEADAARSGAGGDSQLLRSLRGRPEEAQLAELLRLVRTHAAAVLGLGSPGAVEARRSFKDLGFNSVTAVELRNRLKEATGLRLEVSLVFDHPDPASLARHLLDLALGQEPEETPRAFALEPAPNGEPIAIVSMACRMPGGVSTPEELWRLLRDGKDAIGPFPANRGWDLENLYDPDPDADGRTYVREGGFLHEAPDFDPSFFGISPREALAMDPQQRLLLETSWEALERAGIDPARLRGSRTGVFVGTNGQHYMPLLQNGGDSFDGYLGTGNSASVMSGRLSYVFGLEGPAVTVDTACSASLVALHLAVQAMRRGECDMALVGGATVMSTPEMLVEFSRQRVISANGRSRAFAAGADGVALGEGVGVLLVERLSDAERNGHPVLAVVRGSAVNQDGASNGLTAPNGPSQQRVIRQALADAGLRPEDIDAVEAHGTGTELGDPIEAEALLATYGRTRTADRPLWLGSLKSNIGHTQAAAGVAGVIKMVLALGNETLPRTLHVDEPTPRVDWSSGAVSLLTEPVDWPAGPSAPRRAAVSSFGISGTNAHTILEQAPVPAESRPGTEPADGTGAWENVTVPLLLSGHTEAALREQSTRLLNDLLEHPDEHPADVGYTLITGRAHFGHRAAVIGESREELLDALKALAEGREHHTVVRGDGTAHPDRRVVFVFPGQGSQWPSMARDLLDRAPAFRETAKACDAALSVHLDWSVLDVLQEKPDAPPLSRVDVVQPVLFTMMLSLAACWRDLGVHPAAVVGHSQGEIAAACVAGALSLEDAARIVALRSRAWLTLAGKGGMAAVSLPEARLRERIERFGQRLSVAAVNSPGTAAVAGDVDALRELLAELTAEGIRAKPIPGVDTAGHSAQVDGLKEHLFEVLAPVSPRSSDIPFYSTVTGAPLDTERLDAGYWYRNMREPVEFEKAVRALIADGYDLFLECNPHPMLAMSLDETLTDSGGHGTVMHTLRRQKGSAKDFGMALCLAYVNGLEIDGEALFGPDSRRVNPPTYPFQRERYWYHPTSGRRGDITAAGVAEAEHPLLGAGVELPETGGTVYTARFGPDSRPWLADHALLGTVLLPGTAILDLVLWAGERSGCGRVGELALQAPLVLPDSGDVELRLLVGGPDEEKRRTVTVHARPAAAGAEAPWTRHAEAVVLPATGEEPTPAPRPVPEPAGTTDPAAFYAEFAERGYDYGPAFQGFTAGARHGEDVVAEVALPSGLVADARHHRLHPALLDAALQAMILGTFFADDGRARMPFAVRGVRLHTAGADRLRVLISPAGDETVRLLCTDLATGAPVLEIDELVVRPVSGEQLAAGAPGRNGGELYRVDWTVLPEPAEVPAPRWALLGEDHAGLADVLGGTGGGCERYDTLTGLLEATTRSAGGILPDIVALSLPTAPEPGPQAVREVLSQALDAAQAWLAAGAETASARLVFVTGGAVATTADETVRDIAAAAVWGLVRSAQSEEPDRMVLLDLDGERPTARTLAAALASGEPQLAVRGSTVAAPRLAPAGPGPEDLVPPAGTTAWRLTPGGGTLEELSLAPAPDAEEPLAPGQVRIAVRAAGVNFRDALIALGMYPGKGTMGAEGAGVVVETAPDVTGLSAGDRVLGMWNGGFGPLVVADHRMVAPIPHGWSYAEAASVPAVLLTSYYALTRLARARTGQTVLVHAAAGGVGMATLQLARHLGLEVYATASTGKWDALQKHGIPDDRIADSRTLDFAERFLSRTGGRGVDIVLNSLAGEFVDASLRLLPRGGHFLELGKADVRDPRRIAAAHPGTDYRAFDLVQAGPDTVGEMLGELLELFAAGALRPLPLTAYGIRDARTALRTLSQARHTGKLVLTVPAGFDTHRTVLLTGGTGTLGQTLARHLVNRHGVRHLLLAGRTGAAAEGVAELIGELGELGAEVRVAACDAADRQRLTELLAGIPVEHPLGAVVHAAGTLDDGTIPSLTGENIDNVLRPKADAVLNLHELTRDADLSAFVLYSSSSALLGSPGQGAYAAANAFLDGFARYRKGLGLPALSLAWGLWGSNSRMAGHLDQSGMQRRLNRSGIMALTDAEGLALFDAAQDGGDALLVPMRLNRTALRASGRITPFLSGLAGGGPAAGERRPEVAAVSGTLAERLTGLTAQEGHALVLAEIRAHAAAVLGHGSDDSIPEDRAFKDLGFDSLTAVEMRNRLSAATGLRLPATLVFDHPTPGELAGHLSAELSADDAPGSASPLTELDRFEALFTALAPGTTKDTPGGAGALMIDEAERQEIAGRLAALAGLWNRLHGTTTAPEDGDTVADALEAADDHEIFAFLDERF

SEQ ID NO: 20551 - protein, 230 aa, Streptomyces purpurascens
MQAWQVHENGEPSEVMRLEDASATPAKAGLLSARANITPDACCAALQSARCLIGVEICGETEDGRRVIANPALPHGFAEYAVADAAALLPAPDALDDAEAAALHIGYQTGWFGLHRRAGLEAGETLLVHAAAGGVGSAAVQLGKAAGATVIGVVGGPGKAAVARELGCDVVIDRRAEDVVAAVKEATGGRAPNVIYDPVGGEAYTQSAKVVAFEGRIIVVFAGGTIPARP

SEQ ID NO: 20552 - protein, 325 aa, Streptomyces sp. JP95
MRIVRHYEHGAPSVLRLEEVEKPQPGPGQVLIRAEAIGVTFAEVQRRQGIPIGGHAGLPGAPGGDVAGTVEALGEGVTGFAVGDRVVGDVDRDAYADYVVTGTDWLIKIPQDLDAAAATLLPSPAQTAYHAIKEAGRLRPGQSIVIDAASGGVGHLAVQIAKALGAGKVIATASTQAKLDFARELGADVTVNYTDEDWTDQVLAATDGRGADIVLETVGGDVLLKSLGITAQFGTLVFYGSASGDIPDLPTLALSRMKNVAGFSLYAMLYNKQDAVAEGQRHLLDLIASGEVKPVVHDRLPLDEAVKAHELLEARAQLGKIVLVP

SEQ ID NO: 20553 - protein, 318 aa, Corynebacterium efficiens YS-314
MKAIVQTEEKNTASLELQDVPVPTLKPGEVLVEVKAAGVNRADLLQTQGNYPVPPGASEILGLECAGIIADPGDTGRSKGEEVACLLTGGGYAEFVAVPEGQLMPIPEGFSFVEAASIVEVACTVWSNIGMLAGLKEGQTFLVHGGAGGIGTFAVQMGKAMGATVAVTTGSPEKLQTCQQLGADILINYREEDFAEVLKNRADVILDIIGAKYLGQNVKALAKDGHMVTIGLQGGVKGELNLGLLLAKRGTISATALRGRDDADKARIVAATVEAIWPMLADGRITPHIDHTLPLADAAKALKALEDGTVTGKLVLEV

SEQ ID NO: 20554 - protein, 335 aa, Staphylococcus aureus subsp. aureus MW2
MKMIGFEKPFKLEEGNLFKVYEQRKPTPENDDILVKVNSISVNPVDTKQRQMEVTQAPRVLGFDAIGTVEAIGPDVTLFSPGDVVFYAGSPNRQGSNATYQLVSEAIVAKAPHNISANEAVSLPLTGITAYETFFDTFKISHNPAENEGKSVLIINGAGGVGSIATQIAKRYGLTVITTASRQETTEWCEKMGADIVLNHKEDLVRQFKEKEIPLVDYIFCTYNTDLYYNTMIELIKPLGHITTIVAFNEDQDLNALKLKSITFTHEFMFARPIHRTPDMIKQHEYLEDITKNIESGHYQPTTTQVFEGLSPENLYQAHQLLEKQSMIGKLVINI

SEQ ID NO: 20555 - protein, 318 aa, Corynebacterium glutamicum ATCC 13032
MQAIVQTEEKVTASLELQEVPVPTLKPGEVLVEVKAAGVNRADLLQTQGNYPVPAGASEILGLECAGVIVDAGDTGQTVGQEVACLLTGGGYAQYVAVPEGQLMPIPEGYSFVEAASIVEVACTVWSNIGMLAGLQKEDTFLIHGGAGGIGTFAIQMGKALGVTVAVTAGSTEKLKTCKNLGADILINYKEEDFAEVLKNKADVILDIIGAKYLSQNVKAMAKDAHMVVIGMQGGVKGELNLGHLLAKRGTISATALRGRDEADKARIVSSTVENIWPLLQSKEITPHIDHTLPLAEAAAALQKIQDGTITGKLVLAV

SEQ ID NO: 20556 - protein, 326 aa, Corynebacterium glutamicum ATCC 13032
MTKTTRQTMQAIVQTEEKVTASLELQEVPVPTLKPGEVLVEVKAAGVNRADLLQTQGNYPVPAGASEILGLECAGVIVDAGDTGQTVGQEVACLLTGGGYAQYVAVPEGQLMPIPEGYSFVEAASIVEVACTVWSNIGMLAGLQKEDTFLIHGGAGGIGTFAIQMGKALGVTVAVTAGSTEKLKTCKNLGADILINYKEEDFAEVLKNKADVILDIIGAKYLSQNVKAMAKDAHMVVIGMQGGVKGELNLGHLLAKRGTISATALRGRDEADKARIVSSTVENIWPLLQSKEITPHIDHTLPLAEAAAALQKIQDGTITGKLVLAV

SEQ ID NO: 20557 - protein, 11096 aa, Streptomyces noursei
MSTNPDKYVEALRSSLKEIERLRRQNEQLVAAAVEPVAVVGIGCRFPGGVTSPEDLWELVAEGRDVIGPFPQDRGWDLEKLAGGGEGGSLAQVGGFVEDAAGFDPGFFGISPREAVAMDPQQRILLEITWEALERAGIDPSTLRGTPTGVFVGTTGQDYGEVIKASAEDVEVYSTTGHAASVISGRLSYTLGAEGPAVTVDTGCSSSLVALHWAVQALRGGECSMALAGGASIMATPGPFVAFTAQSGLAADGRCKPFSDRADGTGWGEGAGMLVLMRLSDAQREGRPVLAVLRGSAINQDGASNGLTAPNGPSQQRVIRAALDSAHLTAADIDAVEAHGTGTTLGDPIEAQALLATYGQDRPRPLWLGSVKSNIGHTQAASGAAGVIKMIMALQRGVLPRSLHATEPTTDVDWTAGSVDLLDETVAWPETGRARRAGVSSFGISGTNAHVILEQAPTAPEEPTTEPTVRPAVVPWALSARTAAALDAQRARLTGHLADTPDADPLDVGYALADGRATFEHRAVLLPDGTELAHGTAGEGPCAVLFSGQGSQRPGMGRELHARFPVFAAAFDEITALLDTHLDRPLREVVWGTDADLLNDTGWAQPALFAVEVALYRLVASLGVTPDFVGGHSIGELAAAHVAGVLSLEDACTLVAARARLMQALPRGGAMLAIRATEDEVTPHLTDDVSIAAVNGPTSVVVAGTEEAVAAIGARFTAQDRKTTRLRVSHAFHSPLMDPMLAEFRAVAAGLTYHEPRIPVLSNLTGTVAAVADLCSADYWVRHVREAVRFADGVTALTDRGVTTLVELGPDGVLSAMAQESLPDGAAAVPLLRKDRPEELSAVTGLARAHVRGVTVRWAGLFDGTGARRADLPTYPFQHQRFWPTAARAAQDVTAAGLGAADHPLLGATVELADGAGYLFTSRLSVRTHPWLADHGVQGRALLPGTAFVELAVRAGDEAGCDRVEELTLAAPLVLPERGGVQLQVRVGAPDAAGRRTLGIFSRVEDGFDLPWSQHATGVLTAGAGAPDPTFDATVWPPSGAEPVDLTGAYERLAALGFQYGPAFQGLRAAWRRDTEVYAEVALPDGADTDPAAFGLHPALLDAAQHAAAYADLGAISRGGLPFAWEGVSLAAAGATTVRARIAPAGEDTVTIAVYDAAGGTVLSVDSLVSREVPADAPGAAGTVHRDSLFHVEWTPLQGRPGPAPATVAVLGPDPDALADTLRATGIRTTAPRDLAALADAEGPVPDLVVTTLTTTPGAPVPDAAHATTAAVLALAQQWLADDRFADARLVLVTRGATDGTDPAAAAAGGLIRTARTENPGRFALLDLAPDTGRPDPETLATALAASHDEPDLAVRGTDVHAARLARVPLATEPTTWNPDGTVLITGGTGGLGAVLARHLVATHGVRHLLLASRRGPAADGADDLTAELTGLGATVHIAACDVADPAALADLLGTVPAGHPLTVVVHTAGVVDDGVLGSLTPQRLDTVLRPKADAAWHLHEATRHLDLDAFVLFSSVAATLGSPGQANYAAGNAFLDALAARRAATGLPATSLAWGPWTQSVGMTSSLSDLDVERIARSGMPPLTLEQGTALFDAALAAGPAALAPVRLDLPVLRTQGDIAPLLRGLIRTPVRRTAAQVSQTADGLAQRLAGLDAAARREALLELVRTQIAQVLGHADATEVETGRQFQDLGFDSLTAVELRNALNTATGLRLPATMVFDYPTPHALADHLRDELLGTEAESTTAVPVPTRTAGTDDPIVIVGMACRYPGGIASPEDLWRLVSQGADATGPFPTNRGWDLDNLYDPDPDRPGRTHVRAGGFLHDAGSFDADFFGMSPREAMATDSQQRLLLELSWEAVERAGIDPASLRDSGTGVFAGVMYNDYGTTLTGDEYEAFRGNGSAPSVASGRVSYTLGLEGPAVTVDTACSSSLVALHWAAQALRAGECSLALAGGVTVMSTPSTFVEFSRQRGLAPDGRSKAFAEAADGVAWSEGVGMLVLERQSDAVRNGHEILAVVRGSAVNQDGASNGLTAPNGPSQQRVIRQALASGGLSTADVDAVEAHGTGTTLGDPIEAQALLATYGRDRDPENPLLLGSIKSNIGHTQAAAGVAGVIKMVMAMRHGVLPQTLHVDAPSSHVDWSVGAVELLTEQTAWPETGRARRAGVSSFGISGTNAHVVIEQSPTAVPATPASADRSVEEPPAVPWALSGKTPDALRDQAARLLAHVEAHPALRPVDISYSLIATRTAFDHRAVVLGTDRAEALRALTALAAGETDPAALTGTVRTGRTAFLFSGQGSQRLGMGRVLYERFPAFAEALDTVLTALDAELGHPLRDIIWGEDAQLVDRTGYTQPALFAIEVALFRLLEAWGITPDFVAGHSIGEIAAAHVAGVLSLGDACRLVVARAVLMQSLPEGGAMIAVQATEDEVLPLLTDDVSIAAVNSPTSVVVSGYENATLAVARHFADQGRRTTRLRVSHAFHSPLMAPMLDDFRAVVESLTFTAPTTPVVSNLTGELAPAEALCSADYWVRHVREAVRFADGIRTLADRGVTTFVELGPDSVLSAMAQESAPEGAGTIPLLRRDRPEEQAVLAALCHLQVLGVEADWSATFRGLDPVRVDLPTYAFQHRWFWPAARPARPDDVRAAGLGAAEHPLLGAAVQLPDDDGALFTGRLSLRTHPWLADHTVLGTVLLPGTALVELAVRAGDETGSGHLEELTLAAPLTLPEDGATLLQVRVGSADDTGRRTVTVHARPDDTADRTWTLHATGVLATTPPAAAAFDTTVWPPADAEPLTTDDCYAHFTTHRFAYGPAFQGLRAAWRAGDVLYAEVALPESATDEAAAFGLHPALLDAGLHAALLADDRDTGLPFSWEGVTLHASGATALRVRLAPNGPNGLSVTAADPAGNPVATVTRLLARPLDAEQLTIHSALTRDALFHLDWTPVPLPDTANSAPPALLGPDTAVLADALGDPAVARHATLDDLLAGDTTPPATVLVPLGAPLDGDTAQHAHALTRSALTLVQQWLATDRLADSRLVFVTHGAVATDDAPPTDLAAAAVWGLIRSAQTENPGTFTLLDLDTEPDSTTALSRALTLDEPQLLLRAGRARAARLTRTPAPTTTTHTPWSADGTVLVTGGTGGLGGLVARHLVRSCGVRHLLLTSRSGVGAAGAAGLVAELESLGARVVVAACDVGDGSAVAELVAGVSESYPLSAVVHAAGVLDDGVVGSLTPERLAAVLRPKVDGAWNLHEATRGLDLDAFVVFSSVAGVFGGAGQANYAAGNAFLDALMVHRVAGGLPGVSLAWGAWDQGVGMTAGLTERDVRRAAESGMPLLTVDQGVALFDAALATGSAALVPVRLDLAALRTRGDIAPLLRGLVRAPLRRTAATGLATGADTGLVQRLGRLDHAQRHEALLDMVRSSAALVLGHADGNAIDAERAFRDLGFDSLTAVELRNRLRTATGLHLSATMVFDHPTLSALAEHLRDELFGAVESEVRVPVQALPPTADDPIVVVGMACRFPGGVTSPEDLWRLVDDGTDAITTFPTNRGWDLDNLYDPDPEHFGTSYTRSGGFLHEAGEFDPAFFGMSPREALATDSQQRLLLESSWEAIERAGIDPLTLRGSATGVFAGVMYSDYGSILGGKEFEGFQGQGSAGSVASGRVSYALGFEGPAVTVDTACSSSLVALHWAAQALRAGECSLALAGGVTVMSTPSTFVEFSRQRGLAPDGRSKAFAEAADGVGWSEGVGILVLERQSDAVRNGHEILAVIRGSAVNQDGASNGLTAPNGPSQQRVIRQALASGGLSTADVDAVEAHGTGTTLGDPIEAQALLATYGRDRDPENPLWLGSLKSNIGHTQAAAGVAGVIKMVMAMRHGVLPQTLHVDAPSSHVDWSVGAVELLTEQTAWPETGRVRRAGVSSFGISGTNAHVIVEQPALVESPAAEPSGREPGVVPLPLSGKSPEALRDQAARLLAGLAERPALRPLDLGYSLATTRSAFDHRAVVLATDRADAVRALTALAAADADLSAVVGDTRTGRHAVLFSGQGSQRLGMGRELYERFPVFAEALDVAIDHLDAALPAQASLREVMWGDDVELLDETGWTQPALFAVEVALFRLVESWGVRPDFVAGHSIGEIAAAHVVGVFSLEDACRLVAARATLMQALPTGGAMIAIQAAEDEVTQHLTDDVSIAAVNGPTSVVVSGAESAARTVADRLAENGRKTTRLRVSHAFHSPLMDPMLAEFRAVAEGLSYATPTLPVVSNLTGRLATADDLCSAEYWARHVREAVRFADGVSTLENEGVTTFLELGPDGVLSAMAQQSLTGDAATVPALRKDRDEETSALTALAHLHTAGLRVDWAAFFAGSGATRVDLPTYAFQHATYWPTGTLPTAHAAAVGLTAAEHPLLNGSVELAEGEGVLFTGRLSLQSHPWLADHAVMGQVLLPGTALLELAFRAGDEAGCDRVEELTLAAPLVLPERGAVQTQVRVGVADDTGRRTVTVHSRPEHATDVSWTQHATGTLTMGSAPADTGFDATAWPPADAEPLATDDCYARFTTLGFAYGPVFQGLRAAWRAGDVLYAEVALAESTGDEATAFGLHPALLDAALHASLVAHEGEESNGGLPFSWEGATLYATGATALRVRLTPTGTDGRSVAIAVADTAGRPVAAIDNLVSRRVSGDQLTGAAGLARDALFTLDWNPVPENLVPENPVPENTGGGHAQDQDGRPAAATVALVGADGTAIAADLTAAGIHTTLHPDLTTLATTDADVPKTVLIPLTGTGTGTGTGTESTDGIGTGAAESDASAPSPAEVAHTLSTAALALVQEWTAQERFAGSRLAFVTTGATAAGGTDVMDVAAAAVWGLVRSAQSEAPDTFVLIDRDPGPAGTHDRTAAAERGQLLLRALHTDEPQLALRDGGVLAARLARFDTAAALTPPADRAWRLDSTAKGSLNGLALTPYPAALAPLTGHEVRVEVRAAGLNFRDVLNALGMYPGDDVGSFGSEAAGVVVEVGPEVTGLAPGDQVMGMITGSFGSLAVDDARRLARLPEDWSWETGASVPLVFLTAYYALKELGGLRAGEKVLVHAGAGGVGMAAIQIARHVGAEVFATASEGKWDVLRSLGVADDHIASSRTLDFEAAFAEVAGDRGLDVVLNSLAGDFVDASMRLLGDGGRFLEMGKTDIRAADSVPDGLSYQSFDLAWVVPETIGTMLAELMDLFRTGALRPLPVRTWDVRHAKDAFRFMSMAKHIGKIVLTLPRSWKPEGTVLVTGGTGGLGGLVARHLVRSCGVRHLLLTSRSGVGAAGAAGLVAELESLGARVVVAACDVGDGSAVAELVAGVSESYPLSAVVHAAGVLDDGVVGSLTPERLAAVLRPKVDGAWNLHEATRGLDLDAFVVFSSVAGVFGGAGQANYAAGNAFLDALMVHRVAGGLPGVSLAWGAWDQGVGMTAGLTERDVRRAAESGMPLLTVDQGVALFDAALATGSAALVPVRLDLAALRTRGDIAPLLRGLVKAPIRRAAATTPGDTGLAEQLTRLQRAERRDTLLALVRDQAAMVLGHTSGDGVDPSRAFRDLGFDSLTAVELRNRIGAATGLRLPATAVFDYPTADALAAHLLTELLGPDAESDPDEPGDPTAGPTDDPIVIIGMSCRFPGDIGSPEDLWRLLGDGADVVTDFPTNRGWDLDNLYDPDPAHAGTSYARTGGFLHDAADFDADFFGMSPREAMATDSQQRLLLESSWEAIERAGIDPLTLRDSRTGVFAGVMYSGYGTRLDGAEFEGFQGQGSALSVASGRVSYTFGFEGPAMTVDTACSSSLVALHLAAQALRGGECTLALAGGVTVMSIPDTFIEFSRQRGLAPDGRSKPFSESADGVGWSEGVGMLLLERQSDAVRNGHQILAVVRGSAVNQDGASNGLTAPNGPSQQRVIRQALASGGLSTADVDAVEAHGTGTTLGDPIEAQALLATYGRDRDPENPLLLGSIKSNLGHTQAAAGVAGVIKMVMAMRHGVLPRSLNITEPSSHVDWSAGAVELLTEQTAWPETGRARRAGISSFGISGTNAHVILEQPEAARHSAPEEADTAEAAAKAPATAHLPVMPWALSGKTPEALRAQAARLLAHLQQRPELAPADIALSLATQRSQFTHRAVVLSTDRDEATRALSALATTAASDPSALTGTVTMGRCAVLFSGQGSQRLGMGRELYERFPVFAEALDVVIDHLDAALPAQAGLREVMWGDDVELLNETGWTQPALFAIEVALFRLVESWGVRPDFVAGHSIGEIAAAHVVGVFSLEDACRLVAARATLMQALPAGGAMIAVQATEDEVIPHLTDEVAIAAVNGPTSVVISGAEEATQTVAQHFADQGRRTTALRVSHAFHSPLMMLAEFRAVAEGLSYATPTLPVVSNLTGQVATADELCSAEYWVRHVREAVRFADGVTALEAEGVRTFLELGPDGVLAAMARETVADDTVTVPVLRRNMPEERTLLTALGRLHTTGTPIDWAALLAPTGARPVDLPTYAFQHRPFWPSGPRDTADAAAVGIAGASHPLLNGIVELADEEGLLFTGRLSLQSHPWLADHAVMGQVLLPGTALLELALRAGDEVGCDHVEELTLAAPLVLPERGAVQTQVRVGVADTTGRRTVTIHSRPARATTTDSDTHTGTDTPWTQHATGVLVAGLPATATVPFDATVWPPAHAEPVDLADFYASRAGEGFGYGPAFQGLRAAWRRDGEVFADVALPEAGRTEAEAYGLHPALLDAGLHAAWLVAPDGEPTRTGSVPFSWRGVFLAASGASSVRVRLGRDSDGTLSLAIADTTGAPVASVQALSMRTVSVTALSATAGLARDALFRLDWASAPEPACQPDDTVTVIPAVAVVGTETSELTSELTAALRAAGADVDVRTTLSTDEPAPALIALPLVASDQTGTAEAAPVPAAVHDLTRRALALVQTRLQEQHFADTKFVFVTRGATVGRDVAAAAVWGLVRSAQSENPGCFALVDLDPDGAVGAAALVAALVSGEPQLAVRGDVLRVARLVRRPLTEVGAGADGTGDGVGGGSGVSFSGEGAVLVTGGTGGLGAVLARHLVAEYGVRDLLLVSRSGERAVGAGELVAELAGVGARVRVVACDVTDRAAVVELVGGHAVSAVVHAAGVLDDGMVGALTGERLSAVLRPKVDAVWHLHEATRGLDLDAFVVFSSLAGVFGSPGQANYAAANAFLDALMTRRRAEGLPGLSLAWGPWSLTDGTSGMLADAEADRLTRSGVPPLTAEQGLALFDAALATGDATCVPVRLDLSALRAQGEVPPLLRSLIRGRSRRAAAAESATATGLRERLVGLNPVERQEVLLDLVRGQVALVLGHADADDVHPARAFRELGFDSLTSVELRNRLNTVTGLRLPATMVFDYPTVEVLVSYVLDELLGTDAEVATVQPAAVAVADDPIVIVGMACRYPGGVASPDDLWRLVTDGVDAVSPFPTNRGWDVESLYHPDPDHLGTSYTRSGGFLHEAGEFDPGFFGMSPREALATDSQQRLLLESSWEAIERAGIDPVSLRGSRTGVFAGVMYSDYSAMLASPEFEGFQGSGSSPSLASGRVAYTLGLEGPAVTVDTACSSSLVAMHWAMQALRSGECGLALAGGVTVMSTPAVFVDFARQRGLSPDGRCKAFADAADGVGWSEGVGVLVLERQSDAVRNGHEILAVVRGSAVNQDGASNGLTAPNGPSQQRVIRQALASGGLTAGDVDVVEAHGTGTTLGDPIEAQALLATYGRDREPERPLLLGSVKSNLGHTQAAAGVAGVIKMVLAMRHGVVPRTLHVDAPSSHVDWSEGAVELLSEQAAWPETGRVRRAGVSSFGISGTNAHVILERPEAARRPVMETNTVEPSTVPWVLSGKTPEALRAQAAKLLSSIEERPELRLVDVGMSLVTGRSTFEHRAVVLAADRADAARALSAIAADEADAAAATGRVGAGRHAVLFSGQGAQRLGMGRELYERFPVFAEALDVVVDHLDAALPAQAGLREVMWGDDAELLNETGWTQPALFAIEVALFRLVESWGVRPDFVAGHSIGEIAAAHVAGVFSLEDACRLVAARATLMQALPAGGAMIAVQATEDEVTPHLTDDVAIAAINGPNALVVSGVEDAAVEIGARFAAEGRRTTRLHVSHAFHSPLMDPMLAEFRVVAEGLSYAAPSLPVVSNLTGQVATADELCSAEYWVRHVREAVRFADGVTALEAEGVRTFLELGPDGVLAAMAGASLTESSLAVPLLRKDRPEEPAALAALAQLHIAGARVDWPVLFAGVGAGRVELPTYAFQRGWFWPVGRVGVGGDVGAVGLGSAGHPLLGAAVELAAGAGVVLTGRLSLSSHGWLADHAVMGRVFVPGTALLEMVMRAGDEVGCGRVEELTLAAPLVLPERGGVRVQVAVDAPDAAGRRGVGVYSCPDGVGQAVWSQHAVGVLASGVADQVGGFGDGGVWPPQGAVSVDAEGCYELFADAGFGYGPVFQGLRAVWRRGEELFAEVALSDEVAESADTATGFGLHPALLDASLHASLLSSLEGQSADGGPALPFAWEGVSLFASGATALRVRLAPAGEHAVSVTAVDPTGAPVISIDALRTRRLTLDEVNASHTQLSDALFGVQWTTVPSTPAADHPSVAIIGTDHLGLAEALSSSSAGATTTTTAAAYESLDALIAAGPEVSVPDVTLIGLTTEDAIAQYVNDHDATVAGQGTIGAGAAAVDAARRLTAEALRTIQAWLADERLAARRLVFVTRGAADGQDVAAAAVQGLVRSAQTENPGTFGLLDLDGTEASTAVLGEALTSDEPQLLLRDGHLHAARLTRLASPADTAVPTEWNADGTVLITGGTGGLGAQFARHLVDRYGVRNLLLVSRRGPDAPGTTELVAELTAHGAEVAVQACDVADGDAVAALVAGVPDEHPLRAVVHTAGVLDDGVIGSLTEERLATVLRPKADAAWHLHEATRGLDLDAFVVFSSVAGVFGGAGQANYAAANAFLDALMAQRRAAGLPGLSLAWGPWDQTGGMTGMLSDAEADRLARSGIPPLSAEQGLALFDAALALAGTSTPDRAAGSAAASTSGTGDTIAIPAAALVAPVRLDLAALAAQGEVPAILRGLVRTRTRRTAAGGSVTVAGLVNRLSGLTADERRQELLELVRTQAALVLGHADPASVDSTAQFRDLGFDSLTAVELRNRLSTATGLRLTATLVFDYPNTDALAEHLRDELFGAVESEVRVPVQALPPTADDPIVVVGMACRFPGGVTSPEDLWRLVDAGTDAITTFPTNRGWDLESLYDPDPAHLGTSYTRSGGFLHEAGEFDPAFFGMSPREALATDSQQRLLLESSWEAIERAGIDPLTLRGSATGVFAGVMYSDYGSILGGKEFEGFQGQGSAGSVASGRVSYTLGFEGPAVTVDTACSSSLVALHLAAQALRAGECTLALAGGVTVMSTPGTFVEFSRQRGLAPDGRSKAFAEAADGVGWSEGVGILVLERQSDAVRNGHEILAVIRGSAVNQDGASNGLTAPNGPSQQRVIRQALASGGLSTADVDAVEAHGTGTTLGDPIEAQALLATYGRDRDPENPLLLGSIKSNLGHTQAAAGVAGVIKMVMAMRHGVLPQTLHVDAPSSHVDWSVGAVELLTEQTVWPETGRVRRAGVSSFGISGTNAHVILEQPEAVQRLAPGAAETVEPVAIKPSAEPSLVPWALSGKSPEALRAQAARLRDFLAERPEPRSIDIGHSLAVTRSQFDHRAIVLVDDAKAPADSLAALAALASGVADPAVVSDAVSTGGSAVLFTGQGAQRLGMGRELYGRFPVFAEALDVVVDHLDAALPAQAGLREVMWGDDVELLNETGWTQPALFAVEVALFRLVERWGVRPDFVAGHSIGEIAAAHVAGVFSLEDACRLVAARATLMQALPTGGAMIAVQATEDEVTPHLTDEVAIAAVNGPTSVVISGAEEATQTVAQHFADQGRRTTALRVSHAFHSPLMDPMLAEFRAVAEGLSYATPSLPVVSNLTGWLATADELCSAEYWVRHVREAVRFADGITTLEAEGVRTFLELGPDGILSALAQQSLAGEAVTVPVLRKDRGEESTALTARAHLHTRGLIEDWQDFFAGVGAGRVELPTYAFQRGWFWPVGRVGVGGDVGAVGLGSAGHPLLGAAVELAAGAGVVLTGRLSLSSHGWLADHAVMGRVFAPGTALLEMVMRAGDEVGCGRVEELTLAAPLVLPERGGVRVQVAVDAPDAAGRRGVGVYSCPDGVGQAVWSQHAVGVLASGAADQVGGFGDGGVWPPQGAVSVDAEGCYELFADAGFGYGPVFQGLRAVWRRGEELFAEVALSDEVAESADTATGFGLHPALLDASLHASLLSSLEGQSADGGPALPFAWEGVSLFASGATALRVRLAPAGEHAVSVTAVDPTGAPVISIDALRTRRLTLDEVNASHTQLSDALFGVQWTTVPSTPAADHPSVAIIGTDPFGLADGLSDALPLVEERGDLAALAASEHPVPDLVLVPVAGTRRTGVPADAEGHTDAGTSDMLRSVREATAQVLEQIQQWLADDRFEAARLVFVTRGAVSVGEGGIADLAASAVWGLVRSAQSENPGCFGLLDLDLDLALDSDLAPEVDIERDRDRDPVGGTVQPALAAALHATADEPQLALRGGTVQAARLTRIPAPQTDRAETDPAETDRPEIDTRRPGTVLITGGTGGLGGLLARHLVAERGVRSLVLASRSGLAAEGAEKLVADLEALGAVVAVQTCDVADGDAVAALVAGVSDEYPLTAVVHTAGVLDDGVIGSLTEERLATVLRPKADAAWHLHEATRDLDLDAFVVFSSLAGVLGGAGQANYAAANTFLDALMAQRRAAGLPGVSLAWGPWDRAGGMTGTLSDAEADRLARSGVPPISAEQGLALYDAATAGERPLVVPVRLDLAALRGLGDVPALLRGLVRTPARRTAAAGAAPSADVLTRQLAGLGGAEQEEVLLRLVRGQAAVVLGHADGSAIGAGRQFQELGFDSLTAVEFRNRLNAATGLRLPATLLFDYPTPADVVGHLRGRLGTGEVSGAGSVLAALDNLEAVIAGLSLDDAGEHQLVAGRLEVLRAKWADMRSAEGAVDGGADVDIEEASDDDMFALLDDELGLN

SEQ ID NO: 20558 - protein, 5435 aa, Streptomyces noursei
MNAPENPETPENNVVAALRAAVKETDRLRRQNRMLVAAAKEPIAVVGMACRFPGAVDSPEALWEMVATGTDVISGFPDDRGWDLEALRNSGTDARDTDVSQRGGFLDCIADFDPGFFGISPREAVTMDPQQRLLLTTAWEAVERAGIDATTLRATRTGAFIGTNGQDYAYLLVRSLDDATGDVGTGIAASAASGRLSYTLGLEGPALTVDTACSSSLVALHLAVQALRNGECGMALAGGVNVMATPGSLVEFSRQGGLARDGRCKAFADAADGTGWSEGAGVLLLERLSDAQRNGHPVLAVVRGSAVNQDGASNGFTAPNGPSQQRVIRQALANAGLATGDIDAVEAHGTGTPLGDPIEAQSILATYGQDRAHPVLLGSIKSNMGHTQAASGVAGVIKMIMAMRHGVLPRTLHVDRPSTHVDWTTGSVELLTDAHPWPETGRPRRTGISSFGVSGTNAHVIVEQAPDTPAEAADDTPPRTPRTLPWLLSARTGAALRDQATALLDHLDRPDGDRGPTALDTAFSLATTRAALEHRLAVVTGTDGTAGRDALTAWLAHGTAPDAHEGHAAGRTRCAALFSGQGAQRLGMGRELHARFPVFARALDTAVDLLDAELGGTLREVIWGTDDAPLNETGFTQPALFAVEVALYRLIESWGVAPDFVAGHSIGEIAAAHVAGVFSLEDACTLVAARAGLMQALPRGGAMVAVEATEDEVSPLLTDGVAIAAINGPTSLVVSGDETATLAVAARLAEQGRRTTRLRVSHAFHSPLMDPMLAEFRAVAEGLSYGEPQIPVVSNLTGAVADGTLLGTADYWVRHVREAVRFADGIRALTDAGVGAFLELGPDGTLAALAQQSAPDAVSVPVLRKDRDEEPAAVAALARLHTAGVPVDWTAFYAGTGAHRTDLPTYAFQYERYWPKATYRPADATGLGLTAADHPLLGAAMSVAGSDELLLTGTLSLATHPWLADHVVGGMVFFPGTGFLELAVRAADQVGCDRVEELMLAAPLILPATGTVQMQIAVGAADDDGGRDLRFFTRPGDDPDAAWAQHATGRITEGERVLALDTTTWPPRDAEPVDIDGLYDRYRANGLDYGPVFRGLRAVWRRDTEIYAEVALPEGTADADAFGLHPALFDAVLHSTLFASADGDDRSLLPFAWNGVSLHAAGADALRVRITSCGPDAVEITAVDPQGRPVVSVESLTLRAAGPDAGTADHRADAGSLFRMDWTPRTVHAPATPATWAVLGTDPIGLTEALTAAGPDTVTGLRDGVDALGELTAGDDRPVPDVVAVPLRGATDHGPAGAHDLTRTVLALLQEWLAEERFARSRLLLVTRGAVADGERGPLDLAAAPVWGLVRSAQSENPGRLLLVDLDDTAESAAQLPLLPALLDADEPQAVVREGTVRVGRLARLDSGRGLVPPPGTPWRLGSRAKGSLDGLALLPHPEARRPLTGHEVRVGIRAAGLNFRDVLNALGMYPGDAGLFGSEAAGVVVEVGPEVTGLAPGDRVMGMLFGGFGPLGIADARLLTPVPADWSWETGASVPLVFLTAYYALKELGGLRAGEKVLVHAGAGGVGMAAIQIARHVGAEVFATASEGKWDVLRSLGVADDHIASSRTLDFEAAFAEVAGDRGLDVVLNALSGEFVDASMRLLGDGGRFLEMGKTDIRAADSVPDGLSYHSFDLGMVDPEHIQRMLLDLVELFDRGALAALPVRSWDVRRAGEAFRFMSLAQHIGKIVLTVPQPLDPDGTVLLTGGTGGLAGLLARHLVTEHGARHLLLAGRRGPDAPGAAALHAELTALGAEVTVAACDVADRTALAALLATVPAEHPLTAVVHTAGVLDDGTLTALNPDRLATVLRPKVDAAWHLHDLTRHLDLAAFVLYSSTAGVMGGPGQANYAAGNTFLDALAAHRHALGLPATSLAWGAWEQGAGMTGALTDHDLRRVSDAGGQPLLTAERGLALYDAATAADEPLIVPLGLTGGALPAGVGVPAVLRGLVRTAGRRARAGTAGVSRAGLAERLAALPEEERTPFLVELVRTEAATVLGHGSTDPVDARREFRQLGFDSLTAIELRNRLGKATGLTLPATLIFDYPTPDRLAVHLHDELLGADAPVTVTAAAQAADPEHDPVVIVGMSCRFPGGVSSPEELWDLVASGTDAITGFPADRAWDRHPQLAGAPGARTGQGGFLRDIADFDAAFFGISPREALAMDPQQRILLEVAWEAAERAGIDPQTLRGSDTGVFMGVSGQDYAGLVMRSRDDIAGHATTGLAVSVVSGRLAYALGLEGPALSVDTACSSSLVSLHLAAQALRAGECTMALAGGVTVMTTAANFTGFSRMGGLAQDGRCKAFSDSADGTGWSEGAAVLVLERLSDARRAGHRVLAVVRGSAVNQDGASNGLTAPNGPAQQRVIRQALANAGLTPVDVDAVEAHGTGTPLGDPIEAQALIAAYGTDRDPEHPLLLGSVKSNIGHTQSAAGAAGLVKMVMAMRHGILPQTLHLTEPSSHVDWSAGTVRLLTERTAWPRTDRPRRAGVSSFGISGTNAHVILEQPPAEPTPAADPGRPAPTVVAWPVSAQTPAALDAQLDRLRTAAALAPLDTAHTLATGRSLFEHRAVLLATVGDPATGAPDLPEVARGAATPHRTAFLFSGQGAQRSGMGRELHAAFPVFAAAFDEVVAVLDAELGSDADGGVSLREVMWGGGSELLDRTRFTQPALFAVEVALFRLVASWGVGPEFVAGHSVGEIAAAHVAGVFSLVDACRLVVARASLMDALPVGGVMVAVEAAEAEVVPLLVDGVAIAAVNGPVSVVVSGVEAAVGQVVDQLVERGRRVRRLAVSHAFHSPLMDPMLDAFRAVAEGLEYHQPRIPVVSNVTGEVAAAEELCAADYWVRHVRATVRFADGVRTLAERGATAFLEIGPDGVLSALARGVLPAEALVTPTLRKDRDEESALLAGLARLHVAGVTVDWSAALTGTGARGTDLPTYAFQRERYWPELAAEPAGGGADAADAEFWAAVERADATALAAHLDIDGDQLGAVLPALSAWRTRRRTTSATNALRHRESWEPLSLAGTPHTGGVLVLVPAAATTDPWVADVVAALGPDARRVDVPADGTDRAALAALLTEAADDTAPTAVVSLLALDETSGDDAVPAGTTATAALVQALADTGAPAPLWALTRGAVAALPDEQPTAPAQAAVWGLGRIAALELPRHWGGLVDLPADLDERTARRLPAALADAGDEDQLALRATGAYGRRITPAPAPDDAPGTGWQPTGTVLITGGTGALGRHTARWLAAHGAEHLLLLSRSGPDAPGAAELTTELTALGARVTLVACDAADREQLTRVLAEVPRDCPLTGVVHTAGVLDDGVLTGLTPDRFATVFRAKVASAVLLDELTRDTDLAVFALFSSVAGAVGNPGQAGYAAANAVLDALAARRRAQGLAGTSIAWGAWAGDGMAARHTRPGAEPVGLLDPDLAVPALARAVTEPQPTLVLADLQQPRLLESLLALRPSPLLSRLPAARTAARAVQEADRRRAGAAADLRDQLAGTAPADRHAVLLRLVRTTAAAVLGHTGADAIRADKPFRDLGFDSLTAVELSSALAAATGLALPPSLVFDHPSPRALADHLRAELTGDRPESAPAAPPAPVPAADDDPIVVVGMACRFPGGVTTPEEFWQLLAEGRDGIDAFPTDRGWDLDVLGRRRPGPQRPPRSAASSYDAAAFDPGFFDISPREALAMDPQQRLLLETAWEAVERTGTDPTRLRGSRTGVFVGTNGQDYAGLVLRAQEDVEGHAGTGLAASVISGRLAYAFGFEGPAVTVDTACSSSLVALHWAVQALRAGECSLALAGGVTVMTTSTSFAGFTRQGGLAPDGHCKAFSDSADGTGWSEGVGVLVVERRSDALRNGHEILAVVRGSAVNQDGASNGLTAPNGPAQQRVIRQALANAGLAPGDVDAVEAHGTGTVLGDPIEAQALLATYGQDRPADRPLWLGSVKSNIGHTQAAAGAAGLMKMVLALQHGTLPRTLHVTEPSTRVDWSAGAVRLLTERTVWPRTDRPRRAGVSSFGISGTNAHVILEQPPAEPTPTAPADRPTRTPAVLPWVVSARSATALDAQLARLRAFAAERPDLPPADVAHSLVTSRATFEHRAVLLAAPDGITAAARAEARERSTAFLFSGQGAQRSGMGRELHAAFPVFAAAFDEVVAVLDAELATGSGGGVSLREVMWGGGSELLDRTRFTQPALFAVEVALFRLVASWGVGPEFVAGHSVGEIAAAYVAGVFSLVDACRLVVARASLMDALPVGGVMVAVEAAEAEVVPLLVDGVAIAAVNGPVSVVVSGVEAAVGQVVDQLVERGRRVRRLAVSHAFHSPLMDPMLDAFRAVAEGLEYHQPRIPVVSNVTGEVAAAEELCAADYWVRHVRATVRFADGVRTLAERGATAFLEIGPDGVLSALAAACLFDTDAEVVPALRKGRPEEHTALTAAAQLHVAGVDIDWTAVLAGTGGRRIALPTYAFQRERYWPSLAAQAPGDAGGLGLEAGRHPLLGAATTVAGSAEILLTGRLSTTAQPWLAVYEADGRTVLPAAVLAELAVRAGDQADCPTVAELTVAAPLVLTGAAAQRLQVRVAAPDDTGRRALSVHARPDDSPDSPWTLHATAVLTHDTPQPPAPDTGWPPERAVPLDALPTATGPARIAAAWQWGDELCAEIELPEPGPAERAFALHPALLDTAVRAGGLLDGDATLDALGWRGLALHAASATALRVRLTPDGTDTWALEATDPQGAPVVSVTGLTLGTPTVDRSGAGAADDGATLLDLEWVPAPQAAPTGGDHLPYAVLGDQLAELDGQLRIAGDGPGRVASLAALLDGGAPLPRLVLAPVLGVPTGEGDLPAAVRGTTTAVLELLQRWTADARTADSHLVIVTRGAVAAGAEDVHDLAAAPVWGLVRSAQSEHPGSFLLLDLDPADPAGASRAAAPATLAALLDAGETQAAVRADTLTVARLTRAADGPEATAGHPVRDWDRDGTVLITGGTGGLGGLLARHLVTGHGIKHLLLAGRRGPDAPGARALRDELAALGAEVTVAACDVADRAALDRLLAQLPPEHPLTAVVHTAGVLDDATVGTLTPERLDTVLRAKADAAWHLHDATRDRDLAGFVLYSSVAGVTGGPGQGNYAAGNTFLDALAAHRAAQGLPGLSLAWGPWGQDAGMTGTLGAADLARLERSGMPPLTPEQGLALFDAAGARGDGFAVAVRLARGAAAPGADEVPAVLRALVRGRRRTAAAAGHAGVLARRLAALDAEQRHQALLDLVRTETAAVLGHSGADAVPAERDFNRLGFDSLMAVELRTRLATATGARLPATLVFDHPTPDAVARHLASTLPGGTAAGPDRSPLAELDRIAAELSPEGADDATRQGVVGRLRHLLAQWDGTRQDGGGTTVDDRIEAASAEEVLAFIDHELGRQADS

SEQ ID NO: 20559 - protein, 337 aa, Thermosynechococcus elongatus BP-1
MKAVAIAEFGEPDVLVLRQVPEPQIEAADEVKIQLRAASVNPIDTKLRQRGTFFPDRRPAILGCDGAGVVVAVGAAVRRFRVGDEVYFCYGGLGDRGGCYAEYAVVPEAAVAHKPKTLSFIQAAALPLAVITAWEALGDRGAVPPLNVLSTAKTVLIHAGAGGVGHLAIQLARRAGAQVATTISSPAKAQFTEALGATLAINYTTTDWVQAVLDWTGGKGVDLALDTVGGATFAETFKAVRPYGTLATLLEPAVDTPWKIARQRNLLIQLTLMLTPQLLGLREALAHQGQILEQVATLVDRGELRVVVDKTFPLGAAADAHRYLSQRLVQGKVVLIP

SEQ ID NO: 20560 - protein, 363 aa, Shigella flexneri 2a str. 301
MLKGLFPAIVNGVTEIKNGSKLYHMKQTLTIRSGGHMATRIEFHKHGGPEVLQAVEFTPADPAENEIQVENKAIGINFIDTYIRSGLYPPPSLPSGLGTEAAGIVSKVGSGVKHIKAGDHVVYAQSALGAYSSVHNINADKAAILPAAISFEQAAASFLKGLTVYYLLRKTYEIKPDEQFLFHAAAGGIGLIACQWAKALGAKLIGTVGTAQKAQSALKAGAWQVINYREENLVERLKEITGGKKVRVVYDSVGRDTWERSLDCLQRRGLMVSFGNSSGAVTGVNLGILNQKGSLYVTRPSLQGYITTREELTEASNELFSLIASGVIKVDVAEQQKYPLKDAQRAHEILESRATQGSSLLIP

SEQ ID NO: 20561 - protein, 327 aa, Shigella flexneri 2a str. 2457T
MATRIEFHKHGGPEVLQAVEFTPADPAENEIQVENKAIGINFIDTYIRSGLYPPPSLPSGLGTEAAGIVSKVGSGVKHIKAGDHVVYAQSALGAYSSVHNINADKAAILPAAISFEQAAASFLKGLTVYYLLRKTYEIKPDEQFLFHAAAGGIGLIACQWAKALGAKLIGTVGTAQKAQSALKAGAWQVINYREENLVERLKEITGGKKVRVVYDSVGRDTWERSLDCLQRRGLMVSFGNSSGAVTGVNLGILNQKGSLYVTRPSLQGYITTREELTEASNELFSLIASGVIKVDVAEQQKYPLKDAQRAHEILESRATQGSSLLIP

SEQ ID NO: 20562 - protein, 1352 aa, Escherichia coli CFT073
MRRNCWYNPRCLSNVGPGNTLSTFIQGHNQYSDQPTLLTLRKANAAIDDEHMLHRTLAALWVRGENIDWRRFNQTALGKHIPLPDYPFEQTYYYRYGAALSGYRQYPNPLRRPQDEWLQRVLWRMHDTSLREAFYAPGELIIIISADGDKLQQTLMSSGVDSITMPLPISSEDDVWDNDRILTHFHDICALLAHKTYRQLHCLYAPGAEAGSSLTQSLSGLYRVARWCMHSTTPLASLTVLTHGAFRVQEEDNPEPTLAALSGAVNVFAQELHPTEVRLIDIDAQSSDENLNLLTQRLAPKQETVMALRQGMLYLRRFIPTRLLAHLPPQTGCIPGNVLWIIGGEKGIGRMIGEALAQREGVRVVLSSRTGYHHEAVQQDALDVIHCDVTQAEAVRACLATLLERYGRLDGVIFAADATTTLTLHQLSESALRDTLTVKERGTANVLHALAQRNLLDERLLLLFCNSLAAVNAEIGQTGYATASAYLDALAQQLRTRYKVNALSIGLDALREQGMLLDAINGSEYDVLRGLRPLMTGTLLQAYKQQGADTSYYARLSPESDWLLDEHRISGIATLPGTGYLALAYEALRHYFVQDQICIDELVFLAPLTVMDNCSVDVFVDISPNGQGVSVEVKSMTERFSGTLTTHARGRATRLMVDDNVVCDLTGLMREMHTITPPTKELSSTHFHYGPRWHSVQQLYGNTAQTQVFATLALPTVAANDTIALHPALLDIASSVVEQLPGFHTDSVPFLYQDLRLYRPLPNTLHVALTVNRHDEEGDSYAFTLYDMAGEMVARCAAMVKRKVQLHIQDVDDDTRLRVPSADNYQLRLAAEGEGAGKLALCPTPRLALGDSQVEIEVLATGLNFKDVLFTTGLLRQQPGEAPLQLGLECAGRITRVGKNVTEFAPGEDVMAVLNGGFVQYARVESDCVVRKPAHCRIEQAAALPIAYLTAYYALVVRANLQPGERVLIHSAAGGVGLAALHIAKRCGAQIFATAGSEQKRDYLLSLGVHAVADSHDEQFAATLLTASDGQGMDVILNSLTGRLLDASLALLAPLGRFLELGSKDIVEDKALPMRFFAQGGTFIPINFHAAHGAFSRYLQQIVAWIDDNTLPLLPCKSVPLPEVARAFATLTTPQHIGKVVVTHRTAAGMDRLNAMIAERRLGGYALSMSNAEVMRQLWPILNTRSPWAQLLLSPRAIDRLARGNRVDRGVPSAANDTITQQTVKKRPRPEIGVPYSPATREVERVLCQILEEYLGLDRVGIDDNYAELGATSLDMVQLSGQMARHYPQVSVVSLYNHATVRQLATFCQPPEGESNAPSPQPAVQTNTRANQIAKRALQIAKNTARSHTSLH

SEQ ID NO: 20563 - protein, 312 aa, Leuconostoc mesenteroides subsp. mesenteroides ATCC 8293
MKAAVINHYGGREQLEVIDMPIPKIKSDEVLVENMATSINPIDYKAREGLLKRMFPWQFPVILGWDIAGIVASTGDDVTSFKVGDPVFARPDIDTKGVNGSYAEYTAVKADKLALKPNNISFVEAAAVPLAGLTALQMLRKLQLSSNQKILIQAGAGGVGIYAIQLAKMIGAYVVTTASQNNHEFVKSLGADSVIDYHKNNIQDVLSDFDTVLDTVGDVDNGIAILKSGGHLVTISNALTDQQKNTSDKTVTEGWLNPNGQDLAILASYIAKGELQIVVDSLYPLTTEGIQSAHERSETHHARGKVVVQIKE

SEQ ID NO: 20564 - protein, 356 aa, Leuconostoc mesenteroides subsp. mesenteroides ATCC 8293
MNLLDKIKNIWPFGQSHKMRAIGFERPLLIDQPDAFVEKVIPRPQPDKDELLVKVLASSVNPVDTKMRANYTHDGVFRILGFDAVGVVVEVGQNVQHFSVGDKVYYAGAQLKPGSNADLQVVHEALVGHAPTSLSDEEIAAMPLTSITAYEILHEALCYDLEENSALGHTILIVNGAGGVGSVLIQLAKYIGMTVITTASRTESVTWVKSLGADYILDYHQDLNEQMRKIQHDKVDNIAILQNTDYYWPLATAVIKPFGRIASIVETTEPIDMGPLKNIGAQFSWVFMFAKGNYGVNMQSQGNALNQVARLLDENKIKTTLSKTYHGLSVENIRAATKEVEAGRMIGKVVVKYDEQ

SEQ ID NO: 20565 - protein, 324 aa, Microbulbifer degradans 2-40
MKAILCKQYGAPSVLHVGEVPKPAPKPNEILIRVRAAEATKADCEMRAFKFAVKWFWLPLRLAMGITKPRNPVLGGYFAGEVEALGEQVTNFSVGDQIFGSTQMRFGAYGQYVCLPASYTLVKKPNNISFEQAAAVPLGGLNALHFLSKANIKPGDKVLINGSGGSIGSFALQIAKHWGAHVTAVDIGFKENFIRSLGADEFIDYTRTDFTRNAISYDVIFDMVPNSSFEGCIASLVPNGVYLIGNPRLTDLLKANIKRYGKGRAVHVAFARETLEELTTLKNMIEAEAIMPAVDKVYRMGQAAEAHMRVETERRLGSVVIVIS

SEQ ID NO: 20566 - protein, 322 aa, Microbulbifer degradans 2-40
MRAIVQTKYGSADELELREIETPSPAANQVLVRVQAVAINDYDWCMVSGKPLVYRLMFGLFKPKTPIPGMEIAGEVVECGVNVKNFKVGDTVFGDLSECGFGGFAEYVSADENALFLKPSQMKYEDAAAISHAACLALQGLVDVGNLACGEKVLINGAGGGVGAYGLNIAKFYDAHVTAVDAAHKLAMLKQNGFDEALDYQSIDFTRQPAQYDLILDTKTNRGVFRYLKVLAPNGRYVTVGGSVMRLIQLLLLKPWVALFTNKRVSIVALKTNKDLATICEWYLAKKLVPVVELRESLSAVPQAISYFGAGKHKGKLVVRLK

SEQ ID NO: 20567 - protein, 304 aa, Oenococcus oeni MCW
MKAIEINEFGDVDVFYATEKKLADPKPNQVLVKNFATAIDPYDVKYRSGFYGGSDKLPTVLGSSVAGIVQEIGSEVTKYSVGDRVVASTHLRSYAEQVLVSEKQLALIPDNLTFVQAAGVALGYQTGYQAIIKEIKLKKGQSILIHGGSGAVGFAAIQAAEKIGAGKIYTTAGTKGKAFLNGFNPAIAVYDYKKENFTNISEKIDAILDTVGGETQDKSLKLLKENGKLCSTVGLTDKAKKSPFDTDAIYLDSGSCLTELLKDMSQGLTVLKIAKISQFSLKNLRSMHKEFENDHPLGKLILEL

SEQ ID NO: 20568 - protein, 2551 aa, Trichodesmium erythraeum IMS101
MKQQQKRELVAIIGMACRFPGANDYGQFWKNMEAGVNSISEIPSQRWEAEKYYAPIPNQQNKTISKWAGLIEGIDEFDAEFFSISPREARKVDPQQRVILELSWSCIEDAGYSPSQLSGKDVGVFMGACNYDSILLMNRNQENIEGHSGTGTWTCMIPNRISSFFNWHGPSIPIDTACSSSLVAIHYALKSLKESECEMALVGGISVLFTSTTYIQMSQLGMLSPTGQCRTFSSDANGYVRGEGAGVVLLKPLTKAIVDGDHIYGVIQGSAINHGGKARTITSPNVYAQAKVIRSAYINANISPDTVSYIESHGTGTPLGDPIEINALKRAYKQLAQQYGVEKTEKPYCGIGAVKSNIGHLEGAAGIAGLIKVLLAMKYKKLPKILNFKELNPRIKIKDTPFYIIEENQEWKRLKNELGEEIPRRAGLSSFGIGGVNAHIVLEEPLEEVKINLSDTLERPQEILTLSAKTEKALRELATKYQTYLQLDSEASLSDICFSANKGQTHFTKRLAIVAESKRDLQQKLAGFLQDNATQGVFTGNSDTQTIAFLFTGQGSQYAEMGRQLYDTQPTFKKIIDQCSKILEKYLEVSLLDVLYPNLTIKKEEVSSLIDQTAYTQPAIFVIEYALAKLWESWGIKPDVVMGHSVGEYVAATVAGIFSLEDGLKLIAARGRLMQQLPAGGEMVAVMASEAKVKKLLRPYAEKVAIAAINGPKSVVISGEATAVREIVSSLESEKIKTKQLQVSHAFHSPLMEPMLAEWEAVAKELTYHQPEIPVISNVTGTIADKSITTAKYWVDHVRLPVRFTEGMDALQKQGVEIFLEVGPKPILLGMGRRCLPKDVGVWLPSLRLGVDEWQQMLSSLGELYVQGAKVDWSGFDSDYSRQKVALPTYPFQRERYWVEENGYGKKLLSKQQTVKELHPLLGYKINIAGQQQIFESFLGAEKPEYLKDHRVFDEPLFPTTGYLEIALAAGQNQYKTSWIEVEDLRIEKGLVLLEGEVETVQTILTPQENQTYQFQIFSQEQQGGTQQWVLHVAGKIQQAAQQVEEEKLDIEKYLGECDRSIEIKQHYQRCQSMGISYGSSFQGIKQLWKGENQALAKLAIPEALAGEMGEYNIHPVILDAALQVIFNALPEAENENQTTYLPVGVEKLTTYSSPEESMYAYGVVDGTGGGNWKANVILSTETGKIVGKISGLRVKAASKEALLGSKQETIKDLLYEIEWRSKGRLGRLLPPDYLLAPTKIEQQLQPTIRELIAQANLESYQEIPGKLEELSLEYVLQAIKELGWYYKVGDKLNSEQEIERLSIVPSQKQLFKRMLQMLGEAGIIEPVVGTDEWNVVQTLDNSEEQGPKKGEKFLSEYPQAAAELTLLNRCGTELSGVLQGATDPVELVFPSGDLTAATRVYQDSTLAKFMNSLVEKTIATAIEKLPKDQGIRLLEIGAGTGGTTSYILPTLPETNTEYVFTDLGVLFTTKAKERFQDYPYVEYRTLDIEVDPTTQGYNAHQYDVIIAANVLHATTNIKEILSNVRKLLAPGGILVLFEITSRQRWLDLVFGLLEGWWRFEDLDIRPDYPLLSRSQWQEVLMGTGFTEVATLPEVEGMPQVLSQQSVIIAQADSTASVPDAKGWLILADKQGIGQHLARQLESFGGVCTVVFAGEKYQQITPEEFTINPDRPEDYEQLMTAVVDKSPALSGVVQCWTTEFAATKEIKDLSRWGCGTTLFLVQALLKSRLQRLPQLWLVTSGSQPVPLNSPLIPGVSHSSLWGMGKVINLEHPELNCVRIDLDPEATVESNANLLFNEIWSEDKEDQVALRENSRYVARLVASHHQRVATGGLTIPSQPYKLGISEKSSLDKLILEPINRNAPAAGEVEIQVMATGLNFLDLVATLGLVPDEVDGVSQKHLVDINRFGVECSGYVVAVGEGVKGLEVGDMAIAMAQGSFSQYVTVNASYVVPKPENITFEEAASIPANFLTAYYALHHIAKITKGQRILIHAAAGGTGMAAVQIAQKAGAEVFATASPPKWETLRKMGVKYIMNSRTVEFADQVMEFTEGQGVDIVLNSLTSGDFVRKGLSVVSPQGRFIEIAKRGVWKSSQVAEVRPDISYSIVDLLRKSQEEPELINSMLQELTADFSNSLLKPTPLKVFPIEEVISAFRYMQQAKHIGKIVVTQPKQPDKPVSFRGDAAYLITGGMGGLGLLISRWMVSKGAKHLVLLGRRAPNEVVKEKLVELEAAGASVTVETLDVSDWEGMKGVIERINNSGTPLAGVMHSVGVLSDGVLENQTWSSFEQVMAPKVQGSWYLHQLTQNQSLDFFLVFSSVASLFGSSAQANHSAANAFLDGLAHYRRSLGLPGLSIHWSTISQVGEAAERGADVRLQKQGIAALTPTEVLESLEVLMSSNANTEVAVVDIDWSKWQERASQWRFLADWEGVVAGVIGTETRLLEQLKESSSEEQEKMLVDYLKGKVANIFGTTTGKIMDIEQPLTTMGLDSLMAVELRNLIQRELGFDIPMQTIIEGISISEIVDLVSEQLLLEQVSYSNTSPTEEIDEDMEEITL

SEQ ID NO: 20569 - protein, 331 aa, Trichodesmium erythraeum IMS101
MKAVVMISPGTPEVLQVQQVADPVIENDREVLIRLKAAGVNPIDTKLRTRGTLYPDKMPAILGCDGAGIVEAIGKNVQKFQVGDEVYFCNSGIGAAPGNYAELAVVDERFVENKPSSLSFVEAAAAPLVLITAWESLYDRGKLQAGRKVLIHGGAGGVGHVAIQLAKLQGAEVATTISSKEKSDFVKSLGTDLAIFKNEDFVKVVLDWTNGEGVDLAFDTIGGKVFYDTIPAVKVYGDLVTILEPDTSLGNLKVARQRNLRIGLELMLTPMTKGLMEAQEDQAKILQQCRRLFDQGKLKIHVNRTFALDDAIEAHRILEAGSMLGKIVLTI

SEQ ID NO: 20570 - protein, 354 aa, Bifidobacterium longum DJO10A
MGDSFAARCGTMNAVIPFDTKERAMKAVYASTVNHADPLAALAVGEQPEPQARPFWSTVSVRAVTVNHHDVWSLQGVGLAAEQTPMILGTDAVGILDEDIPGKHGLKAGSEVVLYTFVGTDGAGVAPGERRTILSEKYPGTMAEKTSVPSANVFAKPASLTTAEAAALGTSWLTAYSLLFDAAGIKPGDSVLIQGAGGGVSTAAIQLAHAAGLEVFVTSRDADKRAKALKLGANAALETGARLPRKVDAVIESVGAATWGHSVRSVRPGGTIAICGATTGDQPGAELTRLFFQDIRVQGCTMGSREDFARLLRFVEHADLHPVIDSVVSGLDAAPEAFARMIAGDMFGKIVIEL

SEQ ID NO: 20571 - protein, 320 aa, Pseudomonas syringae pv. syringae B728a
MKALQGVEGHVEWVEEPSPALDVGQVRIKVAAAGLNRADLLQREGKYPPPPGVTQTLGLECSGVIAEVGPGSPWVVGDRVCALLAGGAMAEEVVVDGRHVLPVPEGLSLHEAAAIPEVYATAWLNLFELAGLKPGEKVLLHAGASGVGSAGIQLCKAFGNPVWVSVGSAERLAYCVELGAQGGVVRSESLEGLNDFAPFNVILDPVGASYAELNVKLLALDGRWVLIGVMSGREAKVDLAHVLGKRIRLMGSTLRSRDDTFKADLLSDLGQHVWPLFTEGRLKPQLAKSFAIKDAEAAFEELATNTVSGKIVLVIDESLV

SEQ ID NO: 20572 - protein, 330 aa, Bifidobacterium longum NCC2705
MKAVYASTVNHADPLAALAVGEQPEPQARPFWSTVSVRAVTVNHHDVWSLQGVGLAAEQTPMILGTDAVGILDEDIPGKHGLKAGSEVVLYTFVGTDGAGVAPGERRTILSEKYPGTMAEKTSVPSANVFAKPASLTTAEAAALGTSWLTAYSLLFDAAGIKPGDSVLIQGAGGGVSTAAIQLAHAAGLEVFVTSRDADKRSKALKLGASAALEIGARLPRKVDAVIESVGAATWSHSMKSVRPGGTIAICGATTGDQPGAELTRLFFQDIRVQGCTMGSREDFARLLRFVEHANLHPAIDSVVSGLDAAPEAFAKMIAGDVFGKIVIEL

SEQ ID NO: 20573 - protein, 320 aa, Streptococcus mutans UA159
MKAVLVEQPGSSEQLKVVEREIPKIKEGWSLVKIKGFGINRSEIFTRKGYSPSVVFPRVLGIECVGIIEETSDKNHFFHGQKVVSIMGEMGRAFDGSYAEYVLLPNEQIYPIKTNLTWDKLAAAPESYYTAYGAYKNLKLKKQDLVLVRAGASGVALAFLNLLKASLPEIKVTASVRSLAKKQQLLDSGYDEVIIDRDSCLQTKQKFDKVLDLIGPACIDDTLNHVADGGIICLVGLLGGQWTLDNFDPIMALQNNIYLTTFYSGNINLNKLQELFDFIAKYAVPIKVEKIFTIDHIKEAHDYLESPQAFGKVIVLNGVA

SEQ ID NO: 20574 - protein, 332 aa, Shewanella oneidensis MR-1
MSDLPNDYAHIHIEQPGAPEVMQLSRSSLPVVGAGQVLIRVSAAGVNGPDLKQRAGAYPPPPGASLILGLEVAGEICALGEGVTQWQLGDKVCALVPGGGYGEYTLTYAAHCLPIPKGFSMVQAAALPETFFTVWGNLFMRAGLKAGETVLIHGGSGGIGSTAIALANRLGAKVIATTGQDEKRDYCLGLGADLVVNYNSQNFVEEVMSFTQGKGVNVVFDIAGGDFINLNLQSLALDGRMVSVSTQRSPKAEVNILQLMAKRIVWTGSTLRPQTVEAKAEIARQLRERVWPLLDSQQIVPHIFATYPLIDAPKAHRLMQSGEHRGKVVLTL

SEQ ID NO: 20575 - protein, 316 aa, Vibrio vulnificus CMCP6
MENKQIVITEFGGPDVLAIRSSQMPEPKPGQVLIKVYFSGINPIDVKTRAGLGWAAAQNKDKLPWVPGYDISGKVVSCGENAERFVIGDTVAGFVGFPLEGGGYSQYLCVDEDALSLVPGSVTLEGAAVLPLAGQTAAQALNKAQVKEGERVLILAGAGGVGHLAVQIAVAAKAEVYTTCSERNLDYMATLGAHAINYQFAPASERLSDVDVLIDLVGGDVALDALKCLKDNARVVTVPTLSAEMICEKAKLLGFEATGMLVEPDPQQLDTLLYMVGVGLLKTEIQRIYPMHEVSDAHKQIETGHTRGKVLLDMQC

SEQ ID NO: 20576 - protein, 258 aa, Methanosarcina barkeri
MELPLPMTMGSDVAGVVDAIGQGVDSFQPEDEVFGKASAGQGGYAEYIVVNSTQIAQKPKSIGFIESAAIPTAGLAAWQSLFDIAGLEKGQSVLIHGASGGVGTFAVQFAKWKGAYVIGTASSKNAEFLKSIGCDEVIDYRNQQFEEIVSNLDVVLDTIGGDTFERSWGVLKPGGFLVTTVASIPEGTPQKHGVRAERLITQADGKELAQIAAIIDERKIKPIVTTVLPLADAQKAHEMSESGHTRGKIVLRIAEDPK

SEQ ID NO: 20577 - protein, 311 aa, Oceanobacillus iheyensis HTE831
MKAIVIENYGHADELHEQDVPKPTINDNQILIEQYATSINPIDWKLREGYLKDGFNFEFPIILGWDSAGVVAEVGKNVSQFKVGDRVFSRPATTAQGTYAEFVAVEESRVAKIPENVSFEEAASVPLAGLTAWQCLVDFSAIKKGDKVLIHAGSGGVGSFAIQFAKHFGAYVATTASGKNESLVKELGADRFINYKEENFNEVLEDYDIVVDTLGGDILEQSFEVLKEGGKLVSIAGNPDEEKAKEKGIKAGFLWLEENGKQLSEVADLLENGKVKSVIGHTFPLTEQGLREAHQLSETHHARGKIVIKIK

SEQ ID NO: 20578 - protein, 326 aa, Oceanobacillus iheyensis HTE831
MRGLVHERNQVTIKDMDEPTPASNEVVVKLKAAGLNRRDLAIPKRRGDEQEALILGSDGAGVIDSIGDEVENVQVGDEVIINPSLRWKQNSDAPPKGFDILGMPDHGTIAEKIVIASDQVEPKPSYLSWEEAAVFSLAALTGYRAIFTKGKLQPGETVFIPGAGSGVASFLIHFAKNHGARVITTSRSKDKQEKAKDLGADVVLDTSDDWEAALQDETIDMVIDSVGKATFHRSLAVLKKGGRFVTFGATTEDVIDFDLRSFFYGQYQLIGTTMGCKEELEAALNHYIKYETRPVVDKVFNLEESLDALEYLKEGKQFGKVAIRIS

SEQ ID NO: 20579 - protein, 320 aa, Pseudomonas syringae pv. tomato str. DC3000
MKALQGVEGHVEWVEEPSPALDVGQVRIKVAAAGLNRADLLQRAGMYPPPPGVTATLGLECSGVIAEVGPGTSWLVGDRVCALLAGGAMAEEVVVDGRHVLPVPEGLTLHEAAAIPEVYATAWLNLFQLAGLKPGEKVLLHAGASGVGSAGIQLCKAFGNPVWVSVGSTERLAYCVELGAQGGVVRSESLEGLNDFAPFNVILDPVGANYAELNVKLLALDGRWVLIGIMSGREAKVDLAHVLGKRIQLMGSTLRSRDETFKADLISDLGQHVWPLFTEGRLKPQLAKSFAIKDAEAAFEELATNKVSGKIVLVIDESLV

SEQ ID NO: 20580 - protein, 316 aa, Vibrio parahaemolyticus RIMD 2210633
MEHKQIVITEFGDANVLAIQSAETPIPKSGEVLVKVHYAGVNPIDVKTRAGLGWAASQNKDKLPWVPGYDISGKVASCGTKTSRFAVGDEVAGFIGFPLQGGGYSQYVCVPESELSHVPSSVTLEAAAVLPLAGQTAAQALSKANVSECDRVLILAGAGGVGHLAVQIAVATKAEVFTTCSERNLDYLATLGAHAVNYQFAPVSERVEGVDVLIDLVGGDAALDALKCLKDNARVITVPTISAELICDKAKLLGFEASGMLVEPDPSQLDTLLYMVGVGLLKTEVQHIYPMAEVIAAHQQVESGRTRGKVLLDMTC

SEQ ID NO: 20581 - protein, 329 aa, Bacillus subtilis subsp. subtilis str. 168
MKAVIHNGKAGLLGLSVQDVPSTKPGYGEVKVKLKSAGLNHRDLFLMKNKSEQDPHMILGSDGAGIIEEIGEGVKNVTVQTEVVIFPTLNWDLTENVPPVPEILGGPSDGTLAEYVIIPSQNAIKKPAYLSWEEAGVLPLSALTAYRALFTKGQLKKGEHLLIPGIGSGVATYALFMAKAIGATVSVTSRSEEKRKKALKLGADYAFDSYSNWDEQLQGKKIDVVLDSIGPALFSEYFRHVKPNGRIVSFGASSGDNLSFPVRSLFFPQVNVLGTSMGSGEEFQAMLAFIDKHKLRPVIDRIYPLEKACEAYKRMQEGRQFGNIGIVME

SEQ ID NO: 20582 - protein, 343 aa, Aquifex aeolicus VF5
MKAVILTGFGGIENLKYVEDFPKPEPKEDEVLIRVKAVALNHLDIWVRMGALPVKPELPHILGSDVSGVVEKVGSLVKNVKEGEEVIIAPGLSCGVCWDCQSGRDNHCKDYDILGLKNKGGYAEYVAVPARNVIKKPKNLSFEEAASYPLTFLTVWNALVDKAQIKPYSRVFIWAGSSGVGVAGIQLAKAFNAFVITTAGNEEKAKKCKELGADLVFNHYKDDVVKKVREVFKEGVDVVVDHIGEATFWKSVQMLRKGGKLVFFGTTTGSKGEIDIRYVFVREIQLLGVYMGSRANLFKITELFERGVFKPVVDKVFPLKEVPQAHKYLEESKHFGKVVLKVE

SEQ ID NO: 20583 - protein, 347 aa, Sulfolobus solfataricus
MRAVRLVEIGKPLSLQEIGVPKPKGPQVLIKVEAAGVCHSDVHMRQGRFGNLRIVEDLGVKLPVTLGHEIAGKIEEVGDEVVGYSKGDLVAVNPWQGEGNCYYCRIGEEHLCDSPRWLGINFDGAYAEYVIVPHYKYMYKLRRLNAVEAAPLTCSGITTYRAVRKASLDPTKTLLVVGAGGGLGTMAVQIAKAVSGATIIGVDVREEAVEAAKRAGADYVINASMQDPLAEIRRITESKGVDAVIDLNNSEKTLSVYPKALAKQGKYVMVGLFGADLHYHAPLITLSEIQFVGSLVGNQSDFLGIMRLAEAGKVKPMITKTMKLEEANEAIDNLENFKAIGRQVLIP

SEQ ID NO: 20584 - protein, 344 aa, Sulfolobus solfataricus
MKAVRIHEYNKPLSLDEVNKPRVSGPYDIVVRIRGAGVCRTDLHIIEGVWKDVLNPKLPFTIGHENVGIIEEKGNAVDWLDVGDQVILHPYITCRHCRACRSGNDMHCPYGKFPGLDGTDGGYAEYLRTSAFSAIKIPKGIDIIPMAPLADAGITAYHAVKKISQYLYPGSIVGVIGVGGLGHIGIQALKAITPARVIAIDISEEKTKLAKELGADEVVIAGKDSGVSDVLKLTDNIGVDAIIDFVGEHSTPQNALRMIRKGGIYSIVGYGGEFKNSTLDFINREIMVVGNLVGTYNELSELVTLYVQNKVKLKVKTFPLEEANSALEELKAGRILGRAVLVPS

SEQ ID NO: 20585 - protein, 347 aa, Sulfolobus solfataricus
  unsure (1)..(347): unsure at all Xaa locations
XRAVRLVEIGKPLSLQEIGVPKPKGPQVLIKVEAAGVCHSDVHXRQGRFGNLRIVEDLGVKLPVTLGHEIAGKIEEVGDEVVGYSKGDLVAVNPWQGEGNCYYCRIGEEHLCDSPRWLGINFDGAYAEYVIVPHYKYXYKLRRLNAVEAAPLTCSGITTYRAVRKASLDPTKTLLVVGAGGGLGTXAVQIAKAVSGATIIGVDVREEAVEAAKRAGADYVINASMQDPLAEIRRITESKGVDAVIDLNNSEKTLSVYPKALAKQGKYVXVGLFGADLHYHAPLITLSEIQFVGSLVGNQSDFLGIXRLAEAGKVKPXITKTXKLEEANEAIDNLENFKAIGRQVLIP

SEQ ID NO: 20586 - protein, 328 aa, Thermoplasma acidophilum
MKAALVYEPLGNENLRIEDVDDPKVLDGQVLIEVRKAGLNPVDYNTINGKIVYKLNPLPHIPGTEVYGVVAQDSGNFKKGDRVVVYNRVFDGTCDQCISGNEHLCTAGGIWGVVSNGGYAQKVAVPEKNVFRLPKNVSDEMAASIGVAALTSFRALRLAGCAPGKSVLIFGASGNTGMFSVQMASMMGCDVYAVSRKDWIEEFGATEVFEADEIPDSMKFDIVVNPLGTLFWKESLKHLGIRGSLVTFGIFTGREGSIDIADLYTGERRILGSTGGTRSDLRDLLEFMKMHDLRVKISREFKLTEMQDALKFYNEDHDGRILISMRVS

SEQ ID NO: 20587 - protein, 302 aa, Thermus thermophilus
MKAWVLKRLGGPLELVDLPEPEAEEGEVVLRVEAVGLNFADHLMRLGAYLTRLHPPFIPGMEVVGVVEGRRYAALVPQGGLAERVAVPKGALLPLPEGLSPEEAAAFPVSFLTAYLALKRAQARPGEKVLVQAAAGALGTAAVQVARAMGLRVLAAASRPEKLALPLALGAEEAATYAEVPERAKAWGGLDLVLEVRGKEVEESLGLLAHGGRLVYIGAAEGEVAPIPPLRLMRRNLAVLGFWLTPLLREGALVEEALGFLLPRLGRELRPVVGPVFPFAEAEAAFRALLDRGHTGKVVVRL

SEQ ID NO: 20588 - protein, 3649 aa, Micromonospora griseorubida
MTANNEEKLREYLRRALADLHEARAQVHRLTEEAHEPVAIVGMGCRFPGGVETPEQLWELVASGTDAISPFPTDRHWDVDGIFDPEPGRAGRTYCREGGFLVDAPGFDAGFFGVSPREAVAMDPQQRLLLEVSWEALERAGFDPLALRGSRTGVYAGVMHHDYGLNHSFDEETGGFLGIGTAGSVVSGRVSYVLGLEGPAVTVDTACSSSLVALHLAVQALRSGECDVALAGGVTVMATPGIFVEFSRQGGLAVDGRCKAYSDSADGTGWSEGVGVLVVQRLSDAVAAGRRVLAVVRGSAVNQDGASNGLTAPSGPSQQRVIRAALASARLSVGDVDVVEGHGTGTRLGDPIEAQALLATYGCRGGGRSLLLGSVKSNIGHAQAAAGVAGVVKMVLAMERGVVPASLHVGVPSSHVDWSSGAVEVVGEACAWPETGRPRRAAVSSFGVSGTNAHVILEQAPVADAASFVVVPVSVASGADSSGGVAPVSDVSDAGSSSVAVPWVLSARSEWGLRAAAGRLEAALSGPLSGSGSGSGAVSGVDVGWSLGGRSVFGWRGVSLSGVGGLGVLAGGGVGSGVVVGSGRVASGGVVFVFPGQGAQWVGMARGLLAESEVFSEAFDEVGGVVQGLVDWPVRATACGESGGGHLGRVDVVQPLSFVVMVALAGLWRSWGVVPHGWVGHSQGEIAAAVVSGALSVEEGARVVVGRSRVIGARLAGGGAMVSVGASVGVVEGLLGGLGGGLEVAVVNGPGQVVVAGDVGGVEGLLVRCGEVGVRARLLPVGYGSHCGLVDVVRDELLSVLGEVRAGESVIPFYSSVDVGVVDGGVLDGGYWFRNLRLRVRFGEVVRRLVGDGFSSFVEVSAHPVLVGAIEDVWGEVGGGVGSCVVGSLRRGDGGLGRMVVSAAEGWVRGLPVQWRRVPVLGGGRQVGLPTYPFQHDRYWLAPTTPATDPRPQQDDLRYRVRWQPVRMERTARLTGRWVLLLPDRLPATDRDIADRVARTMANAGADVDEIVVDATTVSGESLEASLVGAAGVLSALALVEEEHPEFPILPVGLAATLTLLRSLAVAGAPLWTLTRNAVAALPGEVPHLAGAQVWALGRVAALELPSPWGGLIDLPTEPNQQVLKRLVGVLAQNAEDQVAVRNPAAYGRRLVPAPAVREESSWQPQGTVVVVGDTGAPEIERMIHRLRDEGVEVVDADRDTLGTVLAEHASITVVVAPPAVPVAPLAETTLAGFAATVEAKTGDARWLERLPDTPALQAVILFSSVSGVWGGVGQAGYAAGCAYLDALAERLRAGGVSATSIAWTPWEGTSGADVVSRGGVVPLDAERALDVLFRALRSGRSETVIADIDWDLFLPSFTMARPTVLFDEIPEVRQLREAGAERPETPRVDSAFSRSLIGLAPADQRRMVDDLLATHIAAVLGESSFAVDAERAFRDIGFTSVSAVDLRNRLGAATGLTLPASLVFDYPNPQALVDYLLAELTNQSAEQEDVRPTEKVDEPIAIVGMGCRFPGGVSSPEDLWDVVASGVDAVSPFPVDRGWDLESLFDGDPDRAGTTYCREGGFLDDVAGFDAGFFGVSPREAVAMDPQQRLLLEVSWEALERAGHDPRELRGSRTGVYMGTNGQHYLPLLRDSEEDFDGYFGTGNSASLMSGRISYVLGLEGPAVTVDTACSSSLVALHLAVQALRSGECDLALVGGATVMATPDVLTEFSRQRALSADGRCKAFSDAADGFGASEGVGVLVVQRLSDAVAAGRRVLAVVRGSAVNQDGASNGLTAPSGPSQQRVIRAALASARLSVGDVDVVEGHGTGTRLGDPIEAQALLATYGRRGGGWPLLLGSVKSNIGHAQAAAGVAGVVKMVLAMERGVVPASLHVGVPSSHVDWSSGAVEVVGEACAWPETGRPRRAAVSSFGMSGTNAHVILEHVATEQPAADPEPSVSVGDSDSVVPWVLSARSEWGLRAAAGRLEAALSGPLSGSGSGSGAVSGVDVGWSLGGRSVFGWRGVSLSGVGGLGVLAGGGVGSGVVVGSGRVASGGVVFVFPGQGAQWVGMARGLLAESEVFSEAFDEVGGVVQGLVDWPVRATACGESGGGDLGRVDVVQPLSFVVMVALAGLWRSWGVVPQAVVGHSQGEIAAAVVSGAWSVEEGARVVVGRSRVSGARLAGGGAMVSVGASVGVVEGLLGGLGGGLEVAVVNGPGQVVVAGDVGGVEGLLVRCGEVGVRARLLPVGYGSHCGLVDVVRDELLSVLGEVRAGESVIPFYSSVDVGVVDGGVLDGGYWFRNLRLRVRFGEVVRRLVGDGFSSFVEVSAHPVLVGAIEDVLGEVGGGVGSCVVGSLRRGDGGLGRMVVSAAEGWVRGLPVQWRRVPVLGGGRQVGLPTYPFQHDRYWYTGPSRRGDLTSAGLAEANHPLLAAAVDLPDDHGLVFTGRLSRASVPWLADHALLGVSVLPGTAFVEMALWAGRRAGFGQLEELTLTTPLPLPESGAQLLVRIDTVDGSGDRTITFHSRVPGDDGSERWTKHAQGTLVTPTGSARDQAEWKYPDGPDLSVEEFYTRLAERGYHYGPVFRGLRGVRRAGEDVFAEVALPQEADGSRFGLHPALLDAAVQAMGLGGFFPDDGQIRVPFSVRGVRLHTTGVERLRVRVSRSAEDAVRVDCVDEQGRPVCEIDSLVVRAIDTDQLVEDARTPVGELLYRVDWPLLTVGPAQPPKHCAVVGDDPYGLAAVLGDQGVTCDVHPDVAAFTIRSVTMPDVVVATLPASTDPDVPAVRDVANRALDLAQWWLSVATDAEAARLVVVTSGAVATQRGEPLRDPAAAAAWGLLRSAQAEDPGRLVLLDVAGQRPDGAALLAALASGKPQLALRDGNLRVPRLTRTETGDALLPPAGTSAWRLAVGENATLADLCLEPADTATVSLLPGQVRIAVRAAGLIFRDTLIALGVYPDQAAMGAEGAGVIVEVGPEVAGLAVGDRVFGLWDRALATHVVVDHRTVVAMPSGWSFAEAATVPAVFLSAYYALKHLARAVPGQSILVHAAAGGVGMAALQLARHLGLEVYGTASPGKWDVLRDQGFDDRHIANSRTLDFADRFLDASGGRGVDIVLNSLAGGFVDASLRLLPRGGRFLELGKTDVRDADRIAAEQPGVTYRAFELMEAGPDLLGEMLRELLVLFDTGVLRPLPLFAHDIRHARDAFRTLSQGRHVGKLVLTMPATIDPGGTVMITGGTGNVGGVLARHLVERVRRYGTCRSSSRQGPAAPGVDDLVAELADLGATVTVHAGDVADRAEVERLVAAVPAEHPLTAVVHAAGTLDDGMIPSLDQEQVGRVLRPKADGALYLHELTRGSALSAFVLFSSVAAVLGGPGQGSYAAANGFLDAFAQNRSAAGLPTVSLSWGLLAGAARMTAHVDQDALRRRMSRGGILPLSGRDLTALFDAALAGTEAHQVPVRIDPSAIPDDAGVSPLLRGLAAGRPARAVASEPVDVRSLVERLTGMPEEAQQTLLENLVRTHAAAVLGYDGPDAIQGDTAFMEIGVDSLAAVDVRNRLAAATGLRLAASTDFDHPTPVVLAGHLRAQLGLETRTVPLVGELERLTEALGSTSLVDIDPDDRREIAARFTALHARWLEMQQAEKPAKDTELTVDDIDAADDDAIFAYLDDRLSDS

SEQ ID NO: 20589 - protein, 190 aa, Klebsiella aerogenes
LQPGESILVHGGASGIGTTAVLLCHALGMTVYATVGQDEKIAALRPYATAINYKTDDFAEKIGQLTNDEGVDVILDIVGGPYFNRNLGLLKKDGRLVIIGFMGGRLAHEVDIQTLMLKRATVTGSTMRGRTAAEKQQIAEALRRHVWPLLEAGKCKPLIYASYPMAEIAEAHACLDSGQHLGKVVITMTS

SEQ ID NO: 20590 - protein, 325 aa, Pseudomonas aeruginosa
MAKRIQFAACGGPEVLEYRDYQPAEPGPREVRVRNRAIGLNFIDTYYRSGLYPAPGLPSGLGSEGAGEVEAVGSEVTRFKVGDRVAYATGPLGAYSELHVLAEEKLVHLPDGIDFEQAAAVMLKGLTTQYLLRQTYELRGGETILFHAAAGGVGLFACQWAKALGVQLIGTVSSPEKARLARQHGAWETIDYSHENVARRVLELTDGKKCPVVYDSVGKDTWETSLDCVAPRGLLVSFGNASGPVTGVNLGILSQKGSLYVTRPTLGSYADTPEKLQAMADELFGLIERGDIRIEINQRFALAEAARAHTELAARRTTGSTVLLP

SEQ ID NO: 20591 - protein, 1360 aa, Streptomyces verticillus
SARGEPSGAVTGRPVSGEPSGTLTGQSVPGEPSGTATDGPVPGEPSVTATGQLASGEPPMTATDIASAAASQVAALRADWRGHDYPRFVAALKMAASHCYAAALAAFLPRPDAPFTAADLLRVGTVPRHATFLSAVLPELRRHRLVGRDDSGGYRLLRTRFDDTKALRDLILRFPRYAPEGRLALHGLRVLRAAGDHRPVEHLLSDGGLADLEQLYDTGVIGRFHNRLAQALLRVVVERWPDDRPLRVLEVGAGTGGTTAALLPLLPPERTRYVFTDVSPAFLTRAEHRFAAYDFLTFRTLDLDADPAAQGLPEGGFDVVVAANALHTARSVEAAVRNVAALAAPNGLLLAVESHDPYVLAPLFGALDTFWDRTDHHERPHSPLLTADRWAALFTRCGFTDVVRTGDDTAPCRDDFSVLLATAPRRPTPHPYPYPHPSPPGPGRHWTVVAETRGELPLAREVAARLPGPGDGPAHSVEAVDDVPAHRPSTPSRGATGICLILGAHQLPEPAATVTLTTRRAALLRRITAACPRRPDGARTALTVVTRPSGALPPPERPLAPEDAAVWGVMRTLANEEPELDVRTISLDRTGRTETDARRLARELLTATGETEVALTRSGGRFAPRELPLPAGHITTTAEHATAYALEIRTPGLSYRPAWVECAPEPVGPGEVAIDVRAAALNYRDIMQAVGLLPAEADEGTFTEAGPGLECAGVVTAVGDGVTTVRPGDRVFALAPASLASRTRTVVQAVGRMPHTMSFAEAATLPVVYATVHYSLHDLARLRPGETVLVHGGAGGVGLAALRYAHLRGARVIATAGTPAKRELLRHLGADHVLDSRGLDFAAHVRDVTDGRGVDVVVNSLAGEAITRGLELLRPGGRFVELGKRDIYENQPLLLRPFRHNLAFFGVDLTSLAFDPDQGARLFAEVTRRVHDGSYRPLPHSAYPAARVAEAFRLLQHSRHVGKVVVTFDPLDEPAVVERPVTAPRFGSQGTYLVTGGTSGFGAAGARWLADRGVRRLALVSRRGPHAPEAAGLLADLAARGVTATAYAADAADPDGMRRVIRLIDATGHPVDGVLHCAMHLDDDPLADLTDERFAAVLTPKTTGAAVLERLLADRPLETFLLYSSDTTFLGNIRQAAYVAANLHLEALARQRRQRGLPAQTLAWGAIDETGYVARNDLARTLTAVGIEPLSPREALTTAGLLISQGATVAGVGRYNWARLRGVLPLLASPRCASLLPEDLQEADHTHEEILRILATMPYEEAARAVAATLARLMADVLHLDERNIDHDRRLDEYGLDSLMLAELLVSLRKRFDIDIPPLELLRSGGTITDISHLVLLRLGITADDPEPPARDAEQSVGER

SEQ ID NO: 20592 - protein, 340 aa, Pseudomonas fluorescens
MRALQLVDKQRLALRELVLPARPAPGHARVRMAFMTLNHLDLFGYRGMAFARRTLPVTVGAEGAGFVQDVGPGSDPELIGQAMAIYPSVFCGCCPACLAGRENLCADSPGVMGFHCDGVAAEYVDVPLRMLVPIPAGVPMDMAACAPVTFATVHHMLIDNARLMSGETLLVHAGGSGIGSIAIRLARHLGVTVFATVGRADKVERARALGAEYVIDYREERFLRVIREQTARRGVDVVFEHVGADTWEQSLLSLARGGRLVICGSTTGVEAPTNLMHLFNQQIHIHGSFGAPLSGLRDALALIQQGVLPVIDCVMPVAGFESGLQRLRERDVFGKIVLQF

SEQ ID NO: 20593 - protein, 340 aa, Pseudomonas putida
MSRMIRFHKFGAADVLRCEEQAEPSPAADEVQIRVEAVGVSWYDVLWRQNLAPSQARLPAGIGHEMAGVVTAVGEGVDDIAVGDRVASFPATSANDHPVYGDVIVLPRTAITRYPNVLTPIEASVHYTPLLIAYFAYVDLARAKAGQTALVTDASHCAGPAFVQLGRALGLKVFAATKDAAQRDYLLGLGADKVIVTEEQDLLLQIGKYTDGRGVDMVLDGMGGPQMSLLGDVLAPRGSLVLYGLQGGNQTPFPACAAFQKNIQFYVHCIGNFTGKPELGISQDQVALQRALRDINQFTADQLLTPQIIKVYPFEQVVEAHRYMDQCPCGGRVVLDMAQH

SEQ ID NO: 20594 - protein, 334 aa, Ralstonia solanacearum
MRAIEITQYGGPDVLKPAERPMPEPKAGEVLIRVRAAGVNRPDVFQRTGNYPVPPGASDIPGLEVAGEIVGGDLAHADNRYGLRAGDRVCALVQGGGYAEFCTAPLGQVLPVPAGLSDIEAAALPENYFTVWSNVFDRGQLGQGAHGKGETLLVQGGSSGIGTTAIQMASALGYRVFATAGSDEKCAACVALGAARAIRYRTEDFAEVVKAETGRGVDVVLDMVGGSYVAREIACTADDGRIVLIALLGGAKAEVPLGEILRRRITLTGSTLRPRPVAFKAAIAAHLHDTVWPLLASGRIRPVIHEVMPAEHAAQAHALMESSAHIGKIMLTWG

SEQ ID NO: 20595 - protein, 2532 aa, Aspergillus terreus
MTPLDAPGAPAPIAMVGMGCRFGGGATDPQKLWKLLEEGGSAWSKIPPSRFNVGGVYHPNGQRVGSMHVRGGHFLDEDPALFDASFFNMSTEVASCMDPQYRLILEVVYEALEAAGIPLEQVSGSKTGVFAGTMYHDYQGSFQRQPEALPRYFITGNAGTMLANRVSHFYDLRGPSVSIDTACSTTLTALHLAIQSLRAGESDMAIVAGANLLLNPDVFTTMSNLGFLSSDGISYSFDSRADGYGRGEGVAAIVLKTLPDAVRDGDPIRLIVRETAINQDGRTPAISTPSGEAQECLIQDCYQKAQLDPKQTSYVEAHGTGTRAGDPLELAVISAAFPGQQIQVGSVKANIGHTEAVSGLASLIKVALAVEKGVIPPNARFLQPSKKLLKDTHIQIPLCSQSWIPTDGVRRASINNFGFGGANAHAIVEQYGPFAETSICPPNGYSGNYDGNLGTDQAHIYVLSAKDENSCMRMVSRLCDYATHARPADDLQLLANIAYTLGSRRSNFRWKAVCTAHSLTGLAQNLAGEGMRPSKSADQVRLGWVFTGQGAQWFAMGRELIEMYPVFKEALLECDGYIKEMGSTWSIIEELSRPETESRVDQAEFSLPLSTALQIALVRLLWSWNIQPVAVTSHSSGEAAAAYAIGALTARSAIGISYIRGALTARDRLASVHKGGMLAVGLSRSEVGIYIRQVPLQSEECLVVGCVNSPSSVTVSGDLSAIAKLEELLHADRIFARRLKVTQAFHSSHMNSMTDAFRAGLTELFGADPSDAANASKDVIYASPRTGARLHDMNRLRDPIHWVECMLHPVEFESAFRRMCLDENDHMPKVDRVIEIGPHGALGGPIKQIMQLPELATCDIPYLSCLSRGKSSLSTLRLLASELIRAGFPVDLNAINFPRGCEAARVQVLSDLPPYPWNHETRYWKEPRISQSARQRKGPVHDLIGLQEPLNLPLARSWHNVLRVSDLPWLRDHVVGSHIVFPGAGFVCMAVMGISTLCSSDHESDDISYILRDVNFAQALILPADGEEGIDLRLTICAPDQSLGSQDWQRFLVHSITADKNDWTEHCTGLVRAEMDQPPSSLSNQQRIDPRPWSRKTAPQELWDSLHRVGIRHGPFFRNITCIESDGRGSWCTFAIADTASAMPHAYESQHIVHPTTLDSAVQAAYTTLPFAGSRIKSAMVPARVGCMKISSRLADLEARDMLRAQAKMHSQSPSALVTDVAVFDEADPVGGPVMELEGLVFQSLGASLGTSDRDSTDPGNTCSSWHWAPDISLVNPGWLEKTLGTGIQEHEISLILELRRCSVHFIQEAMESLSVGDVERLSGHLAKFYAWMQKQLACAQNGELGPESSSWTRDSEQARCSLRSRVVAGSTNGEMICRLGSVLPAILRREVDPLEVMMDGHLLSRYYVDALKWSRSNAQASELVRLCCHKNPRARILEIGGGTGGCTQLVVDSLGPNPPVGRYDFTDVSAGFFEAARKRFAGWQNVMDFRKLDIEDDPEAQGFVCGSYDVVLACQVLHATSNMQRTLTNVRKLLKPGGKLILVETTRDELDLFFTFGLLPGWWLSEEPERQSTPSLSPTMWRSMLHTTGFNGVEVEARDCDSHEFYMISTMMSTAVQATPMSCSVKLPEVLLVYVDSSTPMSWISDLQGEIRGRNCSVTSLQALRQVPPTEGQICVFLGEVEHSMLGSVTNDDFTLLTSMLQLAGGTLWVTQGATMKSDDPLKALHLGLLRTMRNESHGKRFVSLDLDPSRNPWTGDSRDAIVSVLDLISMSDEKEFDYAERDGVIHVPRAFSDSINGGEEDGYALEPFQDSQHLLRLDIQTPGLLDSLHFTKRNVDTYEPDKLPDDWVEIEPRAFGLNFRDIMVAMGQLESNVMGFECAGVVTSLSETARTIAPGLAVGDRVCALMNGHWASRVTTSRTNVVRIPETLSFPHAASIPLAFTTAYISLYTVARILPGETVLIHAGAGGVGQAAIILAQLTGAEVFTTAGSETKRNLLIDKFHLDPDHVFSSRDSSFVDGIKTRTRGKGVDVVLNSLAGPLLQKSFDCLARFGRFVEIGKKDLEQNSRLDMSTFVRNVSFSSVDILYWQQAKPAEIFQAMSEVILLWERTAIGLIHPISEYPMSALEKAFRTMQSGQHVGKIVVTVAPDDAVLVRQERMPLFLKPNVSYLVAGGLGGIGRRICEWLVDRGARYLIILSRTARVDPVVTSLQERGCTVSVQACDVADESQLEAALQQCRAEEMPPIRGVIQGAMVLKDALVSQMTADGFHAALRPKVQGSWNLHRIASDVDFFVMLSSLVGVMGGAGQANYAAAGAFQDALAEHRMAHNQPAVTIDLGMVQSIGYVAETDSAVAERLQRIGYQPLHEEEVLDVLEQAISPVCSPAAPTRPAVIVTGINTRPGPHWAHADWMQEARFAGIKYRDPLRDNHGALSLTPAEDDNLHARLNRAISQQESIAVIMEAMSCKLISMFGLTDSEMSATQTLAGIGVDSLVAIELRNWITAKFNVDISVFELMEGRTIAKVAEVVLQRYKA

SEQ ID NO: 20596 - protein, 288 aa, Lithospermum erythrorhizon
MAGKLMRAVWYEGYGGGAAKLKHVEIPIPKPSKDEVLIKFEAVSLNPIDCKIQEGMARPILPRKFPHIPGYDVTGEIVETGSGAKKFKAGDKVVAIISHTGGGGLAEYGVAKENMIVVRPPEVSPAQAAPLHVTALTAHQALTQAIGLKLDGSGSQKNLLITAASGGVGHYAVQLAKLGNAHVTATCGARNIDLVKSLGADEVLDYKSPDGVALKSPSGKKYDAILHCGPAIPFSVFEPNLSAKGKVIDITPSPKAIFTFVLKKITWSSKTLEPLFSSPQSRESGVCC

SEQ ID NO: 20597 - protein, 320 aa, Azotobacter vinelandii
MKALQGIEGSVEWVERPAPSCDVGQIRIRVAAAGLNRADLLQRAGLYPPPPGASDVLGLECAGVISEVGAGSHWQVGDRVCALLAGGGMAEEVVVDGRHALPAPEGLSLVEAAVLPEVYATAWLNLFKLGALKSGEKALIHAGASGVGSAGIQLCKAFGNPCWVSVGSAERLAYCESLGAQGGVLRTQDLEGLRDFAPFDVILDPIGARYAALDLDLLARDGRWVIIGLMGGREAQLDLAKLLGKRVQLIGSTLRNRDDAFKGELIDELRRHVWPLFAEGRLEPRLEHSFAAKDVDTAFETLASNNVSGKVALVIDDNLV

SEQ ID NO: 20598 - protein, 336 aa, Azotobacter vinelandii
MSIRTLRVQPGGGFERITLETGEPVEPKAGEIVVRIRASSLNYHDYLVVSGAWGPAEPRILLSDGAGEVLAVGSGVDEFKPGDRVVSTFFPTWLDGEPEVEGFTTVPGDGVDGFAREQATLPATAFTHAPQGWSHAEAATLTTAGLTAWRALMADGALKPGETVLVQGSGGVSVFALQFAKLAGATVIATSSSDDKLARLEALGADHLINYHKEPQWGDRVRRLTDGRGVDHVIEVGGPATLEQSMIAARIGGHIAVIGILSGLSAHLPLATALTRQLRLQGLIVGSRRQQKDMIRAIEATGMRPVIDRHFPLTEMVEAFRHEESGRHFGKICLDI

SEQ ID NO: 20599 - protein, 329 aa, Spinacia oleracea
MAAKLMHAIQYSGYGGGTDALKHVEVAVPDPKSDELLLKIEAATLNPIDWKIQKGVLRPLLPRKFPTIPGTDVAGEVVQAGSAVNRFKTGDKVVAVLSHATGGALAEYAVAKENLTVARPPEVSAAEGAALPVAALTAHQALTQFANIKLDGSGERKNILITAASGGVGHYAVQLAKLGNTHVTATCGARNLDFVKGLGADEVLDYKTPEGASLTSPSGKKYDYVVHGASGIPWSTFEPNLSEAGKVIDLTPGPTAMMTFAWKKLTFSKKQLVPLLLIPKIPNFEYVVNLVKEKKLKTVIDSKHPLSKGEDAWSRIMGGHATGKIIIEP

SEQ ID NO: 20600 - protein, 322 aa, Agrobacterium tumefaciens
MDKKVELIATGDVDKLRVSGCPPQEPGPGELRIRHDAIGVNYIDIYQRIGLYPLPLPAVLGVEGAGVIEAIGPDVDNIHVGDRVAYTGIPGAYSATRLLPAWRTIKLPDDISTRIAALSFLRGLTAHMLLTRTYSVKQGETLLIHAAAGGLGFVLTRWAKSLGCIVIGTTGSSEKADVARANGVDHVIVGREADVVSEIGRLTKGKGVDFAIDGIGGEMLRKTLGCVRRFGTVASIGQAAGPIPPVSVEELGPIRSLSLARPSVMAYAAEQETYHLAAKAVIAAIREGIMPEPGGEYPLSEAAQAQSDLESGRTAGSLMLVP

SEQ ID NO: 20601 - protein, 3654 aa, Streptomyces caelestis
MSATNEEKLREYLRRAMGDLHSARERLAELESARHEPVAVVGMACRYPGGVATPDDLWELVASGTDAISTFPTDRGWDLDGLYDPDPSTPGKSYVRHGGFLHDAAQFDAEFFGISPREATAMDPQQRLLLETSWEALEHAGIAPHTLRTTRTGVFTGVMHHDYGSHQVGSAADASGQLGLGTAGSVASGRVAYTLGLQGPALTVDTACSSSLVALHLAVQSLRRGECDLALAGGTTVMATPTVFVEFSRQRGLAPDGRCKPFADTADGTAWAEGVGMLLVERLSDAERLGHRVLAVVRGTAVNQDGASNGLTAPSGPAQQQVIRDALADAHLTPDDIDAVEAHGTGTPLGDPIEAGALLATYGHPKRQTPVWLGSLKSNIGHTQAAAGIAGIIKMVQALRHDTLPRTLHADHPSSKVDWEAGPLQLLAQARPWPADPDRPRRAGISAFGVSGTNAHAIIEEPPTLTEAPADTHTPPVIAWPLSAHTPTALRAQAARLRARLHRTSDALSLADSAGIGHGLAVGRAALPHRAVLLGDGAAPLDALAALASGEVSPDVVTGSAADVRRVAFVFPGQGAQWAGMGAELLDSSPVFAAELARCEAALEPFVDWSLTDVLRGAPGAPGLDRVDVVQPVTFAVVVALAAMWRWLGVEPAAVVGHSQGEIAAAHVAGVLSLEDAARVVALRSQLIARELAGRGSMASVALAAADVESRLAGAEAGGGVRDVEIAAVNGPETTVVCGAPGAVDSLLGVLQGEGVRVRRIDVDYASHSRHVEGIRDELAAVLAGLRPRAGRVPFYSTVEAEPLDGTALDAGYWYRNLRQRVRFESALRAMLADGVDAFVECSPHPVLTVPVRQTLEDAGAGAVAVGSLRRDDGGLRRFLTSAAEAQVAGVPVDWAALCPRAGWVDLPTYAFQRERYWVAPAEPGPAAGAGSAAATGPAAATAARSGSGQEDAASAYGDRLAYHVAWQGLLPGADAWRPGPRLLIVPAGEREAEVADSVEQAIASFGGTVRRVTADPLSTGRDGLRALLAPVVAGEEPLTGAVSLLGLCTDGHPEHPGVPAGVTGTLALVQALADLGVAVPLWTVTRGTVLVVGDSTTVPARLLRSLLDDGAERVVLAGADAGTATDAGTAELAPDAAVVRIPCDVTDRSVLAGLLAKYRPAVVVHAPPLVPLAPLVETAPGDIAEAVAAKTAVAGHLVDLAAGADLQALVLFSSVSGVWGGAAQGAYAAATAHLDALAERARAAGLPAVSVAWSPWAGGAHAEGADEEFLSRRGLVPLDPDAAVRSLRRLLAGDSACGVVADVVWDRFVASYTSVRPTALFDDVPDVRELHAARRAADADDPATAELVRELSARSGDQRRAALLRLVRTHAAAVLGKASGDAVDSTRAFRELGFESLTAVELRGRLAEATGLTLPASLVFDHPTPAALARHLGERLFGDEDGTAAAAKAPVVRKADAGEPIAIIGMACRLPGGVRSPEDLWELLSDGADAITAFPTDRGWDNDALYDPDPAASRRTYARAGGFLHDAAEFDPGFFGISPREALAMDPQQRLSLETAWESFERAGLDPTRLRGSRTGVFVGTNGQHYVPLLQSGGADGESFDGYISTGNSASVMSGRLSYVFGLEGPAVTVDTACSASLTALHLSVQSLRRGECDLALVSGATVMATPEMLVDFARQRAISPDGRCKAFAEAADGVGLAEGAVALLVERLSDAERLGHRVLAVVRGTAVNQDGASNGLTAPSGPAQQNVIRDALADAGLTAADIDAVEAHGTGTHLGDPIEAGALLATYGQAEDRGPLWLGSLKSNIGHTQAAAGVAGVIKMVQALRHDTLPRTLHVDRPTSKVDWETGRVRLLTDARPWPAGPDRPRRAGISAFGISGTNAHVVIEEPPPTAVPESPEPSPAEAPPRQEQDRDRWEGVTVPLMLSAHSEAALREQARRLCAQLLARPEQRPADVGHALLSTRARFPRRAAVVGESMTELAEALDAVAEGGPHPLAATGTAGTADRVVFVFPGQGSQWAGMAEGLLERSGAFRSAADSCDAALRPYLGWSVLSVLRGEPDAPSLDRVDVVQPVLFTMMVSLAAVWRALGVEPAAVVGHSQGEIAAAHVAGALSLDDSARIVALRSRAWLGLAGKGGMVAVPMPAEELRPRLVTWGDRLAVAAVNSPGSCAVAGDPEALAELVALLTGEGVHARPIPGVDTAGHSPQVDALRAHLLEVLAPVAPRPADIPFYSTVTGGLLDGTELDATYWYRNMREPVEFERATRALIADGHDVFLETSPHPMLAVALEQTVTDAGTDAAVLGTLRRRHGGPRALALAVCRAFAHGVEVDPEAVFGPGARPVELPTYPFQRERYWCHPGVRGGDPASLGMDGADHPLLGGGVELPDSGGHVYTARIGVDEFPWMADHTLLGAVLLPGAAFADLALWAGRQSGAGRIEELTLSSPLTVPADGGVRLRLSVAGRGPGGDRRFTVHARPEDAADWSLHAEGLLSPDEGAGEDAGAGAAAVAPGAEPLDVSDFYDRFAERGYGYGPVFRGLVAAYRHGADIHAEVALPGSAQGDASRFGLHPALLDAALQTMSLGTFFPEDGRVRMPFALRGIRLHRSGADRLWVRISPVAEDAVRVQCADAEGRPVAEIDSIVMRPVDPGHLAHAGLSQVPDSLFALTWDAVPPPGAAANGAGAPLRWVVAGPDALSLAEAADAHLPDLSDLPVPGPSAEGAPRPWGGRSAPDAGVFGVVGGDGCLDLEARALPAGCWSWCSGGSRRPAGAEGPRLVVATRGAVAVQDDDEVTDPAAAAAWGLLRSAQAEEPGRFLLVDVDDDPVSVRALPAAVASALASGEPQTAVRAGTAYLPRLDRAGAALIPPAGGGAWRLSRSADGTLDGLALLPAPDADAPLEPGQVRVAVRAAGVNFRDALLALGMYPGEAELGTEGAGVVTETGPGVTRFRPGDRVLGLWNGGFGPVCIADERLLAPVPEGWSFVRAASVPAVFLSAYYGLVALAGLRRGETVLVHAAAGGVGMAAVQIARHLGAQVLATASPTKWDALRGLGVADEHIASSRTLDFATAFSRESRPVGVDVVLNSLAYEYTDASLTLLGPGGRFLDLGRTDVRDPLRVAAEHPGVQYRAFGLDEVDSGELGRMLTELMELFERGVLRPLPVATYDVRRAADALRTISQARHVGKLVLTMPPAFGPYGTVLITGGTGTIGSRIARHLVTRHGVRHLLLASRGGPDGDGAAGLVAELADAGASATVVACDVADADAVRRLLDEVPEQQPLTAVVHSAGVLDDGMLPSLTPERLERVLRPKVDAAVHLDRLTRDLDLSAFVLFSSSAALLGSPAQGNYAAANAVLDALAARRRSLGLPAVSVAWGLWTDSSRMHTLDQESLGRRFARSGFPPMPASLATALFDATLGVDEAVQYPMRLDLAALRATGTVPPLLSRLVTRAADGAAAGQGRTDAVGGNGQVSGEAFAERLSALSDEERLDTLLELVRELVAAVLGHGSAASVASDRAFREAGFDSLTAVELRNRLAAATGLRLPATLVFDHPTPTALAGRLDELLAPRRPAGTDPVLAGLDRIEEALAALDPDGPAATVPAPRTPGEIASHLAALAGRWRALHNGTLNTGDTAQGTGDRIDDVLDAAADDEIFAYIDERFGTS

SEQ ID NO: 20602 - protein, 325 aa, Arabidopsis thaliana
MKAIVISEPGKPEVLQLRDVADPEVKDDEVLIRVLATALNRADTLQRLGLYNPPPGSSPYLGLECSGTIESVGKGVSRWKVGDQVCALLSGGGYAEKVSVPAGQIFPIPAGISLKDAAAFPEVACTVWSTVFMMGRLSVGESFLIHGGSSGIGTFAIQIAKHLGVRVFVTAGSDEKLAACKELGADVCINYKTEDFVAKVKAETDGKGVDVILDCIGAPYLQKNLDSLNFDGRLCIIGLMGGANAEIKLSSLLPKRLTVLGAALRPRSPENKAVVVREVEKNVWPAIEAGKVKPVIYKYLPLSQAAEGHSLMESSNHIGKILLET

SEQ ID NO: 20603 - protein, 322 aa, Fragaria x ananassa
MAAAPSESIPSVNKAWVYSEYGKTSDVLKFDPSVAVPEVKEDQVLIKVVAASLNPVDFKRALGYFKDTDSPLPTVPGYDVAGVVVKVGSQVTKFKVGDEVYGDLNEAALVNPTRFGSLAEYTAADERVLAHKPKDLSFIEAASLPLAIETAYEGLERAELSAGKSILVLGGAGGVGTHIIQLAKHVFGASKVAATASTKKLDFLRTLGVDLAIDYTKENIEDLPEKFDVVYDAVGETDKAVKAVKEGGKVVTIVGPATPPAIHFVLTSKGSVLEKLKPYLESGKVKPVLDPTSPYPFTKLVEAFGYLESSRATGKVVVYPIP

SEQ ID NO: 20604 - protein, 339 aa, Fragaria x ananassa
RNLCPLNFTFAIHRLTMAAAPSESIPSVNKAWVYSEYGKTSDVLKFDPSVAVPEIKEDQVLIKVVAASLNPVDFKRALGYFKDTDSPLPTIPGYDVAGVVVKVGSQVTKFKVGDEVYGDLNETALVNPTRFGSLAEYTAAYERVLAHKPKNLSFIEAASLPLAIETAHEGLERAELSAGKSVLVLGGAGGVGTHIIQLAKHVFGASKVAATASTKKLDLLRTLGAADLAIDYTKENFEDLPEKFDVVYDAVGETDKAVKAVKEGGKVVTIVGPATPPAILFVLTSKGSVLEKLKPYLESGKVKPVLDPTSPYPFTKVVEAFGYLESSRATGKVVVYPIP

SEQ ID NO: 20605 - protein, 470 aa, Cicer arietinum
LDPIYSGSKGGVIMFSRALRLYKRQGIRVNVLCPEFVETDMGTMIGPKFLSMMGGFVPMEMVVKGAFELITDENKAGDCLWITNRRGLEYWPTPSEEAKYLLRSTRSRRRTEYKAPPIKLPESFEKIVVQTLTHNFRNATSVVRAPLRLPIKPNYVLVKIIYAGVNASDVNFSSGRYFGGNNSDTASRLPFDAGFEAVGVIAAVGDSVTDLKVGMPCAFMTFGGYAEFTMIPSKYALPMPRPEPEGVAMLTSGLTASIALEKAGQMESGKVVLVTAAAGGTGQFAVQLAKLAGNTVVATCGGGAKAKLLKELGVDRVIDYHSEDIKTVLRKEFPKGIDIIYESVGGDMLKLCLDALAVHGRLIVIGMISQYQGENGWTPSKYPGLCEKLLSKSQTVAGFFLVQYSHMYQEHLNKLFDLYSSGKLKVAVDPKRFIGLHSVADAVEYLHSGKSVGKVVVCVDPTFGHQVAKL

SEQ ID NO: 20606 - protein, 10917 aa, Streptomyces nodosus
MSTSTNKYVEALRSSLKEIERLRKQNEQLVASAAEPIAVVGIGCRFPGGVVSPEDLWELVAEGRDVIGPFPTDRGWDLDRLAGGGEGSSLAQVGGFLDDAAGFDPGFFGISPREAVAMDPQQRILLEIAWEALERAGIDPSALRGSRTGVFMGTTGQDYGEVIKASDEDAEVYSTTGHAASVISGRLSYFLGAEGPAVTVDTGCSSSLVSLHLAAQALRGGECSLALAGGASVMATPHPFIAFTSQSGLAADGRCKPFSDDADGTGWAEGAGLFILMRLSDAQREGRKVLAVLRGSALNQDGASNGLTAPNGPSQQRVIRQALAHAGLQASDVDAVEAHGTGTPLGDPIEAQALLATYGQNRERPLLLGSVKSNIGHAQAASGAAGVIKMIMAIQHGVLPRSLHAERPTSNVDWTAGAVELLDRAVDWPETGRARRAGVSSFGISGTNAHLILEQAPTAPERPAPDPAARPALVPWTLSGRTAAALDAQRERLAAHLESHPGADPLDIGFALADGRATFEHRAVLLCAGTDASAATEIAHGSVDDGASAVLFSGQGSQRLGMGRELHARFPVFAEAFDEIAALLDRHTDRPLREVVWGSDAELLNETGWTQPALFAVEVALYRLVSSLGVTPDYVGGHSIGEIAAAHVAGVLSLEDACALVAARARLMQELPRGGAMLAVRATEEEVAPHLTERVSIASVNGPSSVVVAGDEDEVAAIAAHFEAQDRKTTRLRVSHAFHSPLMDPMLEEFRRVARGLTYHEPRIPVVSNLTGAIADPADLCTADYWVRHVREAVRFADGVTTLAGRGVTTLLEVGPDGVLSAMAQESLPEGTTGVPLLRKDRPEEESALTGLARVHVRGLTVRWARLFDSAGAGRADLPTYPFQNQRVWPAAGRSARTSPAAGLGSADHPLLGAAVELADGEGFLFTSRLSVHSHPWLADHGVQAAPCVPGTAFVELAIRAGDEAGCDRVEELTLAAPLVLPERGAVQLQVRVGAPDPAGRRTLGIFSRVEDGFDLPWSQHATGVLTTGAGAPDAAFDATVWPPAGAEQVDLDGCYERLAGLGFDYGPAFRALRAAWRRGTEVFAEVALSENAGTDPADFGLHPALLDAAQHAAAYNDLGAISRGGLPFAWEGVHLAASGATTVRARITSVGEDTVSIAVYDTAGGTVLSVDSLVSRAVPKDIPGTARAVHRDSLFQVDWTPLRSQSGQLPETVALVGADPAGLADTLRTGGVQVTVHPDLAALAADPAPVPGTVLTALPGDQDTPAADAAHTTAAAVLGLAQHWLTEDRFADARLVLVTRDATAGGDLAAAAAGGLIRTARTENPGRFVLLDLATGTPAAPAALVAALAAAYDEPDLAVRGSDVLTARLARVPAPDAGADWNPDGTVLITGGTGGLGGVLARHLVTERGVRRLLLASRRGPAADGAPALVDELTALGASVDVAACDVTDREALAALLARVPAAHPLSAVVHTAGVVDDGVIGSLTAERLDTVLRPKADAAWHLHELTRDLDLDAFVLFSSVAATLGSPGQGNYAAGNAFLDALAAHRHALGLPATSLAWGPWTQSVGMTGTLSDIDVERIARSGMPPLTVEQGVALFDAALATGGPALLPVRLDLAVLRTQGEIAPLLRGLIRTTVRRAAAQVSVTADGLAQQLAGLDAAARREALLGLVRTQIAQVLGHADAGQVEAARQFQDLGFDSLTAVELRNGLNSATGLRLPATMVFDYPTPNALADHLSDELLGTGDNIPLPTPAGALPATTDDPIVIVGMACRYPGGVTSPEDLWRLVSEGADATGPFPVNRGWDVDNLYDPDPDRPGHTYVRAGGFLHDAGSFDADFFGMSPREALSTDSQQRLLLELSWEAVERAGIDPHSLRGSRTGVFAGVMYNDYGTILTGEEYEAFRGNGSAPSVASGRVSYTLGLEGPAVTVDTACSSSLVGMHLAAQALRTGECTLALAGGVTVMSTPSTFVDFSRQRGLAADGRSKAFAEAADGVAWSEGVGMLLLERRSDAIRNGHEILAVLRGSAVNQDGASNGLTAPNGPSQQRVIRQALASGGLSPEDVDVVEAHGTGTTLGDPIEAQALIATYGRDRDPERPLWLGSVKSNIGHTQAAAGVAGVIKMIMSMRHGLLPQTLHVDAPSSHVDWDAGAVELLTEQTEWPENDRVRRAAVSSFGISGTNAHVIIEQPAAGPAPAAPSGPAEELPAAPWPLSAKTPEALRDQAARLLAHVEAHPETRPADIAYSLLTSRSVFDHRAAVLGADRTEALRALAALAAGTDDSALLTGTARGGRTAFLFSGQGSQRLGMGRELYGRVPVFTEALDAVLAVLDGELEGSLREVMWGEDADLLNETGWTQPALFAVEVALYRLVESWGVKPDFVAGHSIGEIAAAHIAGVLTLADACRLVAARAALMQALPEGGAMIAVEATEDEVLPLLTGDVSIAAVNGPSSVVVSGAEAAALAVAGHFTEQGRRTSRLRVSHAFHSPLMDPMLDEFRSVAEGLSYSAPAIPVVSNLTGTLADPADLCSADYWVRHVRDAVRFADCVGTLGEHGVTTFVELGPDGVLSAMAQQSVTEGAVTVPVLRKDRSEEQALVTALCRLYVLGIDADWTSALTVGGAARVDLPTYAFQHRWFWPAARAAHPHDMRAAGLGSASHPLLGAAVELPGGEGVLLTGRLSLQSHPWLADHAVHGTVLLPGTALLDLAIRAGDEAGCGHLEDLTLAAPLTLPQDGAVLLQVRVGAADDAGRRTVTVHARPEDATDGVWTLHATGTLSDTAATGTALDTTVWPPAGAQALDTEGCYQRFAAHGFAYGPLFQGLTAAWKAGEALYAEIALPEEGHDDAAGFAVHPALLDAALHPALLTDDDGGLPFSWENVSLHASGATALRVRLAPAGANALSVTAADPAGRPVVSIARLLARPVEADQLTGDAGHLRDALFRLEWTPVPLPDGTPTESLALLGPDTDDLAEALGEGAVRYATLADLLAADAPVPGAVLVPLTAGSDTDDTPGAVHTRTAAALTLLQEWLAEDRFNGSRLVLVTRGAVATDDAPVTDLAAAALVGLVRSAQTENPGVFGFMDLDADGASDSALTRALGLDEPQLALRGGRALAARLTRATADSTARVAWSSEGTVLVTGGTGGLGGLVARHLVMERGVRRLLLTSRSGLGAAGAGDLVAELEGLGAEVSVAACDVADRDAVTALVAAVPAEHPLVAVVHTAGVLDDGVLDSLTEERLATVLRPKVDGAWNLHEATRHLDLDAFVVFSSVAGVFGGAGQANYAAANAFLDALTAHRHALGLPAVSLAWGPWQQGAGMTAGLDERDIRRAAESGMPLITVEQGLALFDAALTTDEAALVTSRLDLAAFRGRPEIPALLRGLIRTPVRRAAATGAADGADAGLVQRLAGLDREQRHEVLLDLVRTSAALVLGHAAGSDIDADRAFRDLGFDSLTAVELRNRLRTATGLRLSATMVFDHPTLSALADHLLTELFGAEAETLTPVTLLPPTDDDPIVIVGMACRFPGDVTSPEDLWRLVSEGTDAISDFPANRGWDVDSLYHPDPEHSGTSYTRSGGFLHDAGDFDPDFFGMSPREALATDSQQRLLLETSWEAIERAGIDPLSLRDSRTGVFAGVMYHDYGSLLGGKEFEGFQGQGSAGSVASGRVSYTFGFEGPAVTVDTACSSSLVALHWAAQALRSGECSLALAGGVTVMSTPSTFIEFSRQQGLSADGRSKAFAESADGVGWSEGVGMLLLERQSDAIRNGHEILAVVRGSAVNQDGASNGLTAPNGPSQQRVIRQALASGGLSTGDVDAVEAHGTGTTLGDPIEAQALIATYGQNRTDEQPLWLGSLKSNIGHTQAAAGVAGVIKMVMSMRHGVLPCTLHVDAPSSHVDWTEGAVELLTEQTEWPETDRVRRAAVSSFGISGTNAHVILEQPVVAPAPATADVDGAEPAVVPLILSGKSPEALRDQAARLLDTVREHTALRPLDLGHSLATSRSAFDHRAVVLATGREDALRALTALADDEANSAAVTGRTRSGRRAALFSGQGSQRLGMGRELYGRFPVFAEALDAVLAVLDGELEGSLREVMWGEDAGLLNETGWTQPALFAVEVALYRLVESWGVRPDFVAGHSIGEIAAAHIAGVFSLEDAARLVAARGRLMQALPAGGAMVAVQATEDEVIPYLSDEVSIAALNGPASVVVSGAEGAVLEVAARFEAEGRKATMLRVSHAFHSPLMDLMLDEFRAVAETLSFAAPVIPVVSNLTGSLATAEELCSPEYWVRHVREAVRFADGVSALEAQGVTTFLELGPDGVLSAMAQESLTGDEAVTVALLRKDRDEETAALTALAALHTAGVRLDWNAFFAGTGATRVDLPTYAFQHTTYWPSGTHSAADAAAVGLTAAGHPLLNGSVQLAEGEGVLFTGRLSLQSHPWLADHAVHGTVLLPGTALLDLAFRAGDEVGCDRVEELTLAAPLVLPERGAVQTQVRVGVADDTGRRTVTVHSRPEDATDVSWTQHATGTLMPGGTARDTGFDATVWPPTGAEALDTEGCYERFTALGFGYGPVFQGLKAAWRSGDVLYAEVVLQEAGAADDEAGFGLHPALLDAALHASLVAHEGEEGNGGLPFAWEGAVLHATGATALRVRLTPTDEARQSVAIAVCDTAGQPVASIDRLLVRAVTGDQLNEAAGIARDALFALGWTPLPQDGDIPAAVALVGPDTTGLAADLTAAGAAVTAHQDLAALAADGTDIPGTVVVTVDGTAAPVAEAAHTVAAEALALAQRWTAEDRFAGARLVFATCGAVEAGGSQVTDVAAAAVWGLVRSAQSESPDTFVLVDREAADAAGDAAERGSLFLAALGSGEPQLALRDDVVLAGRLARFDAAGAMTLPAERAWHLDSTTPGSINGLALTPHPEALEPLTGHQARIEVRAAGLNFRDVLKALGMYPGDAGRYGHEAAGVVVEVGPDVTHIAPGDRVMGMVSGSFASFAVTDARRLTHLPEQCTWEIGASLPLVFLTAYHALKELGGLTAGEKVLIHAGAGGVGMAAIQIARHFGAEVFATASEAKMDVLRSLGVADDHIASSRTLDFEAAFAAVAGENGLDVVLNSLAGEFVDASMRLLGTGGRFLEMGKTDIREDDSVPDGITYQSFDLAFVDPEVIGAMGRELTELFAAGDLHPLPVRAWDIRHATDAFRHMSMARHIGKIVLTVPRAWSSEGTVLVTGGTGGLGGLVARHLVMERGVRRLLLTSRSGLDAAGARELVAELENLGAEVSVAACDVADRDAVDTLIAGIPAEHPLRAVVHTAGVLDDGVLGSLTEERLATVLRPKVDGAWNLHEATRRLDLDAFVVFSSVAGVFGGAGQANYAAGNAFLDALTAHRQSLGLPGLSLAWGAWAQGAGMTAGLDERDIRRAAESGMPLITVEQGLALLDTALTTGSAALVPVRLDLAVLRARGTVAPLMRGLVRAPARRAAATAATGDTALVDRLTRLQRTERRDALLTLVREQAALVLGHSGGGGIDPSRAFRDLGFDSLTAVELRNRLGAATGVRLSATAVFDYPTVVALVDHLLTELLGPDAESDAEEAAPAEALLDDDPIVIVGMACRFPGGITSPEDLWRLLGEGSDVISDFPVNRGWDVDSLYDPDPAHTGTSYTRSGGFLHNAADFDADFFGMSPREAMATDSQQRLLLESTWEAIERAGIDPVTLRGSRTGVFAGVMYSGYGTALDGDEFEGFQGQGSALSVASGRVSYTFGFEGPAMTIDTACSSALVAMHLAAQALRSGECSLALAGGVTVMSIPDTFVEFSRQRGLSPDGRCKPFSESADGVGWSEGVGMLLLERQSDAIRNGHRVLAVVRGSAVNQDGASNGLTAPNGPSQQRVIRQALASGGLSTGDVDAVEAHGTGTTLGDPIEAQALLATYGQNRPEDRPLLLGSVKSNIGHTQAAAGAAGVIKMVMAMQHGVLPRSLNISEPSSHVDWSAGAVELLTEQTEWPETDRVRRAGVSSFGISGTNAHVILEQPAKVIQGTVVAASAAPGPDVVEPAVVPWVLSGKTPEALRDQAARLLATVTEEPAPRPVDVALSLATQRSQFAHRGVVLAGEHEETVRALAALADGEPHSSVTTGTVSSGRRAALFSGQGSQRLGMGRELYGRFPVFAEALDAVLAVLDGELGGSLREVMWGEDAGLLNETGWTQPALFAVEVALYRLVESWGVRPDFVAGHSIGEIAAAHIAGVFSLEDAARLVAARGRLMQALPAGGAMVAVQATEDEVVPHLSDGVSIAALNGPTSVVVSGVEDAVLEVAARFEAEGRKTTRLRVSHAFHSPLMDPMLDEFRAVAEGLSFAAPVIPVVSNLTGSLATAEELCSPEYWVRHVREAVRFADGVAALEAQGVTTFLELGPDGVLSAMAQESLTGDETVTIPLLRKDRDEETAALTALGRLHATGTRVDWAGFLAPAGARTVDLPTYAFQHRPFWPSGKRGATDVNSVGITAAAHPLLNAVVELAEGEGLVFTGRLSLNSHTWLADHAVMGTVLLPGTALLELALRAGDEVGCDHVEELTLAAPLVLTEQGAVRTQVRVGAEDAAGRRTVTIHSRPERSTDAPWTQHATGVLATGLPTAAAPFDATVWPPADAEPVDLTGFYEAREAEGFAYGQAFQGLKAAWRRGDEVFAEITLPDGTQKEAESFGLHPALLDAGLHAAWLAAPTGDGTTGSVPFSWNGVSLVASGASSVRVRLGRDTDGTLTLAVADTTGAPVAAVQALTMRAVSAEALSSAAALVRDSLFRLDWTPVTPAGSAEPTAALVGEDPFGLVRSLREAGTEIGRRASLTDDAELPDLLLLPVTAEEHEEAADTPAVTHALTRQVLELVRARLEDERHAATRFVFVTRGATTGHDLAAAAVWGLVRSAQSENPGCFGLIDLDPETTRPLPLTALLGDEPQLRLQDDDLRAARLVRRPAPATDAVSAFGGEGAVLVTGGTGGLGAVLARHLVAEHGVRELVLVSRRGGAAAGAAELVAELAESGARATVVACDVTDRAAVAELVAAHPVSAVVHSAGVLDDGLIASLTPERLSGVLRPKVDAAWNLHEATRDLDLDAFVVFSSVAGVFGNAGQANYAAGNAFLDALMEHRRAAGLPGLSLAWGPWEQTGTGGMTGTLSDAELERLASSGVPPLAVEQGLALFDAALSTEDAALVPVRLDLPALRGQGEVPPLLRSLIRARSRRAAVAGSATATGLRDRLAVLDAVERREVLVDLVRGQVALVLGHADATAVHPTRAFRDLGFDSLTSVELRNRLNAVTGLRLPATMVFDYPTVEVLVDFILDELLGTEVEAEVVQRGTAAVADDPIVIVGMACRYPGGVASPEDLWRLVTEGTDAVSAFPVNRGWDVENLYHPDPDNIGTSYTRSGGFLHEAGEFDPGFFGMSPREALSTDSQQRLLLETSWEAIERAGIDPVGLRGSATGVFAGVMYSDYSAMLASPEFEGFQGSGSSPSVASGRVSYTFGFEGPAVTVDTACSSSLVAMHWAMQALRSGEISLALAGGVTVMSTPGVFVDFARQRGLSPDGRCKAFSDSADGVGWSEGVGMLVLERQSDAIRNGHEILAVVRGSAVNQDGASNGLTAPNGPSQQRVIRQALASGGLSAQEIDVVEAHGTGTTLGDPIEAQALLATYGRDRDPEQPLWLGSVKSNIGHTQAAAGVAGVIKMVMSMRHGVLPRTLHVDAPSSHVDWTEGAVELLTEQTEWPETEHVRRAGVSSFGISGTNAHVILEQPAKVIQGTVIGGSTPESGVVEPSVVPWVLSGKTPEALRSQAAKLLASVEAELDRPLVDVGSSLVAARSLFEHRAVVLATDADTAARALAALAVGEPDPAAVSGPARTGRSAALFSGQGSQRLGMGRELYGRFPVFAEALDAVLAVLDGELDGSLREVMWGEDAGLLNETGWTQPALFAVEVALHRLVESFGVTPDFVAGHSIGEIAAAHIAGVFSLEDAARLVAARGRLMQALPAGGAMVAVQATEDEVIPYLSDEVSIAALNGPASVVVSGAEGAVLEVAARFEAEGRKATMLRVSHAFHSPLMDPMLDEFRAVAEGLSFAAPVIPVVSNLTGSLATAEELCSPEYWVRHVREAVRFADGVTTLEEQGVTTFLELGPDGVLSAMAQESLTGDEAVTVPLLRKNTAEEAATVAALARLHIGGLRIDWSALFAGTGARRVELPTYAFQHQWFWPAAPLGGGDVRAAGLGSAEHPLLGAAVELAAGEGVLFTGRLALHSHPWLADHTVDGTVLLPGTALLELAIRAGDEVGSDQVEELTITAPLVLPERGAVQVQVAVEAPDAAGRRVVGVYARPEGTGDTAWSQHAAGVLAPAGSRPAPAAFDTAVWPPEGAQAVDADGCYEEFAAAGFGYGPLFQGLRAAWRRGDEWFAEVALPEGTENTAAGFGLHPALFDSALHALLLTPAADGGTAGLPFSWTDVSLHASGATVLRVRLTPTGDRTLSLSAVDPSGTPVVSVGSLVTRSVDGLGTTGTEALLRDAFFGVEWTPAQGSEAAPATVALLGTDGDPLGLAAALTGAGTTVRTYPDVAALVAATVAADGPVPEVVVHGVASHDGEPASDAAHRLTADALDTVQSRLSEDRLAGARLVFVTRGAVDTRDLGAAAVQGLVRSAQTENPGALGLVDLDGTPESAAALAAALGSAEPQLALRDGRPHAARLARLARPADTAAPTAWQSDGTVLVTGGTGGLGAQFARHLVDAYGVRNLLLVSRRGGDAPGTTELVAELIAHGAEVTVQACDVADPDAVTALVAGIPAEHPLTAVVHTAGVLDDGVIGSLTGERLARVLRPKADAAWNLHQATRGLDLDAFIVFSSVAGVFGGAGQANYAAGNAFLDALMEHRRAAGLPGLSLAWGPWDQAGGMTETLSDAEAERLARAGMPPLAAEQGFALFDAALAAGNGTGTGSEDTTGTALVVPVRLDLAALAAQGEVPAVLRGLVRTRTRRTVAGGTVTADGLVARLTALTAEERREALLGLVRTQAALVLGHADAASVDAAAQFRDVGFDSLTAVELRNRLSAATGLRLTATLVFDYPNAATLASHLHDELFGAETESALALPVKQLPATTDDPIVIVGMACRYPGGVASPEDLWRLLLEGTDAITEFPVNRGWDIESVYHPDPEHLGTSYTRSGGFLHEAGEFDPGFFGMSPREALATDSQQRLLLESSWEAIERAGIDPVGLRGSATGVFAGVMYSDYGSILGGKEFEGLQGQGSAGSVASGRVSYTFGFEGPAVTVDTACSSSLVAMHLAAQALRTGECSLALAGGVTVISTPGTFVEFSRQRGLSPDGRCKAFSDSADGVGWSEGVGMLVLERQSDAIRNGHEILAVLRGSAINQDGASNGLTAPNGPSQQRVIRQALASGGLSTGDVDVVEAHGTGTTLGDPIEAQALLATYGRDRDPEQPLLLGSVKSNIGHTQAAAGVAGVIKMVMSMRHGVLPRTLHVDAPSSHVDWTEGAVELLTEQTEWPETEHVRRAGVSSFGISGTNAHVILEQPAKVIQGTVVAASAAPESDVVEPSVVPWVLSAKTPEALRDQAARLLAAVTEEPAPRPADVAHSLLVTRSLFAHRAVVLAGEHQETVRALTVLAAGATDPTAVSGTVASGRSAALFSGQGSQRLGMGRELYGRFPVFAEVLDAVLAVLDGELGGSLREVMWGEDAGLLNETGWTQPALFAVEVALYRLVESWGVRPDFVAGHSIGEIAAAHIAGVFSLEDAARLVAARGRLMQALPAGGAMVAVQATEDEVVPHLSDGVSIAALNGPTSVVLSGVESAVLELAARFEAEGRKTTRLRVSHAFHSPLMDPMLDEFRAVAEGLSYAAPVIPVVSNLTGSLATAEELCSPEYWVRHVREAVRFADGVAVLEAQGVTTFLELGPDGVLSAMAQESLTGDETVTIPLLRKDRDEETTALLARAGLYTRGIGGGWQDLLAGTGARRVNLPTYAFQHQWFWPTGRAAAGGDVRAAGLGSAEHPLLGAAVELAAGEGVLFTGRLSLSSHPWLADHVVMGTVLLPGTALLEMAVRAGDEVGCGRVEELTLAAPLVLPERGALQVQVAVAAPDDSGRRTVGVYSRLEGADESVWAQHAAGVLAPGAGAPETGLGTEVWPPRDAESLDTEDCYQAFAEAGFAYGPLFQGLRAVWRRGEELFAEVALPEEGTGEAAEFGLHPALLDSALHATMLAATGGEEGDGGGALPFSWEGVALHASGASALRVRLAPAGDNALSVHAVDPAGAPVVTVGRLLTRTVTGDQLKAAGEDQNTLFGVDWTPVADTRAARPASVAIVGADPFGLADAFAGAGLTAVTAADLTALTASSEAAVPDTVLVPVAGAPADGADLPGAVREVTGRVLALLQQWPVEEALAASRLVFVTRGAVAVDDGGTADLAASAVWGLVRSAQTENPGCFGLLDLDPAAAVPSARLVEALTAGAEEPQLALRGIEVVAARLARYDAAQPEPASGAMADGTSGTFRTTGTVLVTGGTGGLGRLLARHLVTTHGVRSLLLASRRGLQADGAGKLVAELEEMGAEVTVRACDVADPEAVAALVAAAPKGRPLSAVVHTAGVLDDGVVGSLTPERLDTVLRPKADAVWHLHRATRGLDLDAFVVYSSVAGVFGGAGQANYAAANTFLDALMARRRADGLPGVSLAWGPWEQDSGMTGTLTDAEAERLARSGMPPLTVEQGHALFDAVVAGERALALPVRLDLAVLRAGGEVPALLRGLIRVPARRAAAQSAVPSADTLTRQLAGLGAQEQEEALLTLVRGQAATVLGHRDGSAIGRERQFQELGFDSLTAVEFRNRLNTATGLRLPATLLFDYPTPADVVRYLRGQLVTDDPSGAGSVLAALEGLEKAIAALSLDDAEEHRRVAGRIEVLRTKWAALGRTDTADEDASSDDLDGASDEDMFALLDDELGLS

SEQ ID NO: 20607 - protein, 432 aa, Methylobacterium extorquens
MAASAAPAWTGQTAEAKDLYELGEIPPLGHVPAKMYAWAIRRERHGPPEQSHQLEVLPVWEIGDDEVLVYVMAAGVNYNGVWAGLGEPISPFDVHKGEYHIAGSDASGIVWKVGAKVKRWKVGDEVIVHCNQDDGDDEECNGGDPMFSPTQRIWGYETGDGSFAQFCRVQSRQLMARPKHLTWEEAACYTLTLATAYRMLFGHAPHTVRPGQNVLIWGASGGLGVFGVQLCAASGANAIAVISDESKRDYVMSLGAKGVINRKDFDCWGQLPTVNSPEYNTWLKEARKFGKAIWDITGKGNDVDIVFEHPGEATFPVSTLVAKRGGMIVFCAGTTGFNITFDARYVWMRQKRIQGSHFAHLKQASAANQFVMDRRVDPCMSEVFPWDKIPAAHTKMWKNQHPPGNMAVLVNSTRAGLRTVEDVIEAGPLKAM

SEQ ID NO: 20608 - protein, 2218 aa, Stigmatella aurantiaca
MSSFLERVAELSPEKRAALAELLRLAPEPIAIVGMACRYPGGVKDSDSYWDLLKRGGDAVTEIPAARWDINAFYDPNQDSPGKTTTRWGGFLDDVEGFDPHLFGISPREAASMDPHQRLFLEVAWEALENAGQQTDRLAGSKTGVFVGLYTSDYSPVVLSDLNAINVYTGTGTANNVAAGRLSYLLDLQGPSFVVDTACSSSLVAVHLACQSLLNRECRMAVVGGVTLLLTPLTLVMASKMQLMAADGRCKTFDSRADGIAMGEGCGVVILKRLSDAQADGDRILAVIKASAINQDGRTNGLTAPSGASQQVLLRQALTRAGISPSQVTYVEAHGTGTPLGDPIEVEALAEVIGQPRPSGPPCVLGSVKANLGHTGAAAGVAGLIKVVLSMQNEAIPPQLHYRELNSNISLENTSLVIPKELHPWPAGKGPRIAGISAFGWSGTNAHVLVEEAPAAPKARAAVERPVHLLTLSARTEAALREFAERVKTYVSAHADLPIADLCYSANTGWSKFEHHLAVPAGTTAQLSERLSAFLEGQPQAGTSYGQVTGRRGPGVAFLFTGQGSQYAGMGRQLYQTQPTFRRALDRCDELLRPLLGRSILSVIYPEAGQASPIDETAFTQPALFAFEWALAELWRSWGVVPTVVMGHSVGEYVAACVAGVFTLEEGLALIVERARLMQSLPPGGEMAAVFTDGARTAQAIAPYASQVSIAAFNGPSETVISGDGKAVEAILGALSAEGVKVRRLGVSHAFHSPLMDPMLDAFERAAAKTRFMPPKITLISNLTGGPSEEFSARALRRHAREPVRFSDGMAALKARGVSVAVEIGPNATLLGIGSRCLPEGSVAWLPSLRKDKDEWEVLLATLGALSVRGVPVNWAGFDSDYPRRRVSLPNYPFQHERFALKQMDGRGVAPSGQVVGHPLLGSRLRVATVDGTLFESKFRADEPSFFSEHRVYGMSTVPATAYLEGALAAAEEIFGAGEHALESVDIQEALVLSDAPRTVQYLIGSREEGGTARFQVFSLASSGSGSEGVWTTHSSGQIRIASGAEPLSGTPLTPEQALEAIRTRCPRGLEPRAFYDWLEGQGLEYGPRFRGVQQVWRGDGEALGLVELPESAVDEAKAFKVHPGLMDACVQLFGVIEYREGAQDDTEVYLPVSIDRYRLKGRLGSKVWSHARIRPSEGTARETLKADIRLYDEAGRIVAEVEGMCIKRAPREMLARFGQAQFSNWLHEVEWKEEVRSAAAGAARPGSCRWVVFADRSGVAEALIDRLTARGEPVVRVLADDHYSREGDLVRLHPEQPEHVRSLMESAASSGGAVTRYLYLWGLDSSGPVSRGEASRVDTRAIGSNPLLHLVQELAGQQGSHQLFLVTRGAQATTREHAPIDAFQASLWGFARTIAFEHPELRPVRIDLEPSRKGGSPRETEILLGEVTRSDAASAEDAIAFRGSLRLVSRLMRQAKRASSNRKLRIPPAPAFRLEISQRGTLEDLTVRPVERRPPGPGEVEIRVRATGLNFRDVLNALGMYPGDPGLLGGECAGVISAIGPGVEGFKVGDPVVAVISLGSFATYCTVLADFVAHKPAALSFAQAAAIPIAFLTAQYGLQQLGRMAAGSRVLIHAAAGGVGMAAVQLAKRAGAEVFATASSGKWDVLEAMGVEHRMNSRTLDFADEVMARTEGQGIDIVLNSLADDFIPKSLSVLRSGGRFLEIGKRGVWTSAQVAERYPGVSYAIYDLGEVGTKDPSIIRSMFRALMAEFEQGTLVPPPLRVFALQDAVEAFRHMALAKHVGKVVITVNDGAPESAETTARAGAAVPIRGDSTYLITGGLSGLGLKTAQWMARRGARHLVLVARSEPGPEALGVIGELELSEVQVVVARGDVSRIDEVRGILDRVRDSLPPLRGIVHSAGVLDDGVLRQQTAGRFDRVLAPKAGGAWNLHLLTRDLPLDFFVLYSSIASMFGSASQGNYAAANAFLDALAHHRRALGLAGLSINWGAWSEAGMAARLSQRDMNRLSGQGIGTIAPDQGTQVLEMLLGQDAAQVGVLPIDWGTFFQRNPASKTSPFFSSLEGGTSVKKAAPTQVPSDILPRLREAAVGRREQLLSAHIREQAIKVLGLNPSHPLNPLQPLNEIGLDSLTAVELKNALGRTLGSSLHATLLFDYPTIDALTRYLAKEVMGWSAPALAPEAAEGAEDAEKARRVAEIQQLSDDEVAASINEELAALRQES

SEQ ID NO: 20609 - protein, 309 aa, Helianthus annuus
MKAWKYDEYGSVDVLKLATDVAVPEIKDDQVLVKVVAAAVNPVDYKRRLGYFKAIDSPLPIIPGFDVLGVVLKVGSQVKDLKEGDEVYGDINDKGLEGPTQFGTLAEYTAVEERLLALKPKNLDFIQAAALPLAIETAYEGLERAKFSEGKTILVLNGAGGVGSFIIQLAKHVYGASKVAATSSTGKLELLKSLGADVAIDYTKENFEDLPDKYDVVYDAIGQPEKALKAVNETGVAVSITGPIPPPGFSFILTSDGSILTKLNPYLESGKIKSDNDPKSPFPFDKLNEAYAYLESTGPTGKVVIYPIP

SEQ ID NO: 20610 - protein, 335 aa, Dictyostelium discoideum
MSMRSILVKQFGGIENLIIGTAPKPTPKNNEILVHVKSFALNRADILQRMGRYPPPPGDSDILGLEMSGVVVEADKQDKRFKIGDKVFGLVGGGAYGEFCTIASNQAFHMPSHLTFESASAIPEAWLTAFQALHPLANFKSGNSVLIHAAASGVGTALIQLCKVDGATKIIGTVGSDEKAKFIEKLGATHSVNYKTNENFLDVINDVTSKKGVNNVFDYVGAKYWNQNLKSLSMDGVMIIQGFLSGSHIKDTAADITPILGKRLTIKGSTLRNRDNDYKADLVAQFSKRYLTLFESGELKPIVDKVFNVSEIKEAHEYLEANKNMGKVVVKGFTD

SEQ ID NO: 20611 - protein, 360 aa, Novosphingobium aromaticivorans
MCARPPCCQRLAWLATPELVFDATRRWMNGIPATMTAMGWDAPGGPEVLRPENVRVPQPGPGQVLVKVAFAGVNRPDVIQRQGFYPPPPDASPLPGLEIAGQVVAMGQGVTWPFIGTAVCALVAGGGYAEYCIAEADQCLQVPTGLPMAQAAAMPETLFTVWHNVFERGMVAEGETILVHGGTSGIGSMAILLGKLFGVKVIATCGGPEKCEQALAIGAAHAIDYKAADFVEETLRLTEGRGVHMVLDMVAGDYVARNLKCLADDGRHVTIAVQGGVRAEINMAEVMRRRLTLTGSTLRPRSRAFKGALASEIRDTVWPLVVEGALRPIMDQTFPLAEAAAAHVRMEQGAHIGKIVLAVG

SEQ ID NO: 20612 - protein, 334 aa, Saccharomyces cerevisiae [sequence omitted]

SEQ ID NO: 20613 - protein, 376 aa, Saccharomyces cerevisiae
MSASIPETMKAVVIENGKAVVKQDIPIPELEEGFVLIKTVAVAGNPTDWKHIDFKIGPQGALLGCDAAGQIVKLGPNVDAARFAIGDYIYGVIHGASVRFPSNGAFAEYSAISSETAYKPAREFRLCGKDKLPEGPVKSLEGAVSLPVSLTTAGMILTHSFGLDMTWKPSKAQRDQPILFWGGATAVGQMLIQLAKKLNGFSKIIVVASRKHEKLLKEYGADELFDYHDADVIEQIKKKYNNIPYLVDCVSNTETIQQVYKCAADDLDATVVQLTVLTEKDIKEEDRRQNVSIEGTLLYLIGGNDVPFGTFTLPADPEYKEAAIKFIKFINPKINDGEIHHIPVKVYKNGLDDIPQLLDDIKHGRNSGEKLVAVLK

SEQ ID NO: 20614 - protein, 280 aa, Desulfitobacterium hafniense
MLRFVSSRRQVMASQRNGMPANDSPPPSPRVKAVVFDRYGAAEVLRAIDLPMPQAGPGEIRVRVRAAGVRPSDIALRSGLSAGAHGGARARFPHRLGNEFAGVVDQIGAGVADFAVGDEVMGWAAAMSYAEALTVPATQAVHKPHTMTWAVAGALPSTGQTAHAALRQLGVGAGQTVLIHGAAGALGCVAVQLAVAWGARVIGTAAAADHDYLRSLGAQPVSDDHAGVEQVRALAPHGVDALFDACGQDDFAPWLALAAPQRALSLSRRYGLAELRSARS

SEQ ID NO: 20615 - protein, 2530 aa, Cochliobolus heterostrophus
MTVRDSKTGGITPIAVVGMSFRGPGDATNVEKLLNMISEGRESRAEVQAKKWDPEGFYHPDSSRHGTHNVEYGHWFQQDVYNFDAPFFNVSPAEAAALDPQQRMLLECSYEAFENSGTPMSKIVGTDTSVFVSSFATDYTDMLWRDPESVPMYQCTNSGFSRSNLANRISYSFDLKGPSVLVDTACSGGLTALHLACQSLLVGDVRQALAAGSSLILGPEMMVTMSMMKFLSPDGRCYAFDERANGYARGEGVAVLLLKRLEDALADNDTIRAVIRGTGCNQDGKTPGITMPNSVSQEALIRSVYKKAALDPLDTTYVECHGTGTQAGDTTEASALSKVFSPGRRLPLLIGSVKTNIGHLEGASGLAGVVKSILMLEQGVILPNRNFEETKHENPAGKMELAYKVPTTLECWNNVKTRRVSINSFGYGGANVHAILESATDFLRDNSMGTDSTRFASRRSVVVGNVGQTKPAVSLVQDMSSNDRSHEDPTPLLFALSAFDSSAGDAWARSLSIYLSQRQGSDEKTILSSLAYTLSDRRTWHPWKAALSATTIQELITKLEKVRFVNMAPRHNIGFVFTGQGAQWCGMGRELISIFPRFRQSLIACDIALQSFGADFHVIDELEADVESSRINKALYSQPLCTALQIALVDLLVSWGIYAQSVTGHSSGEIAAAYAAGALSLSDAMLVAYARGCATANLAKKGAKGAMAAVSMETQELSHILSALENGKVGIACFNSPTSCTVSGDKSALDELQDVLRQKGVYNRRLIVDVAYHSHHMELIADSYRSAISSIQPLPGSDVKFFSSVTGELLDKNKLGVDYWVSNLVGQVKFAQSLSSLVSSHHGTGTPQIQALIEIGPHAALGGAISQVIDSEPLANPTGYFSALVRKKNAVTTILSLAADLFLSGYPIQLSAVNQNCNSRHTPLVDLPSYSWNHSKAYTAESRISKTYRQRRYPRLDLIGVFDVHSSVLEPRWRQVIRLSELPWLQDHKIQSSILYPVAGYIAMAIEAATQRNQMREMGNDILGYQFRDVAISSALTIPDMPGQVEVFITLRSFSESVRSPSNLWDEFSISSVNDENRWTEHCRGLISVLKSSKLSNLVNGKMQDASTIACQHDLREVFATCCKTEWDVKDMYEHFWETGMQYGPTFANLCDVRCTSNKCIGKVKVPDTAAVMPMKHEAPFIIHPGTLDSIIQTYLPALVQAGHLKSATIPVAIESMFISRNVTRQAGDLLTSYASSTRKDYRYFSTSMSVFADGPSSENQLVITIDDMTLVALDRPNSSEESGEALPLAFNLHWKPDVDMLTEEQLVEMINASTKVKDHIAAKKMKQTAAQLGKEILARVPFEQAQVVGESSRHLWKLLHASLESLSTPDHRGALDEISSLKNVDSTLAQAADRLSNVLTGRVAPSDVASMYDLMEAVRIPELYDNNLPTATYLHLLGHKKPSLRVLTVGPQSGPTSLNLLMLLAELGGGEIPFAVLHHSDAELNIDQTVRSRFPSWADSVGFRDVFNESGASQQNPPIVNETYDIVVAFNVLGSSPGFSKTLSAAAPLLNARGKILLVDNSHKSPMAALVWGPLPSFLSTWVDEKSADSPDVDCAVQSMGYDIYARLCPNVTVIQRAAQVQKAEKTIGLDVLVVTDGEPAGVDLQQLQTLCEDQYAEVHVASLEHARPRPGQACIVLSELSRPVLAAPTAAEWEAVKRITDTCSGIVWVTRGAADNVCSNPQVSLIQGFARTVRAEAGDKPITTLDLDNDKVLSAQAAAAYIAAVFQRMMQGGEDIDVELQERRGILHVARLIEDGDAAKQLQGEATAMELRLDQAGPCRLFAGTPGLLDSLHFTVDDRVQESLETGQIEVQVHATGINFKDVMMAMGQIAVEDLGCECSGVVSAVGDGVVGLRVGDRVACMGPGSFCTQLRVDARLAHRIPHHMELETAAALPITYVTAYHSIHNIAHLRHGETILIHAAAGGLGQALVELSQLVGARVLVTVGSTEKKRLIMQRFRLSEEDILFSRDTSFVHDVMRLTNGRGVDVIMNSLAGESLRQSWTCIAPNGRFVELGQRDITVNSRLDMAPFARNVSFTAYNLAYMLRHDPQAAHEVLAEVLALYDQGKLRGPEPLEKCTFSQLGNAFRKIQTGRHMGKMVAVANPDDMVWYKPPPASRRTLFRPDASYLLVGGVGGLGSATALWMSTRGARHLLLLNRSGADTEAARTTLATLRANGCTATVLACDVADKAQLSSVLAEARSNWPPIRGVIQGAMVLRDSMLANMTLEDYMAVVRPKVQGTWNLQTHLPADLDFFILESSISGIIGNPGQAAYAAANTFLDAFARWRRARCQPATVIDIGAVHGIGYLERNVDVKLSMERQGFAFTDEQLLMRLLEFAISHSSREPHRAQIVTGLGPWHPDTSLPGLNAPLFSRYRMLSCQNSTGSTDVDTLRGILAQSSSFDSAVTIVLSALVDQVVSRTEIPIENVHTTKSLQDYGIDSLVAVELRNWLIKDMDSVVPMLELLGAESLSALAVKIAARSQLISTNNRG

SEQ ID NO: 20616 - protein, 335 aa, Thermoplasma volcanium
MKAAILKKINEPVSIDDVDIPDPAENEVLIKQEYAGVCYRDLLAATGFFPRIALPMIQGHEIGGTVVKVGDKVEAFRPGDKVSSLIYIPCGKCEFCRSGNENLCPYKKSLGEEVQGGFRQYVNIPEISLVKAPNNVDGASLSLAACVTGMLYHALKRMGKAGEGKKVLITGAGGGVGIHAVEMAKAFGATVIAETTSPEKLDLLEKIGADYIVDGNSKFNEDVKKLGGADIVLECVGIYTFERSLRSLNNGGKMVIIGNVKPDPVSLPLGLIILKGNTIRGSISSTKKDVEEALNMVSKGMIKPIVGKEIDISQINEAYKLMKDKKSSGRIMIKF

SEQ ID NO: 20617 - protein, 2563 aa, Penicillium citrinum
MNNTPAVTATATATATATAMAGSACSNTSTPIAIVGMGCRFAGDATSPQKLWEMVERGGSAWSKVPSSRFNVRGVYHPNGERVGSTHVKGGHFIDEDPALFDAAFFNMTTEVASCMDPQYRLMLEVVYESLESAGITIDGMAGSNTSVFGGVMYHDYQDSLNRDPETVPRYFITGNSGTMLSNRISHFYDLRGPSVTVDTACSTTLTALHLACQSLRTGESDTAIVIGANLLLNPDVFVTMSNLGFLSPDGISYSFDPRANGYGRGEGIAALVIKALPNALRDQDPIRAVIRETALNQDGKTPAITAPSDVAQKSLIQECYDKAGLDMSLTSYVEAHGTGTPTGDPLEISAISAAFKGHPLHLGSVKANIGHTEAASGLASIIKVALALEKGLIPPNARFLQKNSKLMLDQKNIKIPMSAQDWPVKDGTRRASVNNFGFGGSNAHVILESYDRASLALPEDQVHVNGNSEHGRVEDGSKQSRIYVVRAKDEQACRRTIASLRDYIKSVADIDGEPFLASLAYTLGSRRSILPWTSVYVADSLGGLVSALSDESNQPKRANEKVRLGFVFTGQGAQWHAMGRELVNTFPVFKQAILECDGYIKQLGASWNFMEELHRDELTTRVNDAEYSLPLSTAIQIALVRLLWSWGIRPTGITSHSSGEAAAAYAAGALSARSAIGITYIRGVLTTKPKPALAAKGGMMAVGLGRSETNVYISRLNQEDGCVVVGCINSQCSVTVSGDLGAIEKLEKLLHADGIFTRKLKVTEAFHSSHMRPMADAFGASLRDLFNSDNNNDNPNADTSKGVLYSSPKTGSRMTDLKLLLDPTHWMDSMLQPVEFESSLREMCFDPNTKEKAVDVIIEIGPHGALGGPINQVMQDLGLKGTDINYLSCLSRGRSSLETMYRAATELISKGYGLKMDAINFPHGRKEPRVKVLSDLPAYPWNHQTRYWREPRGSRESKQRTHPPHTLIGSRESLSPQFAPKWKHVLRLSDIPWIRDHVVGSSIIFPGAGFISMAIEGFSQVCPPVAGASINYNLRDVELAQALIIPADAEAEVDLRLTIRSCEERSLGTKNWHQFSVHSISGENNTWTEHCTGLIRSESERSHLDCSTVEASRRLNLGSDNRSIDPNDLWESLHANGICHGPIFQNIQRIQNNGQGSFCRFSIADTASAMPHSYENRHIVHPTTLDSVIQAAYTVLPYAGTRMKTAMVPRRLRNVKISSSLADLEAGDALDAQASIKDRNSQSFSTDLAVFDDYDSGSSPSDGIPVIEIEGLVFQSVGSSFSDQKSDSNDTENACSSWVWAPDISLGDSTWLKEKLSTEAETKETELMMDLRRCTINFIQEAVTDLTNSDIQHLDGHLQKYFDWMNVQLDLARQNKLSPASCDWLSDDAEQKKCLQARVAGESVNGEMISRLGPQLIAMLRRETEPLELMMQDQLLSRYYVNAIKWSRSNAQASELIRLCAHKNPRSRILEIGGGTGGCTKLIVNALGNTKPIDRYDFTDVSAGFFESAREQFADWQDVMTFKKLDIESDPEQQGFECATYDVVVACQVLHATRCMKRTLSNVRKLLKPGGNLILVETTRDQLDLFFTFGLLPGWWLSEEPERKSTPSLTTDLWNTMLDTSGFNGVELEVRDCEDDEFYMISTMLSTARKENTTPDTVAESEVLLLHGALRPPSSWLESLQAAICEKTSSSPSINALGEVDTTGRTCIFLGEMESSLLGEVGSETFKSITAMLNNCNALLWVSRGAAMSSEDPWKALHIGLLRTIRNENNGKEYVSLDLDPSRNAYTHESLYAICNIFNGRLGDLSEDKEFEFAERNGVIHVPRLFNDPHWKDQEAVEVTLQPFEQPGRRLRMEVETPGLLDSLQFRDDEGREGKDLPDDWVEIEPKAFGLNFRDVMVAMGQLEANRVMGFECAGVITKLGGAAAASQGLRLGDRVCALLKGHWATRTQTPYTNVVRIPDEMGFPEAASVPLAFTTAYIALYTTAKLRRGERVLIHSGAGGVGQAAIILSQLAGAEVFVTAGTQAKRDFVGDKFGINPDHIFSSRNDLFVDGIKAYTGGLGVHVVLNSLAGQLLQASFDCMAEFGRFVEIGKKDLEQNSRLDMLPFTRDVSFTSIDLLSWQRAKSEEVSEALNHVTKLLETKAIGLIGPIQQHSLSNIEKAFRTMQSGQHVGKVVVNVSGDELVPVGDGGFSLKLKPDSSYLVAGGLGGIGKQICQWLVDHGAKHLIILSRSAKASPFITSLQNQQCAVYLHACDISDQDQVTKVLRLCEEAHAPPIRGIIQGAMVLKDALLSRMTLDEFNAATRPKVQGSWYLHKIAQDVDFFVMLSSLVGVMGGAGQANYAAAGAFQDALAHHRRAHGMPAVTIDLGMVKSVGYVAETGRGVADRLARIGYKPMHEKDVMDVLEKAILCSSPQFPSPPAAVVTGINTSPGAHWTEANWIQEQRFVGLKYRQVLHADQSFVSSHKKGPDGVRAQLSRVTSHDEAISIVLKAMTEKLMRMFGLAEDDMSSSKNLAGVGVDSLVAIELRNWITSEIHVDVSIFELMNGNTIAGLVELVVAKCS

SEQ ID NO: 20618 - protein, 338 aa, Neurospora crassa
MAPKTMKAVDIKNGKGSADNLFINPDTPLPQAQPGQALVKVKAFGLNRMDLIQREGHYPLPPQAPSTLGVEFSGTIESFGDGDHGDFNVGDEVFGLAYGGAYAEYIAVSSKMLLHKPAHLSFEQAAGVPETWITATQALHFVLGGIGEQGKTILWHAGASGVSIAGIQLSKLAGAKQIFATAGSADKCKFIENELGATAAFNYKEQDWVEEIMKKTDGRGVDLVVDFIGASYFQKNLDVVARDGRICMLGLMGGAVADKVDISKLLYKRARVEGSTLRSRDENYQGQLRDKLSEYLPKFESGELKIFIDTVLPFEEIVKAHKQLEANTTMGKIICTVS

SEQ ID NO: 20619 - protein, 3739 aa, Streptomyces venezuelae
MSTVNEEKYLDYLRRATADLHEARGRLRELEAKAGEPVAIVGMACRLPGGVASPEDLWRLVAGGEDAISEFPQDRGWDVEGLYDPNPEATGKSYAREAGFLYEAGEFDADFFGISPREALAMDPQQRLLLEASWEAFEHAGIPAATARGTSVGVFTGVMYHDYATRLTDVPEGIEGYLGTGNSGSVASGRVAYTLGLEGPAVTVDTACSSSLVALHLAVQALRKGEVDMALAGGVTVMSTPSTFVEFSRQRGLAPDGRSKSFSSTADGTSWSEGVGVLLVERLSDARRKGHRILAVVRGTAVNQDGASSGLTAPNGPSQQRVIRRALADARLTTSDVDVVEAHGTGTRLGDPIEAQAVIATYGQGRDGEQPLRLGSLKSNIGHTQAAAGVSGVIKMVQAMRHGVLPKTLHVEKPTDQVDWSAGAVELLTEAMDWPDKGDGGLRRAAVSSFGVSGTNAHVVLEEAPAAEETPASEATPAVEPSVGAGLVPWLVSAKTPAALDAQIGRLAAFASQGRTDAADPGAVARVLAGGRAEFEHRAVVLGTGQDDFAQALTAPEGLIRGTPSDVGRVAFVFPGQGTQWAGMGAELLDVSKEFAAAMAECESALSRYVDWSLEAVVRQAPGAPTLERVDVVQPVTFAVMVSLAKVWQHHGVTPQAVVGHSQGEIAAAYVAGALTLDDAARVVTLRSKSIAAHLAGKGGMISLALSEEATRQRIENLHGLSIAAVNGPTATVVSGDPTQIQELAQACEADGVRARIIPVDYASHSAHVETIESELAEVLAGLSPRTPEVPFFSTLEGAWITEPVLDGTYWYRNLRHRVGFAPAVETLATDEGFTHFIEVSAHPVLTMTLPETVTGLGTLRREQGGQERLVTSLAEAWTNGLTIDWAPVLPTATGHHPELPTYAFQRRHYWLHDSPAVQGSVQDSWRYRIDWKRLAVADASERAGLSGRWLVVVPEDRSAEAAPVLAALSGAGADPVQLDVSPLGDRQRLAATLGEALAAAGGAVDGVLSLLAWDESAHPGHPAPFTRGTGATLTLVQALEDAGVAAPLWCVTHGAVSVGRADHVTSPAQAMVWGMGRVAALEHPERWGGLIDLPSDADRAALDRMTTVLAGGTGEDQVAVRASGLLARRLVRASLPAHGTASPWWQADGTVLVTGAEEPAAAEAARRLARDGAGHLLLHTTPSGSEGAEGTSGAAEDSGLAGLVAELADLGATATVVTCDLTDAEAAARLLAGVSDAHPLSAVLHLPPTVDSEPLAATDADALARVVTAKATAALHLDRLLREAAAAGGRPPVLVLFSSVAAIWGGAGQGAYAAGTAFLDALAGQHRADGPTVTSVAWSPWEGSRVTEGATGERLRRLGLRPLAPATALTALDTALGHGDTAVTIADVDWSSFAPGFTTARPGTLLADLPEARRALDEQQSTTAADDTVLSRELGALTGAEQQRRMQELVREHLAVVLNHPSPEAVDTGRAFRDLGFDSLTAVELRNRLKNATGLALPATLVFDYPTPRTLAEFLLAEILGEQAGAGEQLPVDGGVDDEPVAIVGMACRLPGGVASPEDLWRLVAGGEDAISGFPQDRGWDVEGLYDPDPDASGRTYCRAGGFLDEAGEFDADFFGISPREALAMDPQQRLLLETSWEAVEDAGIDPTSLQGQQVGVFAGTNGPHYEPLLRNTAEDLEGYVGTGNAASIMSGRVSYTLGLEGPAVTVDTACSSSLVALHLAVQALRKGECGLALAGGVTVMSTPTTFVEFSRQRGLAEDGRSKAFAASADGFGPAEGVGMLLVERLSDARRNGHRVLAVVRGSAVNQDGASNGLTAPNGPSQQRVIRRALADARLTTADVDVVEAHGTGTRLGDPIEAQALIATYGQGRDTEQPLRLGSLKSNIGHTQAAAGVSGIIKMVQAMRHGVLPKTLHVDRPSDQIDWSAGTVELLTEAMDWPRKQEGGLRRAAVSSFGISGTNAHIVLEEAPVDEDAPADEPSVGGVVPWLVSAKTPAALDAQIGRLAAFASQGRTDAADPGAVARVLAGGRAQFEHRAVALGTGQDDLAAALAAPEGLVRGVASGVGRVAFVFPGQGTQWAGMGAELLDVSKEFAAAMAECEAALAPYVDWSLEAVVRQAPGAPTLERVDVVQPVTFAVMVSLAKVWQHHGVTPQAVVGHSQGEIAAAYVAGALSLDDAARVVTLRSKSIGAHLAGQGGMLSLALSEAAVVERLAGFDGLSVAAVNGPTATVVSGDPTQIQELAQACEADGVRARIIPVDYASHSAHVETIESELADVLAGLSPQTPQVPFFSTLEGAWITEPALDGGYWYRNLRHRVGFAPAVETLATDEGFTHFVEVSAHPVLTMALPETVTGLGTLRRDNGGQHRLTTSLAEAWANGLTVDWASLLPTTTTHPDLPTYAFQTERYWPQPDLSAAGDITSAGLGAAEHPLLGAAVALADSDGCLLTGSLSLRTHPWLADHAVAGTVLLPGTAFVELAFRAGDQVGCDLVEELTLDAPLVLPRRGAVRVQLSVGASDESGRRTFGLYAHPEDAPGEAEWTRHATGVLAARADRTAPVADPEAWPPPGAEPVDVDGLYERFAANGYGYGPLFQGVRGVWRRGDEVFADVALPAEVAGAEGARFGLHPALLDAAVQAAGAGRGVRRGHAAAVRLERDLLYAVGATALRVRLAPAGPDTVSVSAADSSGQPVFAADSLTVLPVDPAQLAAFSDPTLDALHLLEWTAWDGAAQALPGAVVLGGDADGLAAALRAGGTEVLSFPDLTDLVEAVDRGETPAPATVLVACPAAGPDGPEHVREALHGSLALMQAWLADERFTDGRLVLVTRDAVAARSGDGLRSTGQAAVWGLGRSAQTESPGRFVLLDLAGEARTAGDATAGDGLTTGDATVGGTSGDAALGSALATALGSGEPQLALRDGALLVPRLARAAAPAAADGLAAADGLAALPLPAAPALWRLEPGTDGSLESLTAAPGDAETLAPEPLGPGQVRIAIRATGLNFRDVLIALGMYPDPALMGTEGAGVVTATGPGVTHLAPGDRVMGLLSGAYAPVVVADARTVARMPEGWTFAQGASVPVVFLTAVYALRDLADVKPGERLLVHSAAGGVGMAAVQLARHWGVEVHGTASHGKWDALRALGLDDAHIASSRTLDFESAFRAASGGAGMDVVLNSLAREFVDASLRLLGPGGRFVEMGKTDVRDAERVAADHPGVGYRAFDLGEAGPERIGEMLAEVIALFEDGVLRHLPVTTWDVRRARDAFRHVSQARHTGKVVLTMPSGLDPEGTVLLTGGTGALGGIVARHVVGEWGVRRLLLVSRRGTDAPGAGELVHELEALGADVSVAACDVADREALTAVLDSIPAEHPLTAVVHTAGVLSDGTLPSMTAEDVEHVLRPKVDAAFLLDELTSTPGYDLAAFVMFSSAAAVFGGAGQGAYAAANATLDALAWRRRTAGLPALSLGWGLWAETSGMTGGLSDTDRSRLARSGATPMDSELTLSLLDAAMRRDDPALVPIALDVAALRAQQRDGMLAPLLSGLTRGSRVGGAPVNQRRAAAGGAGEADTDLGGRLAAMTPDDRVAHLRDLVRTHVATVLGHGTPSRVDLERAFRDTGFDSLTAVELRNRLNAATGLRLPATLVFDHPTPGELAGHLLDELATAAGGSWAEGTGSGDTASATDRQTTAALAELDRLEGVLASLAPAAGGRPELAARLRALAAALGDDGDDATDLDEASDDDLFSFIDKELGDSDF

SEQ ID NO: 20620 - protein, 7257 aa, Polyangium cellulosum
MTTRGPTAQQNPLKQAAIIIQRLEERLAGLAQAELERTEPIAIVGIGCRFPGGADAPEAFWELLDAERDAVQPLDMRWALVGVAPVEAVPHWAGLLTEPIDCFDAAFFGISPREARSLDPQHRLLLEVAWEGLEDAGIPPRSIDGSRTGVFVGAFTADYARTVARLPREERDAYSATGNMLSIAAGRLSYTLGLQGPCLTVDTACSSSLVAIHLACRSLRAGESDLALAGGVSALLSPDMMEAAARTQALSPDGRCRTFDASANGFVRGEGCGLVVLKRLSDAQRDGDRIWALIRGSAINHDGRSTGLTAPNVLAQETVLREALRSAHVEAGAVDYVETHGTGTSLGDPIEVEALRATVGPARSDGTRCVLGAVKTNIGHLEAAAGVAGLIKAALSLTHERIPRNLNFRTLNPRIRLEGSALALATEPVPWPRTDRPRFAGVSSFGMSGTNAHVVLEEAPAVELWPAAPERSAELLVLSGKSEGALDAQAARLREHLDMHPELGLGDVAFSLATTRSAMSHRLAVAVTSREGLLAALSAVAQGQTPAGAARCIASSSRGKLAFLFTGQGAQTPGMGRGLCAAWPAFREAFDRCVALFDRELDRPLREVMWAEAGSAESLLLDQTAFTQPALFAVEYALTALWRSWGVEPELLVGHSIGELVAACVAGVFSLEDGVRLVAARGRLMQGLSAGGAMVSLGAPEAEVAAAVAPHAASVSIAAVNGPEQVVIAGVEQAVQAIAAGFAARGARTKRLHVSHAFHSPLMEPMLEEFGRVAASVTYRRPSVSLVSNLSGKVVTDELSAPGYWVRHVREAVRFADGVKALHEAGAGTFVEVGPKPTLLGLLPACLPEAEPTLLASLRAGREEAAGVLEALGRLWAAGGSVSWPGVFPTAGRRVPLPTYPWQRQRYWIEAPAEGLGATAADALAQWFYRVDWPEMPRSSVDSRRARSGGWLVLADRGGVGEAAAAALSSQGCSCAVLHAPAEASAVAEQVTQALGGRNDWQGVLYLWGLDAVVEAGASAEEVAKVTHLAAAPVLALIQALGTGPRSPRLWIVTRGACTVGGEPDAAPCQAALWGMGRVAALEHPGSWGGLVDLDPEESPTEVEALVAELLSPDAEDQLAFRQGRRRAARLVAAPPEGNAAPVSLSAEGSYLVTGGLGALGLLVARWLVERGAGHLVLISRHGLPDREEWGRDQPPEVRARIAAIEALEAQGARVTVAAVDVADAEGMAALLAAVEPPLRGVVHAAGLLDDGLLAHQDAGRLARVLRPKVEGAWVLHTLTREQPLDLFVLFSSASGVFGSIGQGSYAAGNAFLDALADLRRTQGLAALSIAWGLWAEGGMGSQAQRREHEASGIWAMPTSRALAAMEWLLGTRATQRVVIQMDWAHAGAAPRDASRGRFWDRLVTATKEASSSAVPAVERWRNASVVETRSALYELVRGVVAGVMGFTDQGTLDVRRGFAEQGLDSLMAVEIRKRLQGELGMPLSATLAFDHPTVERLVEYLLSQALELQDRTDVRSVRLPATEDPIAIVGAACRFPGGVEDLESYWQLLTEGVVVSTEVPADRWNGADGRVPGSGEAQRQTYVPRGGFLREVETFDAAFFHISPREAMSLDPQQRLLLEVSWEAIERAGQDPSALRESPTGVFVGAGPNEYAERVQELADEAAGLYSGTGNMLSVAAGRLSFFLGLHGPTLAVDTACSSSLVALHLGCQSLRRGECDQALVGGVNMLLSPKTFALLSRMHALSPGGRCKTFSADADGYARAEGCAVVVLKRLSDAQRDRDPILAVIRGTAINHDGPSSGLTVPSGPAQEALLRQALAHAGVVPADVDFVECHGTGTALGDPIEVRALSDVYGQARPADRPLILGAAKANLGHMEPAAGLAGLLKAVLALGQEQIPAQPELGELNPLLPWEALPVAVARAAVPWPRTDRPRFAGVSSFGMSGTNAHVVLEEAPAVELWPAAPERSAELLVLSGKSEGALDAQAARLREHLDMHPELGLGDVAFSLATTRSAMNHRLAVAVTSREGLLAALSAVAQGQTPPGAARCIASSSRGKLAFLFTGQGAQTPGMGRGLCAAWPAFREAFDRCVALFDRELDRPLREVMWAEPGSAESLLLDQTAFTQPALFTVEYALTALWRSWGVEPELVAGHSAGELVAACVAGVFSLEDGVRLVAARGRLMQGLSAGGAMVSLGAPEAEVAAAVAPHAASVSIAAVNGPEQVVIAGVEQAVQAIAAGFAARGARTKRLHVSHASHSPLMEPMLEEFGRVAASVTYRRPSVSLVSNLSGKVVADELSAPGYWVRHVREAVRFADGVKALHEAGAGTFVEVGPKPTLLGLLPACLPEAEPTLLASLRAGREEAAGVLEALGRLWAAGGSVSWPGVFPTAGRRVPLPTYPWQRQRYWPDIEPDSRRHAAADPTQGWFYRVDWPEIPRSLQKSEEASRGSWLVLADKGGVGEAVAAALSTRGLPCVVLHAPAETSATAELVTEAAGGRSDWQVVLYLWGLDAVVGAEASIDEIGDATRRATAPVLGLARFLSTVSCSPRLWVVTRGACIVGDEPAIAPCQAALWGMGRVAALEHPGAWGGLVDLDPRASPPQASPIDGEMLVTELLSQETEDQLAFRHGRRHAARLVAAPPQGQAAPVSLSAEASYLVTGGLGGLGLIVAQWLVELGARHLVLTSRRGLPDRQAWCEQQPPEIRARIAAVEALEARGARVTVAAVDVADVEPMTALVSSVEPPLRGVVHAAGVSVMRPLAETDETLLESVLRPKVAGSWLLHRLLHGRPLDLFVLFSSGAAVWGSHSQGAYAAANAFLDGLAHLRRSQSLPALSVAWGLWAEGGMADAEAHARLSDIGVLPMSTSAALSALQRLVETGAAQRTVTRMDWARFAPVYTARGRRNLLSALVAGRDIIAPSPPAAATRNWRGLSVAEARVALHEIVHGAVARVLGFLDPSALDPGMGFNEQGLDSLMAVEIRNLLQAELDVRLSTTLAFDHPTVQRLVEHLLVDVLKLEDRSDTQHVRSLASDEPIAIVGAACRFPGGVEDLESYWQLLAEGVVVSAEVPADRWDAADWYDPDPEIPGRTYVTKGAFLRDLQRLDATFFRISPREAMSLDPQQRLLLEVSWEALESAGIAPDTLRDSPTGVFVGAGPNEYYTQRLRGFTDGAAGLYGGTGNMLSVTAGRLSFFLGLHGPTLAMDTACSSSLVALHLACQSLRLGECDQALVGGVNVLLAPETFVLLSRMRALSPDGRCKTFSADADGYARGEGCAVVVLKRLRDAQRAGDSILALIRGSAVNHDGPSSGLTVPNGPAQQALLRQALSQAGVSPVDVDFVECHGTGTALGDPIEVQALSEVYGPGRSGDRPLVLGAAKANVAHLEAASGLASLLKAVLALRHEQIPAQPELGELNPHLPWNTLPVAVPRKAVPWGRGARPRRAGVSAFGLSGTNVHVVLEEAPEVEPAPAAPARPVELVVLSAKSAAALDAAAARLSAHLSAHPELSLGDVAFSLATTRSPMEHRLAIATTSREALRGALDAAAQQKTPQGAVRGKAVSSRGKLAFLFTGQGAQMPGMGRGLYETWPAFREAFDRCVALFDREIDQPLREVMWAAPGLAQAARLDQTAYAQPALFALEYALAALWRSWGVEPHVLLGHSIGELVAACVAGVFSLEDAVRLVAARGRLMQALPAGGAMVAIAASEAEVAASVAPHAATVSIAAVNGPDAVVIAGAEVQVLALGATFAARGIRTKRLAVSHAFHSPLMDPMLEDFQRVAATIAYRAPDRPVVSNVTGHVAGPEIATPEYWVRHVRSAVRFGDGAKALHAAGAATFVEVGPKPVLLGLLPACLGEADAVLVPSLRADRSECEVVLAALGAWYAWGGALDWKGVFPDGARRVALPMYPWQRERHWMDLTPRSAAPAGIAGRWPLAGVGLCMPGAVLHHVLSIGPRHQPFLGDHLVFGKVVVPGAFHVAVILSIAAERWPERAIELTGVEFLKAIAMEPDQEVELHAVLTPEAAGDGYLFELATLAAPETERRWTTHARGRVQPTDGAPGALPRLEVLEDRAIQPLDFAGFLDRLSAVRIGWGPLWRWLQDGRVGDEASLATLVPTYPNAHDVAPLHPILLDNGFAVSLLSTRSEPEDDGTPPLPFAVERVRWWRAPVGRVRCGGVPRSQAFGVSSFVLVDETGEVVAEVEGFVCRRAPREVFLRQESGASTAALYRLDWPEAPLPDAPAERIEESWVVVAAPGSEMAAALATRLNRCVLAEPKGLEAALAGVSPAGVICLWEAGAHEEAPAAAQRVATEGLSVVQALRDRAVRLWWVTMGAVAVEAGERVQVATAPVWGLGRTVMQERPELSCTLVDLEPEADAARSADVLLRELGRADDETQVAFRSGKRRVARLVKATTPEGLLVPDAESYRLEAGQKGTLDQLRLAPAQRRAPGPGEVEIKVTASGLNFRTVLAVLGMYPGDAGPMGGDCAGVATAVGQGVRHVAVGDAVMTLGTLHRFVTVDARLVVRQPAGLTPAQAATVPVAFLTAWLALHDLGNLRRGERVLIHAAAGGVGMAAVQIARWIGAEVFATASPSKWAAVQAMGVPRTHIASSRTLEFAETFRQVTGGRGVDVVLNALAGEFVDASLSLLSTGGRFLEMGKTDIRDRAAVAAAHPGVRYRVFDILELAPDRTREILERVVEGFAAGHLRALPVHAFAITKAEAAFRFMAQARHQGKVVLLPAPSAAPLAPTGTVLLTGGLGALGLHVARWLAQQGVPHMVLTGRRGLDTPGAAKAVAEIEALGARVTIAASDVADRNALEAVLQAIPAEWPLQGVIHAAGALDDGVLDEQTTDRFSRVLAPKVTGAWNLHELTAGNDLAFFVLFSSMSGLLGSAGQSNYAAANTFLDALAAHRRAEGLAAQSLAWGPWSDGGMAAGLSAALQARLARHGMGALSPAQGTALLGQALARPETQLGAMSLDVRAASQASGAAVPPVWRALVRAEARHTAAGAQGALAARLGALPEARRADEVRKVVQAEIARVLSWSAASAVPVDRPLSDLGLDSLTAVELRNVLGQRVGATLPATLAFDHPTVDALTRWLLDKVLAVAEPSVSSAKSSPQVALDEPIAIIGIGCRFPGGVADPESFWRLLEEGSDAVVEVPHERWDIDAFYDPDPDVRGKMTTRFGGFLSDIDRFDPAFFGISPREATTMDPQQRLLLETSWEAFERAGILPERLMGSDTGVFVGLFYQEYAALAGGIEAFDGYLGTGTTASVASGRISYVLGLKGPSLTVDTACSSSLVAVHLACQALRRGECSVALAGGVALMLTPATFVEFSRLRGLAPDGRCKSFSAAADGVGWSEGCAMLLLKPLRDAQRDGDPILAVIRGTAVNQDGRSNGLTAPNGSSQQEVIRRALEQAGLAPADVSYVECHGTGTTLGDPIEVQALGAVLAQGRPSDRPLVIGSVKSNIGHTQAAAGVAGVIKVALALERGLIPRSLHFDAPNPHIPWSELAVQVAAKPVEWTRNGVPRRAGVSSFGVSGTNAHVVLEEAPAAAFAPAAARSAELFVLSAKSAAALDAQAARLSAHVVAHPELGLGDLAFSLATTRSPMTYRLAVAATSREALSAALDTAAQGQAPPAAARGHASTGSAPKVVFVFPGQGSQWLGMGQKLLSEEPVFRDALSACDRAIQAEAGWSLLAELAADETTSQLGRIDVVQPALFAIEVALSALWRSWGVEPDAVVGHSMGEVAAAHVAGALSLEDAVAIICRRSLLLRRISGQGEMAVVELSLAEAEAALLGYEDRLSVAVSNSPRSTVLAGEPAALAEVLAILAAKGVFCRRVKVDVASHSPQIDPLRDELLAALGELEPRQATVSMRSTVTSTIMAGPELVASYWADNVRQPVRFAEAVQSLMEDGHGLFVEMSPHPILTTSVEEIRRATKREGVAVGSLRRGQDERLSMLEALGALWVHGQAVGWERLFSAGGAGLRRVPLPTYPWQRERYWVDAPTGGAAGGSRFAHAGSHPLLGEMQTLSTQRSTRVWETTLDLKRLPWLGDHRVQGAVVFPGAAYLEMALSSGAEALGDGPLQVSDVVLAEALAFADDTPAAVQVMATEERPGRLQFHVASRVPGHGGAAFRSHARGVLRQIERAEVPARLDLAALRARLQASAPAAATYAALAEMGLEYGPAFQGLVELWRGEGEALGRVRLPEAAGSPAACRLHPALLDACFHVSSAFADRGEATPWVPVEIGSLRWFQRPSGELWCHARSVSHGKPTPDRRSTDFWVVDSTGAIVAEISGLVAQRLAGGVRRREEDDWFMEPAWEPTAVPGSEVMAGRWLLIGSGGGLGAALHSALTEAGHSVVHATGRGTSAAGLQALLTASFDGQAPTSVVHLGSLDERGVLDADAPFDADALEESLVRGCDSVLWTVQAVAGAGFRDPPRLWLVTRGAQAIGAGDVSVAQAPLLGLGRVIALEHAELRCARIDLDPARRDGEVDELLAELLADDAEEEVAFRGGERRVARLVRRLPETDCREKIEPAEGRPFRLEIDGSGVLDDLVLRATERRPPGPGEVEIAVEAAGLNFLDVMRAMGIYPGPGDGPVALGAECSGRIVAMGEGVESLRIGQDVVAVAPFSFGTHVTIDARMLAPRPAALTAAQAAALPVAFMTAWYGLVHLGRLRAGERVLIHSATGGTGLAAVQIARHLGAEIFATAGTPEKRAWLREQGIAHVMDSRSLDFAEQVLAATKGEGVDVVLNSLSGAAIDASLSTLVPDGRFIELGKTDIYADRSLGLAHFRKSLSYSAVDLAGLAVRRPERVAALLAEVVDLLARGALQPLPVEIFPLSRAADAFRKMAQAQHLGKLVLALEDPDVRIRVPGESGVAIRADGAYLVTGGLGGLGLSVAGWLAEQGAGHLVLVGRSGAVSAEQQTAVAALEAHGARVTVARADVADRAQMERILREVTASGMPLRGVVHAAGILDDGLLMQQTPARFRAVMAPKVRGALHLHALTREAPLSFFVLYASGAGLLGSPGQGNYAAANTFLDALAHHRRAQGLPALSIDWGLFADVGLAAGQQNRGARLVTRGTRSLTPDEGLWALERLLDGDRTQAGVMPFDVRQWVEFYPAAASSRRLSRLMTARRVASGRLAGDRDLLERLATAEAGARAGMLQEVVRAQVSQVLRLSEGKLDVDAPLTSLGMDSLMGLELRNRIEAVLGITMPATLLWTYPTVAALSAHLASHVVSTGDGESARPPDTGSVAPTTHEVASLDEDGLFALIDESLARAGKR

SEQ ID NO: 20621 - protein, 7257 aa, Polyangium cellulosum
MTTRGPTAQQNPLKQAAIIIQRLEERLAGLAQAELERTEPIAIVGIGCRFPGGADAPEAFWELLDAERDAVQPLDRRWALVGVAPVEAVPHWAGLLTEPIDCFDAAFFGISPREARSLDPQHRLLLEVAWEGLEDAGIPPRSIDGSRTGVFVGAFTADYARTVARLPREERDAYSATGNMLSIAAGRLSYTLGLQGPCLTVDTACSSSLVAIHLACRSLRAGESDLALAGGVSTLLSPDMMEAAARTQALSPDGRCRTFDASANGFVRGEGCGLVVLKRLSDAQRDGDRIWALIRGSAINHDGRSTGLTAPNVLAQETVLREALRSAHVEAGAVDYVETHGTGTSLGDPIEVEALRATVGPARSDGTRCVLGAVKTNIGHLEAAAGVAGLIKAALSLTHERIPRNLNFRTLNPRIRLEGSALALATEPVPWPRTDRPRFAGVSSFGMSGTNAHVVLEEAPAVELWPAAPERSAELLVLSGKSEGALDAQAARLREHLDMHPELGLGDVAFSLATTRSAMTHRLAVAVTSREGLLAALSAVAQGQTPAGAARCIASSSRGKLALLFTGQGAQTPGMGRGLCAAWPAFREAFDRCVTLFDRELDRPLREVMWAEAGSAESLLLDQTAFTQPALFAVEYALTALWRSWGVEPELLVGHSIGELVAACVAGVFSLEDGVRLVAARGRLMQGLSAGGAMVSLGAPEAEVAAAVAPHAAWVSIAAVNGPEQVVIAGVEQAVQAIAAGFAARGVRTKRLHVSHAFHSPLMEPMLEEFGRVAASVTYRRPSVSLVSNLSGKVVTDELSAPGYWVRHVREAVRFADGVKALHEAGAGTFLEVGPKPTLLGLLPACLPEAEPTLLASLRAGREEAAGVLEALGRLWAAGGSVSWPGVFPTAGRRVPLPTYPWQRQRYWIEAPAEGLGATAADALAQWFYRVDWPEMPRSSVDSRRARSGGWLVLADRGGVGEAAAAALSSQGCSCAVLHAPAEASAVAEQVTQALGGRNDWQGVLYLWGLDAVVEAGASAEEVGKVTHLATAPVLALIQAVGTGPRSPRLWIVTRGACTVGGEPDAAPCQAALWGMGRVAALEHPGSWGGLVDLDPEESPTEVEALVAELLSPDAEDQLAFRQGRRRAARLVAAPPEGNAAPVSLSAEGSYLVTGGLGALGLLVARWLVERGAGHLVLISRHGLPDREEWGRDQPPEVRARIAAIEALEAQGARVTVAAVDVADAEGMAALLAAVEPPLRGVVHAAGLLDDGLLAHQDAGRLARVLRPKVEGAWVLHTLTREQPLDLFVLFSSASGVFGSIGQGSYAAGNAFLDALADLRRTQGLAALSIAWGLWAEGGMGSQAQRREHEASGIWAMPTSRALAAMEWLLGTRATQRVVIQMDWAHAGAAPRDASRGRFWDRLVTVTKAASSSAVPAVERWRNASVVETRSALYELVRGVVAGVMGFTDQGTLDVRRGFAEQGLDSLMAVEIRKRLQGELGMPLSATLAFDHPTVERLVEYLLSQALELQDRTDVRSVRLPATEDPIAIVGAACRFPGGVEDLESYWQLLTEGVVVSTEVPADRWNGADGRGPGSGEAPRQTYVPRGGFLREVETFDAAFFHISPREAMSLDPQQRLLLEVSWEAIERAGQDPSALRESPTGVFVGAGPNEYAERVQDLADEAAGLYSGTGNMLSVAAGRLSFFLGLHGPTLAVDTACSSSLVALHLGCQSLRRGECDQALVGGVNMLLSPKTFALLSRMHALSPGGRCKTFSADADGYARAEGCAVVVLKRLSDAQRDRDPILAVIRGTAINHDGPSSGLTVPSGPAQEALLRQALAHAGVVPADVDFVECHGTGTALGDPIEVRALSDVYGQARPADRPLILGAAKANLGHMEPAAGLAGLLKAVLALGQEQIPAQPELGELNPLLPWEALPVAVARAAVPWPRTDRPRFAGVSSFGMSGTNAHVVLEEAPAVELWPAAPERSAELLVLSGKSEGALDAQAARLREHLDMHPELGLGDVAFSLATTRSAMNHRLAVAVTSREGLLAALSAVAQGQTPPGAARCIASSSRGKLAFLFTGQGAQTPGMGRGLCAAWPAFREAFDRCVALFDRELDRPLCEVMWAEPGSAESLLLDQTAFTQPALFTVEYALTALWRSWGVEPELVAGHSAGELVAACVAGVFSLEDGVRLVAARGRLMQGLSAGGAMVSLGAPEAEVAAAVAPHAAWVSIAAVNGPEQVVIAGVEQAVQAIAAGFAARGVRTKRLHVSHASHSPLMEPMLEEFGRVAASVTYRRPSVSLVSNLSGKVVTDELSAPGYWVRHVREAVRFADGVKALHEAGAGTFLEVGPKPTLLGLLPACLPEAEPTLLASLRAGREEAAGVLEALGRLWAAGGSVSWPGVFPTAGRRVPLPTYPWQRQRYWPDIEPDSRRHAAADPTQGWFYRVDWPEIPRSLQKSEEASRGSWLVLADKGGVGEAVAAALSTRGLPCVVLHAPAETSATAELVTEAAGGRSDWQVVLYLWGLDAVVGAEASIDEIGDATRRATAPVLGLARFLSTVSCSPRLWVVTRGACIVGDEPAIAPCQAALWGMGRVAALEHPGAWGGLVDLDPRASPPQASPIDGEMLVTELLSQETEDQLAFRHGRRHAARLVAAPPRGEAAPASLSAEASYLVTGGLGGLGLIVAQWLVELGARHLVLTSRRGLPDRQAWREQQPPEIRARIAAVEALEARGARVTVAAVDVADVEPMTALVSSVEPPLRGVVHAAGVSVMRPLAETDETLLESVLRPKVAGSWLLHRLLHGRPLDLFVLFSSGAAVWGSHSQGAYAAANAFLDGLAHLRRSQSLPALSVAWGLWAEGGMADAEAHARLSDIGVLPMSTSAALSALQRLVETGAAQRTVTRMDWARFAPVYTARGRRNLLSALVAGRDIIAPSPPAAATRNWRGLSVAEARMALHEVVHGAVARVLGFLDPSALDPGMGFNEQGLDSLMAVEIRNLLQAELDVRLSTTLAFDHPTVQRLVEHLLVDVLKLEDRSDTQHVRSLASDEPIAIVGAACRFPGGVEDLESYWQLLAEGVVVSAEVPADRWDAADWYDPDPEIPGRTYVTKGAFLRDLQRLDATFFRISPREAMSLDPQQRLLLEVSWEALESAGIAPDTLRDSPTGVFVGAGPNEYYTQRLRGFTDGAAGLYGGTGNMLSVAAGRLSFFLGLHGPTLAMDTACSSSLVALHLACQSLRLGECDQALVGGVNVLLAPETFVLLSRMRALSPDGRCKTFSADADGYARGEGCAVVVLKRLRDAQRAGDSILALIRGSAVNHDGPSSGLTVPNGPAQQALLRQALSQAGVSPVDVDFVECHGTGTALGDPIEVQALSEVYGPGRSEDRPLVLGAVKANVAHLEAASGLASLLKAVLALRHEQIPAQPELGELNPHLPWNTLPVAVPRKAVPWGRGARPRRAGVSAFGLSGTNVHVVLEEAPEVELVPAAPARPVELVVLSAKSAAALDAAAERLSAHLSAHPELSLGDVAFSLATTRSPMEHRLAIATTSREALRGALDAAAQRQTPQGAVRGKAVSSRGKLAFLFTGQGAQMPGMGRGLYEAWPAFREAFDRCVALFDRELDQPLREVMWAAPGLAQAARLDQTAYAQPALFALEYALAALWRSWGVEPHVLLGHSIGELVAACVAGVFSLEDAVRLVAARGRLMQALPAGGAMVAIAASEAEVAASVAPHAATVSIAAVNGPDAVVIAGAEVQVLALGATFAARGIRTKRLAVSHAFHSPLMDPMLEDFQRVAATIAYRAPDRPVVSNVTGHVAGPEIATPEYWVRHVRSAVRFGDGAKALHAAGAATFVEIGPKPVLLGLLPACLGEADAVLVPSLRADRSECEVVLAALGTWYAWGGALDWKGVFPDGARRVALPMYPWQRERHWMDLTPRSAAPAGIAGRWPLAGVGLCMPGAVLHHVLSIGPRHQPFLGDHLVFGKVVVPGAFHVAVILSIAAERWPERAIELTGVEFLKAIAMEPDQEVELHAVLTPEAAGDGYLFELATLAAPETERRWTTHARGRVQPTDGAPGALPRLEVLEDRAIQPLDFAGFLDRLSAVRIGWGPLWRWLQDGRVGDEASLATLVPTYPNAHDVAPLHPILLDNGFAVSLLATRSEPEDDGTPPLPFAVERVRWWRAPVGRVRCGGVPRSQAFGVSSFVLVDETGEVVAEVEGFVCRRAPREVFLRQESGASTAALYRLDWPEAPLPDAPAERMEESWVVVAAPGSEMAAALATRLNRCVLAEPKGLEAALAGVSPAGVICLWEPGAHEEAPAAAQRVATEGLSVVQALRDRAVRLWWVTTGAVAVEAGERVQVATAPVWGLGRTVMQERPELSCTLVDLEPEVDAARSADVLLRELGRADDETQVVFRSGERRVARLVKATTPEGLLVPDAESYRLEAGQKGTLDQLRLAPAQRRAPGPGEVEIKVTASGLNFRTVLAVLGMYPGDAGPMGGDCAGIVTAVGQGVHHLSVGDAVMTLGTLHRFVTVDARLVVRQPAGLTPAQAATVPVAFLTAWLALHDLGNLRRGERVLIHAAAGGVGMAAVQIARWIGAEVFATASPSKWAAVQAMGVPRTHIASSRTLEFAETFRQVTGGRGVDVVLNALAGEFVDASLSLLTTGGRFLEMGKTDIRDRAAVAAAHPGVRYRVFDILELAPDRTREILERVVEGFAAGHLRALPVHAFAITKAEAAFRFMAQARHQGKVVLLPAPSAAPLAPTGTVLLTGGLGALGLHVARWLAQQGAPHMVLTGRRGLDTPGAAKAVAEIEALGARVTIAASDVADRNALEAVLQAIPAEWPLQGVIHAAGALDDGVLDEQTTDRFSRVLAPKVTGAWNLHELTAGNDLAFFVLFSSMSGLLGSAGQSNYAAANTFLDALAAHRRAEGLAAQSLAWGPWSDGGMAAGLSAALQARLARHGMGALSPAQGTALLGQALARPETQLGAMSLDVRAASQASGAAVPPVWRALVRAEARHAAAGAQGALAARLGALPEARRADEVRKVVQAEIARVLSWGAASAVPVDRPLSDLGLDSLTAVELRNVLGQRVGATLPATLAFDHPTVDALTRWLLDKVLAVAEPSVSPAKSSPQVALDEPIAVIGIGCRFPGGVTDPESFWRLLEEGSDAVVEVPHERWDIDAFYDPDPDVRGKMTTRFGGFLSDIDRFEPAFFGISPREATTMDPQQRLLLETSWEAFERAGILPERLMGSDTGVFVGLFYQEYAALAGGIEAFDGYLGTGTTASVASGRISYVLGLKGPSLTVDTACSSSLVAVHLACQALRRGECSVALAGGVALMLTPATFVEFSRLRGLAPDGRCKSFSAAADGVGWSEGCAMLLLKPLRDAQRDGDPILAVIRGTAVNQDGRSNGLTAPNGSSQQEVIRRALEQAGLAPADVSYVECHGTGTTLGDPIEVQALGAVLAQGRPSDRPLVIGSVKSNIGHTQAAAGVAGVIKVALALERGLIPRSLHFDAPNPHIPWSELAVQVAAKPVEWTRNGAPRRAGVSSFGVSGTNAHVVLEEAPAAAFAPAAARSAELFVLSAKSAAALDAQAARLSAHVVAHPELGLGDLAFSLATTRSPMTYRLAVAATSREALSAALDTAAQGQAPPAAARGHASTGSAPKVVFVFPGQGSQWLGMGQKLLSEEPVFRDALSACDRAIQAEAGWSLLAELAADETTSQLGRIDVVQPALFAIEVALSALWRSWGVEPDAVVGHSMGEVAAAHVAGALSLEDAVAIICRRSLLLRRISGQGEMAVVELSLAEAEAALLGYEDRLSVAVSNSPRSTVLAGEPAALAEVLAILAAKGVFCRRVKVDVASHSPQIDPLRDELLAALGELEPRQATVSMRSTVTSTIVAGPELVASYWADNVRQPVRFAEAVQSLMEGGHGLFVEMSPHPILTTSVEEIRRATKREGVAVGSLRRGQDERLSMLEALGALWVHGQAVGWERLFSAGGAGLRRVPLPTYPWQRERYWVEAPTGGAASGSRFAHAGSHPLLGEMQTLSTQRSTRVWETTLDLKRLPWLGDHRVQGAVVFPGAAYLEMALSSGAEALGDGPLQVSDVVLAEALAFADDTPVAVQVMATEERPGRLQFHVASRVPGHGRAAFRSHARGVLRQTERAEVPARLDLAALRARLQASAPAAATYAALAEMGLEYGPAFQGLVELWRGEGEALGRVRLPEAAGSPAACRLHPALLDACFHVSSAFADRGEATPWVPVEIGSLRWFQRPSGELWCHARSVSHGKPTPDRRSTDFWVVDSTGAIVAEISGLVAQRLAGGVRRREEDDWFMEPAWEPTAVPGSEVTAGRWLLIGSGGGLGAALYSALTEAGHSVVHATGHGTSAAGLQALLTASFDGQAPTSVVHLGSLDERGVLDADAPFDADALEESLVRGCDSVLWTVQAVAGAGFRDPPRLWLVTRGAQAIGAGDVSVAQAPLLGLGRVIALEHAELRCARIDLDPARRDGEVDELLAELLADDAEEEVAFRGGERRVARLVRRLPETDCREKIEPAEGRPFRLEIDGSGVLDDLVLRATERRPPGPGEVEIAVEAAGLNFLDVMRAMGIYPGPGDGPVALGAECSGRIVAMGEGVESLRIGQDVVAVAPFSFGTHVTIDARMVAPRPAALTAAQAAALPVAFMTAWYGLVHLGRLRAGERVLIHSATGGTGLAAVQIARHLGAEIFATAGTPEKRAWLREQGIAHVMDSRSLDFAEQVLAATKGEGVDVVLNSLSGAAIDASLATLVPDGRFIELGKTDIYADRSLGLAHFRKSLSYSAVDLAGLAVRRPERVAALLAEVVDLLARGALQPLPVEIFPLSRAADAFRKMAQAQHLGKLVLALEDPDVRIRVPGESGVAIRADGTYLVTGGLGGLGLSVAGWLAEQGAGHLVLVGRSGAVSAEQQTAVAALEAHGARVTVARADVADRAQIERILREVTASGMPLRGVVHAAGILDDGLLMQQTPARFRAVMAPKVRGALHLHALTREAPLSFFVLYASGAGLLGSPGQGNYAAANTFLDALAHHRRAQGLPALSIDWGLFADVGLAAGQQNRGARLVTRGTRSLTPDEGLWALERLLDGDRTQAGVMPFDVRQWVEFYPAAASSRRLSRLVTARRVASGRLAGDRDLLERLATAEAGARAGMLQEVVRAQVSQVLRLPEGKLDVDAPLTSLGMDSLMGLELRNRIEAVLGITMPATLLWTYPTVAALSAHLASHVVSTGDGESARPPDTGNVAPMTHEVASLDEDGLFALIDESLARAGKR

SEQ ID NO: 20622 - protein, 1421 aa, Polyangium cellulosum
MADRPIERAAEDPIAIVGASCRLPGGVIDLSGFWTLLEGSRDTVGRVPAERWDAAAWFDPDPDAPGKTPVTRASFLSDVACFDASFFGISPREALRMDPAHRLLLEVCWEALENAAIAPSALVGTETGVFIGIGPSEYEAALPQATASAEIDAHGGLGTMPSVGAGRISYALGLRGPCVAVDTAYSSSLVAVHLACQSLRSGECSTALAGGVSLMLSPSTLVWLSKTRALARDGRCKAFSAEADGFGRGEGCAVVVLKRLSGARADGDRILAVIRGSAINHDGASSGLTVPNGSSQEIVLKRALADAGCAASSVGYVEAHGTGTTLGDPIEIQALNAVYGLGRDVATPLLIGSVKTNLGHPEYASGITGLLKVVLSLQHGQIPAHLHAQALNPRISWGDLRLTVTRARTPWPDWNTPRRAGVSSFGMSGTNAHVVLEEAPAATCTPPAPERPAELLVLSARTASALDAQAARLRDHLETYPSQCLGDVAFSLATTRSAMEHRLAVAATSREGLRAALDAAAQGQTSPGAVRSIADSSRGKLAFLFTGQGAQTLGMGRGLYDVWSAFREAFDLCVRLFNQELDRPLREVMWAEPASVDAALLDQTAFTQPALFTFEYALAALWRSWGVEPELVAGHSIGELVAACVAGVFSLEDAVFLVAARGRLMQALPAGGAMVSIEAPEADVAAAVAPHAASVSIAAVNAPDQVVIAGAGQPVHAIAAAMAARGARTKALHVSHAFHSPLMAPMLEAFGRVAESVSYRRPSIVLVSNLSGKACTDEVSSPGYWVRHAREVVRFADGVKALHAAGAGTFVEVGPKSTLLGLVPACMPDARPALLASSRAGRDEPATVLEALGGLWAVGGLVSWAGLFPSGGRRVPLPTYPWQRERYWIDTKADDAARGDRRAPGAGHDEVEEGGAVRGGDRRSARLDHPPPESGRREKVEAAGDRPFRLEIDEPGVLDHLVLRVTERRAPGLGEVEIAVDAAGLSFNDVQLALGMVPDDLPGKPNPPLLLGGECAGRIVAVGEGVNGLVVGQPVIALSAGAFATHVTTSAALVLPRPQALSAIEAAAMPVAYLTAWYALDRIARLQPGERVLIHAATGGVGLAAVQWAQHVGAEVHATAGTPEKRAYLESLGVRYVSDSRSDRFVADVRAWTGGEGVDVVLNSLSGELIDKSFNLLRSHGRFVELGKRDCYADNQLGLRPFLRNLSFSLVDLRGMMLERPARVRALLEELLGLIAAGVFTPPPIATLPIARVADAFRSMAQAQHLGKLVLTLGDPEVQIRIPTHAGAGPSTGDRDLLDRLASAAPAARAAALEAFLRTQVSQVLRTPEIKVGAEALFTRLGMDSLMAVELRNRIEASLKLKLSTTFLSTSPNIALLAQNLLDALATALSLERVAAENLRAGVQNDFVSSGADQDWEIIAL

SEQ ID NO: 20623 - protein, 1421 aa, Polyangium cellulosum
MADRPIERAAEDPIAIVGAGCRLPGGVIDLSGFWTLLEGSRDTVGQVPAERWDAAAWFDPDLDAPGKTPVTRASFLSDVACFDASFFGISPREALRMDPAHRLLLEVCWEALENAAIAPSALVGTETGVFIGIGPSEYEAALPRATASAEIDAHGGLGTMPSVGAGRISYVLGLRGPCVAVDTAYSSSLVAVHLACQSLRSGECSTALAGGVSLMLSPSTLVWLSKTRALATDGRCKAFSAEADGFGRGEGCAVVVLKRLSGARADGDRILAVIRGSAINHDGASSGLTVPNGSSQEIVLKRALADAGCAASSVGYVEAHGTGTTLGDPIEIQALNAVYGLGRDVATPLLIGSVKTNLGHPEYASGITGLLKVVLSLQHGQIPAHLHAQALNPRISWGDLRLTVTRARTPWPDWNTPRRAGVSSFGMSGTNAHVVLEEAPAATCTPPAPERPAELLVLSARTAAALDAHAARLRDHLETYPSQCLGDVAFSLATTRSAMEHRLAVAATSSEGLRAALDAAAQGQTPPGVVRGIADSSRGKLAFLFTGQGAQTLGMGRGLYDVWPAFREAFDLCVRLFNQELDRPLREVMWAEPASVDAALLDQTAFTQPALFTFEYALAALWRSWGVEPELVAGHSIGELVAACVAGVFSLEDAVFLVAARGRLMQALPAGGAMVSIAAPEADVAAAVAPHAASVSIAAVNGPDQVVIAGAGQPVHAIAAAMAARGARTKALHVSHAFHSPLMAPMLEAFGRVAESVSYRRPSIVLVSNLSGKAGTDEVSSPGYWVRHAREVVRFADGVKALHAAGAGTFVEVGPKSTLLGLVPACLPDARPALLASSRAGRDEPATVLEALGGLWAVGGLVSWAGLFPSGGRRVPLPTYPWQRERYWIDTKADDAARGDRRAPGAGHDEVEKGGAVRGGDRRSARLDHPPPESGRREKVEAAGDRPFRLEIDEPGVLDRLVLRVTERRAPGLGEVEIAVDAAGLSFNDVQLALGMVPDDLPGKPNPPLLLGGECAGRIVAVGEGVNGLVVGQPVIALSAGAFATHVTTSAALVLPRPQALSATEAAAMPVAYLTAWYALDGIARLQPGERVLIHAATGGVGLAAVQWAQHVGAEVHATAGTPEKRAYLESLGVRYVSDSRSDRFVADVRAWTGGEGVDVVLNSLSGELIDKSFNLLRSHGRFVELGKRDCYADNQLGLRPFLRNLSFSLVDLRGMMLERPARVRALFEELLGLIAAGVFTPPPIATLPIARVADAFRSMAQAQHLGKLVLTLGDPEVQIRIPTHAGAGPSTGDRDLLDRLASAAPAARAAALEAFLRTQVSQVLRTPEIKVGAEALFTRLGMDSLMAVELRNRIEASLKLKLSTTFLSTSPNIALLTQNLLDALATALSLERVAAENLRAGVQSDFVSSGADQDWEIIAL

SEQ ID NO: 20624 - protein, 2518 aa, Polyangium cellulosum
ILGSDARLASALEAAGAHVTRHRDPGAWIDAIRGGGAPEVVAVLACTTRPDAPSGALAATHGAAADALAALQAWLAEERLASCALVVLTERAVATRPDEDVLDLVHAPVWGLVRAAQVENPDRALILVDVDADDASLPALPALVAAAVARAADASEPQLALREGRRLVPRLGRLGGDDALVPPSAAAYRLHVAAKGTLESLALVPHEEATRPLAEGQIRVAVRAAGLNFRDALDALGMYPGDPGPLGAEGAGVVLEVGPGVTELAPGDRVMGLLSAAFGPIALADHRMVSRIPAGLSFVEAASIPVVFLTAYYGLVDLGRLRPGERVLVHAAAGGVGIAAVQLARHLGAEVFATASPPKWATLRALGLDDDHIASSRSGDFEAHFRRTSGGRGVDVVLDSLARELVDASLRLVALAPDGRFVEMGKSDVRDPLAVAASHPSVAYRAFDLAEAGPERIQAMLAELVALFERGVLRVPPITPCDLRRAPQAFRALAQARLVGKVVLTIPRALDPRGSVLVTGGTGTLGALVARHLVQRHGVRSLVLSSRRGPAAPGADDLRRELEAAGASVAIVACDAGDRLALERLLAGIPADRPLTAVVHAAGTLDDGVLTSLTPERLRSVMSAKVDAAAHLDELTRPLDLSAFVLFASLSGVLGSPGQANYAAANTFLDALAHQRRSRGLPAVSLDWGYWAERTGLTAHLGDTDLQRMARGGLRPLTTDDGLALFDAALAHVDAALVAAPFDPVALRAHAVAPILRGLVRAGAARRKLANNAASAAPLAQRLAGLAPKERERAMIDVVRPEIGVVLGLPPSRHLDGDRPLKELGLDSLMAVELRNRLAAIVGTRLPATLLFDYPTPTALARFLATALVGRGDAAAAPSAARAASAGASDDAIAIVAMACRFPGGVLTPEDLFRLLREGGDAISAFPENRGWDLDALSDGAARQGGFLHDADLFDAEFFGISPRETLALDPQQRLLLEMTWEALERAGIIPASLHGSKSGVFVGVFGSDYVARLLHGPSGAQAMESLRGYIGTGSASSVASGRIAYALGLEGPAISVDTACSSSLVALHLACHAIRRGECSLALAGGVTVMATPGIFGEFSAQHAGAPDGRCKSFSADANGAGWSEGAGIVLLERLSDARKNGHPVLAIVRGSAVNQDGKSQGLTAPNGPAQERVIRDALASAGLAPADVDAVEAHGTGTTLGDPIEARALFATYGAAHAKERPLWLGSLKSNLGHTQAAAGIGGVIKMVLALQSGVLPRTLHAASPSQHIDWSSGAIRLLTEEVPWKPGGSPRRAAVSSFGISGTNAHVVLEEAPRAAAGDDQAAEPARAPLAPPVPVLLSAKSDAALRAQAGKLHAHLAEHEDVALVDVAASLATTRSHFERRAAVVADDRAALLSALAALAEGRAGAGTVAGEALPPGKVAFVFPGQGSQWPSMARALLASSPAFRAEIEACERALAPHVDWSLLAVLGGDEAHAAPMLERVDVVQPVLFAVMIALAATWRAAGVTPDAVVGHSQGEIAAAYVAGALSLEDAARVVALRSRAITKLAGRGAMAAVELTTADLEARLAPFGGRLAIAAINSPHAALVSGDPDAIDELVAELSGAQLFARKVRVDYASHSAHVEAIERTLLEALDGIAPRPATVPLYSAVTGERLDGEALGAAHWYRNLRHTVRFEHATRALLDDGHRFFVEVSPHPVLTVALRDTIDASGHDAVACASLRRDEGDLARFNLSLAELHTRGLAVDWRAFFAPFAPRTVALPTYAFQRERFWLDAPKASGVIPAAASPAEARFWSAVEDGDVATVTDALDVGDDERRAALATLLPTLATWRRARRAQSTIDAWRYRVAWRALTAPPKGDIAGTWLVVAPEVAGALADGVARALEARGARGVLVPVDAEDAARTPLAGRLRAVAGGQAIRGVISFAALDERPAPLEPSVPLGLAVSLGLVQALGDAAIDAPLWLVTRGAVAVGASERVTRPLQAMTWGLGRVVALEHPERWGGLVDLGEESAPDANGARDANVHDRLANLVARRDDEDQLALRAAGTYVRRLVRAPHDGARPPAFAPRGAALVTGGTGALGAHVARWLARIGAEHIVLASRRGAAAPGAAALAEELSALGARVTLAACDVADREAVAALVRDVEAGGATVRAVFHAGGAMHEAPVAAMRVEELADAIAAKARGAQHLHDVFAQRPLDAFVLFSSGAGVWGGGRQGAYAAANAFLDALAEARRADGLAATSIAWGAWAGGGMLATDAERRLKHRGVAPMDPELAVAALAHALDHAETCLAVADVDWARFAPSFASARPRPLLDELAEARSALDALREPPDDARTAAGPEPASTLRTTLAALPEGERHRHLLALVRTETAAVLGHADASRVEPNRGFFDLGLDSLMSVELRRRVQRATGIKLPATLAFDHPTPSALASKVLAAIVLHDATPRASPAAELERLEGMLSAIYADEALRDDLTARLRAFLDKRAVRTERPDDAAFAEKLGSASADELIRLIDQKLGDRIDVDRY

SEQ ID NO: 20625 - protein, 2439 aa, Polyangium cellulosum
MATTNAGKLEHALLLMDKLAKKNASLEQERTEPIAIIGIGCRFPGGADTPEAFWELLDSGRDAVQPLDRRWALVGVHPSEEVPRWAGLLTEAVDGFDAAFFGTSPREARSLDPQQRLLLEVTWEGLEDAGIAPQSLDGSRTGVFLGACSSDYSHTVAQQRREEQDAYDITGNTLSVAAGRLSYTLGLQGPCLTVDTACSSSLVAIHLACRSLRARESDLALAGGVNMLLSSKTMIMLGRIQALSPDGHCRTFDASANGFVRGEGCGMVVLKRLSDAQRHGDRIWALIRGSAMNQDGRSTGLMAPNVLAQEALLRQALQSARVDAGAIDYVETHGTGTSLGDPIEVDALRAVMGPARADGSRCVLGAVKTNLGHLEGAAGVAGLIKAALALHHESIPRNLHFHTLNPRIRIEGTALALATEPVPWPRAGRPRFAGVSAFGLSGTNVHVVLEEAPATVLAPATPGRSAELLVLSAKSTAALDAQAARLSAHIAAYPEQGLGDVAFSLVATRSPMEHRLAVAATSREALRSALEAAAQGQTPAGAARGRAASSPGKLAFLFAGQGAQVPGMGRGLWEAWPAFRETFDRCVTLFDRELHQPLCEVMWAEPGSSRSSLLDQTAFTQPALFALEYALAALFRSWGVEPELIAGHSLGELVAACVAGVFSLEDAVRLVVARGRLMQALPAGGAMVSIAAPEADVAAAVAPHAASVSIAAVNGPEQVVIAGAEKFVQQIAAAFAARGARTKPLHVSHAFHSPLMDPMLEAFRRVTESVTYRRPSMALVSNLSGKPCTDEVCAPGYWVRHAREAVRFADGVKALHAAGAGIFVEVGPKPALLGLLPACLPDARPVLLPASRAGRDEAASALEALGGFWVVGGSVTWSGVFPSGGRRVPLPTYPWQRERYWIEAPVDGEADGIGRAQAGDHPLLGEAFSVSTHAGLRLWETTLDRKRLPWLGEHRAQGEVVFPGAGYLEMALSSGAEILGDGPIQVTDVVLIETLTFAGDTAVPVQVVTTEERPGRLRFQVASREPGARRASFRIHARGVLRRVGRAETPARLNLAALRARLHAAVPAAAIYGALAEMGLQYGPALRGLAELWRGEGEALGRVRLPESAGSATAYQLHPVLLDACVQMIVGAFADRDEATPWAPVEVGSVRLFQRSPGELWCHARVVSDGQQAPSRWSADFELMDGTGAVVAEISRLVVERLASGVRRRDADDWFLELDWEPAALEGPKITAGRWLLLGEGGGLGRSLCSALKAAGHVVVHAAGDDTSAAGMRALLANAFDGQAPTAVVHLSSLDGGGQLDPGLGAQGALDAPRSPDVDADALESALMRGCDSVLSLVQALVGMDLRNAPRLWLLTRGAQAAAAGDVSVVQAPLLGLGRTIALEHAELRCISVDLDPAQPEGEADALLAELLADDAEEEVALRGGERFVARLVHRLPEAQRREKIAPAGDRPFRLEIDEPGVLDQLVLRATGRRAPGPGEVEIAVEAAGLDSIDIQLAVGVAPNDLPGGEIEPSVLGSECAGRIVAVGEGVNGLVVGQPVIALAAGVFATHVTTSATLVLPRPLGLSATEAAAMPLAYLTAWYALDKVAHLQAGERVLIRAEAGGIGLCAVRWAQRVGAEVYATADTPEKRAYLESLGVRYVSDSRSGRFAADVHAWTDGEGVDVVLDSLSGEHIDKSLMVLRACGRLVKLGRRDDCADTQPGLPPLLRNFSFSQVDLRGMMLDQPARIRALLDELFGLVAAGAISPLGSGLRVGGSLTPPPVETFPISRAAEAFRRMAQGQHLGKLVLTLDDPEVRIRAPAESSVAVRADGTYLVTGGLGGLGLRVAGWLAERGAGQLVLVGRSGAASAEQRAAVAALEAHGARVTVAKADVADRSQIERVLREVTASGMPLRGVVHAAGLVDDGLLMQQTPARLRTVMGPKVQGALHLHTLTREAPLSFFVLYASAAGLFGSPGQGNYAAANAFLDALSHHRRAHGLPALSIDWGMFTEVGMAVAQENRGARLISRGMRGITPDEGLSALARLLEGDRVQTGVIPITPRQWVEFYPATAASRRLSRLVTTQRAVADRTAGDRDLLEQLASAEPSARAGLLQDVVRVQVSHVLRLPEDKIEVDAPLSSMGMDSLMSLELRNRIEAALGVAAPAALGWTYPTVAAITRWLLDDALAVRLGGGSDTDESTASAGSFVHVLRFRPVVKPRARLFCFHGSGGSPEGFRSWSEKSEWSDLEIVAMWHDRSLASEDAPGKKYVQEAASLIQHYADAPFALVGFSLGVRFVMGTAVELASRSGAPAPLAVFALGGSLISSSEITPEMETDIIAKLFFRNAAGFVRSTQQVQADARADKVITDTMVAPAPGDSKEPPSKIAVPIVAIAGSDDVIVPPSDVQDLQSRTTERFYMHLLPGDHEFLVDRGREIMHIVDSHLNPLLAARTTSSGPAFEAK

SEQ ID NO: 20626 - protein, 8817 aa, Polyangium cellulosum
MNNDEKLVSYLQQAMNELQRAHQRLRAVEEKEHEPIAIVAMSCRFPGDVRTPEDLWKLLLDGKDAISDLPPNRGWKLDALDVHGRSPVREGGFFYDADAFDPAFFGISPREALAIDPQQRLLLEISWEAFERAGIDPASLQGSQSGVFVGVIHNDYDALLENAAGEHKGFVATGSTASVASGRIAYTFGFQGPAISVDTACSSSLVAVHLACQALRRGECSLALAGGVTVMATPAVFVAFDSESAGAPDGRCKSFSVEANGSGWAEGAGMLLLERLSDAVQNGHPVLAVLRGSAVNQDGRSQGLTAPNGPAQERVIRQALDSARLTPKDVDVVEAHGTGTTLGDPIEAQAILATYGEAHSQDRPLWLGSLKSNLGHAQAAAGVGSVIKMVLALQQGLLPKTLHAQNPSPHIDWSPGTVKLLNEPVVWTTNGHPRHAGVSAFGISGTNAHVILEEAPAIARVEPAASQPASEPLPAAWPVLLSAKSEAAVRAQAKRLRDHLLAKSELALADVAYSLATTRAHFEQRAALLVKGRDELLSALDALAQGHSAAVLGRSGAPGKLAVLFTGQGSQRPTMGRGLYDVFPVFRDALDTVGAHLDRELDRPLRDVLFAPDGSEQAARLEQTAFTQPALFALEVALFQLLQSFGLKPALLLGHSIGELVAAHVAGVLSLQDGCTLVAARAKLMQALPQGGAMVTLRASEEEVRDLLQPYEGRASLAALNGPLSTVVAGDEDAVVEIARQAEALGRKTTRLRVSHAFHSPHMDGMLDDFRRVAQSLTYHPARIPIISNVTGARATDHELASPDYWVRHVRHTVRFLDGVRALHAEGARVFLELGPHAVLSALAQDALGQDEGTSPCAFLPTLRKGRDDAEAFTAALGALHSAGITPDWSAFFAPFAPRKVSLPTYAFQRERFWPDASKAPGADVSHLAPLEGGLWQAIERGDLDALSGQLHVDGDERRAALALLLPTLSSFRHERQEQSTVDAWRYRITWKPLTTAETPADLAGTWLVVVPAALDDDALPSALTEALTRRGARVLALRLSQAHLDREALAEHLRQACAETAPIRGVLSLLALDERPLADRPALPAGLALSLSLAQALGDLDLEAPLWFFTRGAVSIGHSDPLAHPAQAMTWGLGRVIGLEHPDRWGGLVDVCAGVDESAVGRLLPALAERHDEDQLALRPAGLYARRIVRAPLGDAPPARDFTPGGTILITGGTGAIGAHVARWLARRGAQHLVLISRRGAEAPGASELHDELSALGARTTLAACDVADRNAVATLLEQLDAEGSQVRAVFHASGIEHHAPLDATSFRDLAEVVSGKVEGAKHLHDLLGSRPLDAFVLFSSGAAVWGGGQQGGYAAANAFLDALAEHRRSAGLTATSVAWGAWGGGGMATDQAAAHLQQRGLSRMAPSLALAALALALEHDETTVTVADIDWARFAPSFSAARPRPLLRDLPEAQRALETSEGASSEHGPAPDLLDKLRSRSESEQLRLLVSLVRHETALVLGHEGASHVDPDKGFLDLGLDSLMAVELRRRLQQATGIKLPATLAFDHPSPHRVALFLRDSLAHALGTRLSVEPDAAALPALRAASDEPIAIVGMALRLPGGVGDVDALWEFLAQGRDGVEPIPKARWDAAALYDPDPDAKTKSYVRHAAMLDQVDLFDPAFFGISPREAKHLDPQHRLLLESAWQALEDAGIVPPTLKDSPTGVFVGIGASEYALREASTEDSDAYALQGTAGSFAAGRLAYTLGLQGPALSVDTACSSSLVALHLACQALRQGECNLALAAGVSVMASPEGFVLLSRLRALAPDGRSKTFSANADGYGRGEGVIVLALERLGDALARGHRVLALVRGTAINHDGASSGITAPNGTSQQKVLRAALHDARITPADVDVVECHGTGTSLGDPIEVQALAAVYADGRPAEKPLLLGALKTNIGHLEAASGLAGVAKIVASLRHDALPPTLHTGPRNPLIDWDTLAIDVVDTPRSWARHEDSSPRRAGVSAFGLSGTNAHVILEEAPAALSGEPATSQTASRPLPAACAVLLSARSEAAVRAQAKRLRDHLLAHDDLALIDVAYSQATTRAHFEHRAALLARDRDELLSALDSLAQDKPAPSTVLGRSGSHGKVVFVFPGQGSQWEGMALSLLDSSPVFRAQLEACERALAPHVEWSLLAVLRRDEGAPSLDRVDVVQPALFAVMVSLAALWRSLGVEPAAVVGHSQGEIAAAFVAGALSLEDAARIAALRRKALTTVGGNGGMAAVELGASDLQTYLAPWGDRLSTAAVNSPRATLVSGEPAAVDALLDVLTATKVFARKIRVDYASHSAQMDAVQDELAAGLANIAPRTCELPLYSTVTGTRLDGSELDGAYWYRNLRQTVLFSSATERLLDDGHRFSVEVSPHPVLTLALRETCERSPLDPVVVGSIRREEGHLARLLLSWAELSTRGLALDWKDFFAPYAPRKVSLPTYPFQRERFWLDVSTDERFRRRLRRPDLGRPIPLLGAAVAFADRGGFLFTGRLSLAEHPWLEGHAVFGTPILPGTGFLELALHVAHRVGLDTVEELTLEAPLALPSQDTVLLQISVGPVDDAGRRALSFHSRQEDALQDGPWTRHASGSLSPATPSLSADLHEWPPSSAIPVDLEGLYATLANLGLAYGPEFQGLRSVYKRGDELFAEAKLPEAAEKDAARFALHPALLDSALHALAFEDEQRGTVALPFSWSGVSLRSVGATTLRVRFHRPKGESSVSIVLADAAGDPLASVQALAMRTTSAAQLRTPAASHHDALFRVDWSELQSPTSPPAAPSGVLLGTGGHDLALDAPLARYADLAALRSALDQGASPPGLVVAPFIDRPAGDLVPSAHEATALALALLQAWLADERLASSRLVLVTRRAVATHTEDDVKDLAHAPLWGLARSAQSEHPDLPLFLVDIDLSEASQQALLGALDTGERQLALRNGKPLIPRLAQPRSTDALIPPQAPTWRLHIPTKGTFDALALVDAPEAQAPLAHGQVRIAVHAAGLNFRDVVDTLGMYPGDAPPLGGEGAGIVTEVGPGVSRYTVGDRVMGVFGAAFGPTAIADARMICPIPHAWSFAQAASVPIIYLTAYYGLVDLGHLKPNQRVLIHAAAGGVGTAAVQLARHLGAEVFATASPGKWSALRALGFDDAHLASSRDLGFEQHFLRSTHGRGMDVVLDCLAREFVDASLRLMPSGGRFIEMGKTDIREPDAIGLAYPGVVYRAFDVTEAGPDRIGQMLAELLSLFERGVLRLPPITSWDIRHAPQAFRALAQARHVGKFVLTIPRPIDPEGTVLITGGTGTLGVLVARHLVAKHSAKHLLLTSRKGARAPGAEALRSELEALGASVTLVACDVADPRALRTLLDSIPRDHPITAVVHAAGALDDGPLGSMSAERIARVFDPKLDAAWYLHELTQDEPVAAFVLFSAASGVLGGPGQSNYAAANAFLDALAHHRRAQGLPAASLAWGYWAERSGMTRHLSAADAARMRRAGVRPLDTDEALSLFDVALLRPEPALVPAPFDYNVLSTSADGVPPLFQRLVRARIARKAASNTALASSLAEHLSSLPPAERERVLLDLVRTEAASVLGLASFESLDPHRPLQELGLDSLMALELRNRLAAAAGLRLQATLLFDYPTPTALSRFFTTHLFGGTTHRPGVPLTPGGSEDPIAIVAMSCRFPGDVRTPEDLWKLLLDGQDAISGFPQNRGWSLDALDAPGRFPVREGGFVYDADAFDPAFFGISPREALAVDPQQRILLEITWEAFERAGIDPASLQGSQSGVFVGVWQSDYHASLVNATGEYKGLVATGSAASVASGRIAYTFGLQGPAISVDTACSSSLVAVHLACQALRHGECSLALAGGVTIMATPGIFIAFDSESAGAPDGRCKAFSAEADGSGWAEGAGMLLLERLSDAVQNGHPVLAVLRGSAVNQDGRSQGLTAPNGPAQERVIRQALDSARLTPKDVDVVEAHGTGTTLGDPIEAQAVFATYGEAHSQDRPLWLGSLKSNLGHTQAAAGVGGIIKMVLALQHGLLPKTLHAQNPSPHIDWSPGIVKLLNEAVAWTTSGHPRRAGVSSFGVSGTNAHVILEEAPAATRAESGASQPASQPLPAAWPVVLSARSEAAVRAQAQRLREHLLAQGDLTLADVAYSLATTRAHFEHRAALVAHDRDELLSALDSLAQDKPAPSTVLGRSGSHGKVVFVFPGQGSQWEGMALSLLDSSPVFRTQLEACERALRPHVEWSLLAVLRRDEGAPSLDRVDVVQPALFAVMVSLAALWRSLGVEPAAVVGHSQGEIAAAFVAGALSLEDAARIAALRSKASPPSPATGMAAVELGASDLQTYLAPWGDRLSIAAVNSPRATLVSGEPAAVDALIDSLTAAQVFARRVRVDYASHSAQMDAVQDELAAGLANIAPRTCELPLYSTVTGTRLDGSELDGAYWYRNLRQTVLFSSATERLLDDGHRFFVEVSPHPVLTLALRETCERSPLDPVVVGSIRRDEGHLPRLLALLGRALWPGLTPEWKAFFAPFAPRKVSLPTYAFQRERFWLDAPNAHPEGVAPAAPIDGRFWQAIERGDLDALSGQLHADGDEQRAALALLLPTLSSFHHQRQEQSTVDTWRYRITWRPLTTAATPADLAGTWLLVVPSALGDDALPATLTDALTRRGARVLALRLSQVHIGRAALTEHLREAVAETAPIRGVLSLLALDERPLADHAALPAGLALSLALVQALGDLALEAPLWLFTRGAVSIGHSDPLAHPTQAMIWGLGRVVGLEHPERWGGLVDLGAALDASAAGRLLPALAQRHDEDQLALRPAGLYARRFVRAPLGDAPAARGFMPRGTILITGGTGAIGAHVARWLARKGAEHLVLISRRGAQAEGAVELHAELTALGARVTFAACDVADRSAVATLLEQLDAGGPQVSAVFHAGGIEPHAPLAATSMEDLAEVVSGKVQGARHLHDLLGSRPLDAFVLFSSGAVVWGGGQQGGYAAANAFLDALAEQRRSLGLTATSVAWGVWGGGGMATGLLAAQLEQRGLSPMAPSLAVATLALALEHDETTLTVADIDWARFAPSFSAARSRPLLRDLPEAQRALEASADASSEQDGATGLLDKLRNRSESEQIHLLSSLVRHEAALVLGHTDASQVDPHKGFMDLGLDSLMTVELRRRLQQATGIKLPATLAFDHPSPHRVALFLRDSLAHALGARLSVERDAAALPALRSASDEPIAIVGMALRLPGGIGDVDALWEFLAQGRDAVEPIPHARWDAGALYDPDPDAKAKSYVRHAAMLDQVDLFDPAFFGISPREAKYLDPQHRLLLESAWLALEDAGIVPSTLKDSPTGVFVGIGASEYALRNTSSEEVEAYALQGTAGSFAAGRLAYTLGLQGPALSVDTACSSSLVALHLACQALRQGECNLALAAGVSVMASPGLFVVLSRMRALAPDGRSKTFSTNADGYGRGEGVVVLALERLGDALARGHRVLALVRGTAMNHDGASSGITAPNGTSHQKVLRAALHDAHIGPADVDVVECHGTGTSLGDPIEVQALAAVYADGRPAEKPLLLGALKTNIGHLEAASGLAGVAKIVASLRHDALPPTLHTTPRNPLIEWDALAIDVVDATRAWARHEDGSPRRAGVSAFGLSGTNAHVILEEAPAIPQAEPTAAQLASQPLPAAWPVLLSARSEPAVRAQAQRLRDHLLAHDDLALADVAYSLATTRATFEHRAALVVHDREELLSALDSLAQGRPAPSTVVERSGSHGKVVFVFPGQGSQWEGMALSLLDTSPVFRAQLEACERALAPHVDWSLLAVLRGEEGAPPLDRVDVVQPALFSMMVSLAALWRSMGVEPDAVVGHSQGEIAAACVAGALSLEDAAKLVALRSRALVELAGQGAMAAVELPEAEVARRLQRYGDRLSIGAINSPRFTTISGEPPAVAALLRDLESEGVFALKLSYDFASHSAQVESIRDELLDLLSWLEPRSTAVPFYSTVSGAAIDGSELDAAYWYRNLRQPVRFADAVQGLLAGEHRFFVEVSPSPVLTLALHELLEASERSAAVVGSLWSDEGDLRRFLVSLSELYVNGFALDWTTILPPGKRVPLPTYPFQRERFWLDASTAPAAGVNHLAPLEGRFWQAIESGNIDALSGQLHVDGDEQRAALALLLPTLASFRHERQEQGTVDAWRYRITWKPLTTATTPADLAGTWLLVVPAALDDDALPSALTEALARRGARVLAVRLSQAHLDREALAEHLRQACAETAPPRGVLSLLALDESPLADHAAVPAGLAFSLTLVQALGDIALDAPLWLFTRGAVSVGHSDPIAHPTQAMTWGLGRVVGLEHPERWGGLVDVGAAIDASAVGRLLPVLALRNDEDQLALRPAGFYARRLVRAPLGDAPPARTFKPRGTLLITGGTGAAGAHVARWLAREGAEHLVLISRRGAQAEGASELHAELTALGARVTFAACDVADRSAVATLLEQLDAEGSQVRAVFHAGGIGRHAPLAATSLMELADVVSAKVLGAGNLHDLLGPRPLDAFVLFSSIAGVWGGGQQAGYAAGNAFLDALADQRRSLGQPDTSVVWGAWGGGGGIFTGPLAAQLEQRRLSPMAPSLAVAALAQALEHDETTVTVADIDWARFAPSISVARSRRSCATCPSSAPSKTEKARPPPSTARPPDLLDKLRSRSESEQLRLLAALVCDETALVLGHEGRFPARPRQGFFDLGLDSIMTVELRRRLQQATGIKLPATLAFDHPSPHRVALFMRDSLAHALGTRLSAEATPPRSGRASSDEPIAIVGMALRLPGGVGDVDALWEFLHQGRDAVEPIPQSRWDAGALYDPDPDADAKSYVRHAAMLDQIDLFDPAFFGISPREAKHLDPQHRLLLESAWLALEDAGIVPTSLKDSLTGVFVGICAGEYAMQEASSEGSEVYFIQGTSASFGAGGLAYTLGLQGPRSSVDTACSSSLVSLHLACQALRQGECNLALAAGVSLMVSPQTFVILSRLRALAPDGRSKTFSDNADGYGRGEGVVVLALERIGDALARRHRVLVLVRGTAINHDGASSGITAPNGTSQQKVLRAALHDARITPADVDVVECHGTGTSLGDPIEVQALAAVYADGRPAEKPLLLGALKTNIGHLEAASGLAGVAKMVASLRHDALPPTLHATPRNPLIEWEALAIDVVDTPRPWPRHEDGSPRRAGISAFGFSGTNAHVILEEAPAALPAEPATSQPASQAAPAAWPVLLSARSEAAVRAQAKRLRDHLVAHDDLTLADVAYSLATTRAHFEHRAALVAHNRDELLSALDSLAQDKPAPSTVLGRSGSHGKLVFVFPGQGSQWEGMALSLLDSSPVFRAQLEACERALAPHVEWSLLAVLRRDEGAPSLDRVDVVQPALFAVMVSLAALWRSLGVEPAAVVGHSQGEIAAAFVAGALSLEDAARIAALRSKALTTVAGNGAMAAVELGASDLQTYLAPWGDRLSIAAVNSPRATLVSGEPAAIDALIDSLTAAQVFARKVRVDYASHSAQMDAVQDELAAGLANIAPRTCELPLYSTVTGTRLDGSELDGAYWYRNLRQTVLFSSATERLLDDGHRFFVEVSPHPVLTLALRETCERSPLDPVVVGSIRRDEGHLARLLLSWAELSTRGLALDWNAFFAPFAPRKVSLPTYPFQRERFWLDASTAHAADVASAGLTSADHPLLGAAVALADRDGFVFTGRLSLAEHPWLEDHVVFGIPCPARRRLLELALHVAHLVGLDTVEDVTLDPPLALPSQGAVLLQISVGPADGAGRRALSVHSRRHDALQDGPWTRHASGSLAQASPSHCLRCSANGPPSGATQVDTQGFYAALESAGLAYGPEFQGLRRRLQARRRALRRSQAPGRRRRGRRSFCPPPRPARQRLAGARLCRRPGKGLQDALLVERSIAALRSEPPPCACVSTVLRANPRARSSSPTPEANPSPRCKRSPCAPRPPSSSADPGASHLDALFRIDWSELQSPTSPPIAPSGALLGTEGLDLGTRVPLDRYTDLAALRSALDQGASPPSLVIAPFIALPEGDLIASARETTAHALALLQAWLADERLASSRLALVTRRAVATHAEEDVKGLAHAPLWGLARSAQSEHPERPLVLVDLDDSEASQHALLGALDAREPEIALRNGKPLVPRLSRLPQAPTDTASPAGLGGTVLITGGTGTLGALVARRLVVNHDAKHLLLTSRQGASAPGADVLRSELEALGASVTLAACDVADPRALKDLLDNIPSAHPVAAVVHAASVLDGDLLGAMSLERIDRVFAPKIDAAWHLHQLTQDKPLAAFILFSSVAGVLGSSGHSNYAAASAFLDALAHHRRAQGLPASSLAWSHWAERSAMTEHVSAAGAPRMERAGLPSTSEERLALFDAALFRTETALVPARFDLSALRANAGSVPPLFQRLVRARTVRKAASNTAQASSLTERLSALPPAERERALLDLIRTEAAAVLGLASFESLDPDRLLQELGLDSIIALDLRNRLAAATGVRLPATLLFEHPTPAALAALLLARLEPGMRRGPAKDGASPTDTESDGALLGMVQPANEIGAIEEARNLIAAALKVRLAVEDASKRSAVAIAEEPPTRLARGQATPQLICFPAFVVPSAPIQYARFASHLRDRRDIWFIPHPGYRHKTPLTRSLDELVSSHARTTLACARNSPFVLFGHSSGGNIAHMVAEHLESIGHGPAGVVLLDSYDYASPAVEAGLKIFHVEQLQTWGASDAGLTAEAWYYEHIGLETWKPRQLAAPTLHVRATEPMKQFVGSEGAPAEWRASWKLPHVAIDAPGDHATVVDHPFLAQAVDDWLSSLSNEPSNQ

SEQ ID NO: 20627 - protein, 2439 aa, Polyangium cellulosum
MATTNAGKLEHALLLMDKLAKKNASLEQERTEPIAIVGIGCRFPGGADTPEAFWELLDSGRDAVQPLDRRWALVGVHPSEEVPRWAGLLTEAVDGFDAAFFGTSPREARSLDPQQRLLLEVTWEGLEDAGIAPQSLDGSRTGVFLGACSSDYSHTVAQQRREEQDAYDITGNTLSVAAGRLSYTLGLQGPCLTVDTACSSSLVAIHLACRSLRARESDLALAGGVNMLLSSKTMIMLGRIQALSPDGHCRTFDASANGFVRGEGCGMVVLKRLSDAQRHGDRIWALIRGSAMNQDGRSTGLMAPNVLAQEALLREALQSARVDAGAIGYVETHGTGTSLGDPIEVEALRAVLGPARADGSRCVLGAVKTNLGHLEGAAGVAGLIKAALALHHELIPRNLHFHTLNPRIRIEGTALALATEPVPWPRAGRPRFAGVSAFGLSGTNVHVVLEEAPATVLAPATPGRSAELLVLSAKSAAALDAQAARLSAHIAAYPEQGLGDVAFSLVSTRSPMEHRLAVAATSREALRSALEVAAQGQTPAGAARGRAASSPGKLAFLFAGQGAQVPGMGRGLWEAWPAFRETFDRCVTLFDRELHQPLCEVMWAEPGSSRSSLLDQTAFTQPALFALEYALAALFRSWGVEPELVAGHSLGELVAACVAGVFSLEDAVRLVVARGRLMQALPAGGAMVSIAAPEADVAAAVAPHAALVSIAAVNGPEQVVIAGAEKFVQQIAAAFAARGARTKPLHVSHAFHSPLMDPMLEAFRRVTESVTYRRPSIALVSNLSGKPCTDEVSAPGYWVRHAREAVRFADGVKALHAAGAGLFVEVGPKPTLLGLVPACLPDARPVLLPASRAGRDEAASALEALGGFWVVGGSVTWSGVFPSGGRRVPLPTYPWQRERYWIEAPVDREADGTGRARAGGHPLLGEVFSVSTHAGLRLWETTLDRKRLPWLGEHRAQGEVVFPGAGYLEMALSSGAEILGDGPIQVTDVVLIETLTFAGDTAVPVQVVTTEERPGRLRFQVASREPGERRAPFRIHARGVLRRIGRVETPARSNLAALRARLHAAVPAAAIYGALAEMGLQYGPALRGLAELWRGEGEALGRVRLPEAAGSATAYQLHPVLLDACVQMIVGAFADRDEATPWAPVEVGSVRLFQRSPGELWCHARVVSDGQQASSRWSADFELMDGTGAVVAEISRLVVERLASGVRRRDADDWFLELDWEPAALGGPKITAGRWLLLGEGGGLGRSLCSALKAAGHVVVHAAGDDTSTAGMRALLANAFDGQAPTAVVHLSSLDGGGQLGPGLGAQGALDAPRSPDVDADALESALMRGCDSVLSLVQALVGMDLRNAPRLWLLTRGAQAAAAGDVSVVQAPLLGLGRTIALEHAELRCISVDLDPAEPEGEADALLAELLADDAEEEVALRGGDRLVARLVHRLPDAQRREKVEPAGDRPFRLEIDEPGALDQLVLRATGRRAPGPGEVEISVEAAGLDSIDIQLALGVAPNDLPGEEIEPLVLGSECAGRIVAVGEGVNGLVVGQPVIALAAGVFATHVTTSATLVLPRPLGLSATEAAAMPLAYLTAWYALDKVAHLQAGERVLIHAEAGGVGLCAVRWAQRVGAEVYATADTPENRAYLESLGVRYVSDSRSGRFVTDVHAWTDGEGVDVVLDSLSGERIDKSLMVLRACGRLVKLGRRDDCADTQPGLPPLLRNFSFSQVDLRGMMLDQPARIRALLDELFGLVAAGAISPLGSGLRVGGSLTPPPVETFPISRAAEAFRRMAQGQHLGKLVLTLDDPEVRIRAPAESSVAVRADGTYLVTGGLGGLGLRVAGWLAERGAGQLVLVGRSGAASAEQRAAVAALEAHGARVTVAKADVADRSQIERVLREVTASGMPLRGVVHAAGLVDDGLLMQQTPARFRTVMGPKVQGALHLHTLTREAPLSFFVLYASAAGLFGSPGQGNYAAANAFLDALSHHRRAQGLPALSIDWGMFTEVGMAVAQENRGARQISRGMRGITPDEGLSALARLLEGDRVQTGVIPITPRQWVEFYPATAASRRLSRLVTTQRAVADRTAGDRDLLEQLASAEPSARAGLLQDVVRVQVSHVLRLPEDKIEVDAPLSSMGMDSLMSLELRNRIEAALGVAAPAALGWTYPTVAAITRWLLDDALVVRLGGGSDTDESTASAGSFVHVLRFRPVVKPRARLFCFHGSGGSPEGFRSWSEKSEWSDLEIVAMWHDRSLASEDAPGKKYVQEAASLIQHYADAPFALVGFSLGVRFVMGTAVELASRSGAPAPLAVFTLGGSLISSSEITPEMETDIIAKLFFRNAAGFVRSTQQVQADARADKVITDTMVAPAPGDSKEPPVKIAVPIVAIAGSDDVIVPPSDVQDLQSRTTERFYMHLLPGDHEFLVDRGREIMHIVDSHLNPLLAARTTSSGPAFEAK

SEQ ID NO: 20628 - protein, 6315 aa, Polyangium cellulosum
MTKEYTRPQSAPLTEGDLLTLIVAHLAERLRMDARFIDVHEPFSRHGLDSRGAVDLVVDLRTALGRPLSPVVVWQHPTPDALARHLAGGADAREGQARADSAYERPGAPNEPIAIVGMACRFPGAPDVDSYWRLLSGGVDAVTEVPAGRWDMDAFYDRDPRSLGDVSTLRGGFIDDVDRFDAMFFGISPREAVSMDPQQRLMLELAWEALEDAGIVAERLKESLTGVFFGCIWDDYVTLIHQRGRGAIAQHTVTGNHRSIIANRVSYTLDLRGPSMTVDSACSSALVTIHMACESLRSGESTLALAGGVNLNIAPESTIGVHKFGGLSPDGRCFTFDARANGYVRGEGGGVVVLKRLSSAIADGDPIICVIRGSAVNNDGASNGLTGPNPLAQEAVLRTAYERAGVNPADVQYVELHGTGTQLGDPVEASALGAVLGKRRPAERPLLVGSAKTNVGHLEGAAGIVGLLKAALCLKHKQLAPNLNFETPNPHIPFAELNLKVQGALGPWPDMDRPLVCGVSSFGLGGTNAHVVLSEWASLEAELHPLAAESPEALREEVQRRLLTMTSLVGRAPLSFLCGRSAAQRSAKEHRLAVTARSFEELKQRLLGFLEHEKHVSVSAGRVDLGAAPKVVFVFAGQGAQWFGMGRALLQREPVFRTTIEQCSSFIQQNLGWSLLDELMTDRESSRLDEIDVSLPAIISIEIALAAQWRAWGVEPAFVVGHSTGEIAAAHVAGVLSIEDAMRTICAYGRIIRKLRGKGGMGLVALSWEDAGKELTGYEGRLFRAIEHSADSTVLAGEPDALDALLQALERKNVFCRRVAMDVAPHCPQVDCLRDELFDALREVRPNKAQIPIVSEVTGTALDGERFDASHWVRNFGDPALFSTAIDHLLQEGFDIFLELTPHPLALPAIESNLRRSGRRGVVLPSLRRNEDERGVMLDTLGVLYVRGAPVRWDNVYPAAFESMPLPSTAGGGKPLPPMPLLISARTDAALAAQAARLRAHLDSHLDLELVDVAYSLAATRTHFERRAVVVARDRAGILDGLDALAHGGSAALLGRSAAHGKLAILFTGQGSQRPTMGRALYDAFPVFRGALDAAAAHLDRDLDRPLRDVLFAPDGSEQAARLDQTAFTQPALFALEVALFELLQSFGLKPALLLGHSIGELVAAHVAGVLSLQDACTLVAARAKLMQALPQGGAMVTLQASEQEARDLLQAAEGRVSLAAVNGHLSTVVAGDEDAVLKIARQVEALGRKATRLRVSHAFHSPHMDGMLDDFRRVAQGLTFHPARIPIISNVTGARATDQELASPETWVRHVRDTVRFLDGVRTLHAEGARAFLELGPHPVLSALAQDALGHDEGPSPCAFLPTLRKGRDDAEAFTAALGALHAAGLTPDWNAFFAPFAPCKVPLPTYTFQRERFWLDASTAHAASATPAAALEGRFWQAVESGDIDTLSSELHVDGDEQRAALALVLPTLSSFRHKRQEQSTVDAWRYRVTWKPLTTAATPADLAGTWLLVVPSALGDDALLATLTEALTRRGARVLALRVSDIHIGRSALVEHLREALAETAPLRGVLSLLALDEHRLADRSALPAGLALSLALVQGLDDLAIEAPLWLFTRGAVSIGHSDPITHPTQAMIWGLGRVVGLEHPERWGGLVDVSAGVDESAVGRLLPALAQRHDEDQLALRPAGLYARRIVRAPLGDAPPAREFRPRGTILITGGTGALGAHVARWLARQGAEHLILISRRGAEAPGASELHAELNALGVRTTLAACDVADRSALQALLDSIPSDCPLTAVFHTAGARDDGLIGDMTPERIERVLAPKLDSALHLHELTKNSALDAFVLYASLSGVLGNPGQANYAAANAFLDALAEHRRSLGLTATSVAWGGWGGGGMATERVAAQLQQRGLLQMAPSLALAALAQALQQDETTITVADIDWSRFAPAFSVARQRPLLRDLPEAQRALQASEGASSEHGPATGLLDELRSRSESEQLDLLATLVRGETATVLGHAEASHVDPDKGFMDLGLDSLMTVELRRRLQKATGVKLPPTLAFDHPSPHRVAFFLRDSLARAFGTRLSAERDGAALPAPGATSDSDEPIAIVGMALRLPGGIGDVDALWDFLHQGRDAVEPIPPTRWDAGALYDPDPDAKAKSYVRHAAMLDQVDLFDPGFFGISPREAKHIDPQHRLLLEAAWQALEEAGIVPSTLKDSPTGVFVGIGASEYAPREPGAEDSEAYIVQGTYASFAAGRLAFTLGLQGPALSVDTACSSSLVALHLACQALRRDECNLALAAGASVMVSPETFVLLSRLRALAPDGRSKTFSASADGYGRGEGVIVLALERLRDALAQGRRVLAVVRGTAVNHDGASSGITAPNGTSQKKVLRAALHDARIAPADVDVVECHGTGTSLGDPIEVQALAAVYGEGRSAEKPLFLGAVKTNVGHLEAAAGLAGVAKIVASLLHNALPPTLHTTPRNPLIAWDALAVAVVDATRPWVRHADGRPRRAGVSAFGLSGTNAHVILEEAPAIARVEPAASQPASEPLPAAWPVLLSAKSEAAVRAQAKRLRDHLLAKSELALADVAYSLATTRAHFEQRAALLVKGRDELLSALDSLAQGHSAAVLGRSGAPGKLAVLFTGQGSQRPTMGRALYDAFPVFRDALDTVAAHLDRDLDRPLRDVLFAPDGSEQAARLDQTAFTQPALFALEVALFQLLQSFGLKPALLLGHSIGELVAAHVAGVLSLQDACTLVAARAKLMQALPQGGAMVTLRASEEEVRDLLQPYDGRASLAALNGPLSTVVAGDEDAVVEIARQAEALGRKTTRLRVSHAFHSPHMDGMLDDFRRVAQSLTYHPARIPIISNVTGARATDHELASPDYWVRHVRHTVRFLDGVRALHAEGARVFLELGPHAVLSALAQDALGQDEGTSPCAFLPTLRKGRDDAEAFTAALGALHAAGLTPDWSAFFAPFAPRKVSLPTYAFQRERFWLDASKAHAADVASAGLTSTDHPLLGAGVPLADRDGFLFTGRLSLSEHPWLADHVVFGTPILPGTAFLELALFVAGRVGLDTVEELTLETPLALPSEGALLVQVSVGPLDDAGRRPLSLHSRPQGAPQDAPWTRHASGSLAPATPSPSFDLHDWPPSGATQVDTQGLYATLESAGLAYGPQFQGLRSVWRRGDELFAEAQLPDAAKKDAARFALHPALLDSALHALALDDERAPGVALPFSWGGVSLRAVGATTLRVRFHRPKGETAGSLVLADAAGGPIASVQALATRITSAEQLRTPGASHHDALFRVDWSELPSPTSPSGAPSAVLLGIGGLDLAPEVPLARVADLAALQSALDQGASPPGLVVVPFMARTADDLIQSAHSITARALALLQAWLADERLASSRLVLLTRRAIAARADEDVKDLAHAPLWGLARSAQSEHPELPLFLVDLDLSEASQHTLLAALETGERHSRLRNGKPFIPRLANARSKDELIAPDASNWRLHIPTKGNFDALTLVDAPLARAPLAHGQVRVAVHAAAFNFRDVLDTLGLYPGDAGPLGGEGAGIVTEVGPGVSRYTVGDRVMGIFGAACGPTAIADARMICPIPHAWSFAQAASVPIIYLTAYYGLVDLGHLKPNQRVLIHAAAGGVGTAAVQLARHLGAEVFATASAGKWSALRALGFDDAHLASSRDLDFEQHFLRSTHGRGVDVVLDCLAREFVDASLRLMPSGGRFVEMGKTDIREPDAVGVAYPGVVYRAFDLIEAGPDRIEQMLAELLSLFERGALRPPPITSWDIRHAPQAFRALAQARHVGKFVLTIPRPIDPEGTVLITGGTGTLGALVARHLVARHGAKHLLLTSRQGAHAPGAEASRTELEALGASVTLRACDAADPRALQALLDSIPSAHPLTAVVHAAGALDDGLLGAMSPERIDRVFAPKLDAAWHLHELTQDKPLAAFVLFSSAAGVLGSPGQSNYAAANAFLDALAHHRRAHGLPASSLAWGYWAERSRMTEHLSAADVSRMRRAGVRPLATDEALSLFDAALLRPEPALVPARFDVNALGANADEVPPLFQRLVRARVARKAASNTALASSLSQRLSSLPPAESERFLLDLVRTEAATVLGLASFESLDPHRPLQELGLDSLIALELRGRLAAATGLRLQPTLLFDYPTPAALSRFFTTQFFGETTDRPAAPLTPAGSEDPIAIVSMSCRFPGDVRTPEDLWKLLLDGKDAISSFPQNRGWSLDALDAPGRFPVREGGFVYDADAFDPAFFGISPREALAIDPQQRLLLEISWEALERAGIDPASLQGSQSGVFVGIIHNDYGAWLMNGTDEHKGFAATGSTASVASGRIAYTFGFQGPAISVDTACSSSLVAVHLACQALRHGECSLALAGGVTVLATPAVFVAFDSESAGAPDGRCKAFSAEANGAGWAEGAGMLLLERLSDAVRNGHPVLAVLRGSAVNQDGRSQGLTAPNGPAQERVIRQALDSARLTPKDIDAVEAHGTGTTLGDPIEAQAILATYGESHSQDSPLWLGSLKSNMGHTQAAAGVGSVIKMVLALQHGLLPKTLHAKNPSPHIDWSPGTVKLLDEPVVWKTNGHPRRAGVSSFGFSGTNAHVILEEAPAIARAESAAAQPASEPLPAAWPVLLSAKSEAALRAQAARLRDHLQAHPDLELADVAYSLATTRAHFERRAVVVAKDRDEATFALDAFEQGSPAHHVAHGEARVAGKLVFVFPGQGSQWPGMAQQLLTTSDAFRAQVEACARAFAPHLGWSLLAVLRGDEGAPSLERIEVVQPALFTVMVSLAALWRSRGIEPDAVVGHSQGELAAAYVAGALSLDDAAKVVARRSRLLSTLSGQGAMAAVERPPAALEPYLARFGRRLSIAAINSPSATTVSGEPDAIDHLLRLLKAEQIFALKLRVDVASHGAQIEGMREQLLEELREIEPRESRIPFYSTVRGEKLAGTELGAAYWYDNLLRPVRFADATQLLLDDAHRFFVEVSPHPVLMLPLEETLEASGLPTAVLGSLWQDEGDLSRFLASLGELYARGYAVDWRAFFEPLRPRRVALPTYAFQRERFWLDAPTAHADVASAGLTSADHPLLGAAVRLADTDAFLFTGRLSLQSHPWLAEHAAFGIPILPGTAFLELALLAADRVGLDTVEEVTLEAPLALPSQGTILIQISVGPMDEAGRRSLSLHGRTEDAPQDAPWTRHASGSLAKAAPSLSFDLHEWAPPGGTPVDTQGSYAGLESGGLAYGPQFQGLRSVWKRGDELFAEAKLPDAGAKDAARFALHPALFDSALHALVLEDERTPGVALPFSWRGVSLRSVGATTLRVRFHRPNGKSSVSLLLGDAAGEPLASVQALATRITSQEQLRTQGASLHDALFRVVWRDLPSPTSLSEAPKGVLLETGGLDLALQASLARYDGLAALRSALDQGASPPGLVVVPFIDSPSGDLIESAHNSTARALALLQAWLDDERLASSRLVLLTRQAIATHPDEDVLDLPHAPLWGLVRTAQSEHPELPLFLVDLDLGQASERALLGALDTGERQLALRHGKCLVPRLVNARSTEALIAPNVSTWSLHIPTKGTFDSLALVDAPLARAPLAQGQVRVAVHAAGLNFRDVLNTLGMLPDNAGPLGGEGAGIVTEVGPGVSRYTVGDRVMGIFRGGFGPTVVADARMICPIPDAWSFVQAASVPVVFLTAYYGLVDVGHLKPNQRVLIHAAAGGVGTAAVQLARHLGAEVFATASPGKWDALRALGFDDAHLASSRDLEFEQHFLRSTRGRGMDVVLNALAREFVDASLRLLPSGGSFVEMGKTDIREPDAVGLAYPGVVYRAFDLLEAGPDRIQEMLAELLDLFERGVLRPPPITSWDIRHAPQAFRALAQARHIGKFVLTVPRPIDPEGTILVTGGTGTLGALIARHLVANRGAKHLLLTSRKGASAPGAEALRSELEALGAAVTLARCDAADPRALQALLDSIPSAHPLTAVVHAAGALDDGLISAMSPERIDRVFAPKLDAAWHLHQLTQDKPLAAFVLFSSASGVLGGMGQSNYAAANAFLDALAHHRRVHGLPASSLAWGHWAERSGMTRHLSGVDTARMRRAGLRSIASDEGLALFDMALGRPEPALVPARFDMNALGAKADGLPSMFQGLVRARVARKVASNNALAASLTQRLASLPPTDRERMLLDLVRAEAAIVLGLASFESLDPRRPLQELGLDSLMAIELRNRLAAATGLRLQATLLFDHPTPAALATLLLGKLLQHEAADPRPLAAELDRLEATLSAIAVDAQARPKIILRLQSWLSKWSDAQAADAGPILGKDFKSATKEELFAAFDEAFGGLGK

SEQ ID NO: 20629 - protein, 359 aa, Aeropyrum pernix
MRIEQDFSQSLGVERLKAARLHEYNKPLRIEDVDYPRLEGRFDVIVRIAGAGVCHTDLHLVQGMWHELLQPKLPYTLGHENVGYIEEVAEGVEGLEKGDPVILHPAVTDGTCLACRAGEDMHCENLEFPGLNIDGGFAEFMRTSHRSVIKLPKDISREKLVEMAPLADAGITAYRAVKKAARTLYPGAYVAIVGVGGLGHIAVQLLKVMTPATVIALDVKEEKLKLAERLGADHVVDARRDPVKQVMELTRGRGVNVAMDFVGSQATVDYTPYLLGRMGRLIIVGYGGELRFPTIRVISSEVSFEGSLVGNYVELHELVTLALQGKVRVEVDIHKLDEINDVLERLEKGEVLGRAVLIP

SEQ ID NO: 20630 - protein, 266 aa, Leishmania major
MMRAVTLKGLGGIDTMSISEVPKAVVKKGTDVLIKVIAAGVNRAGVSQRLDNYAPPDGANELLGLEVAGIVEQVGSDAVGRVKEGDRVMALLRGGGYADYAVAHMGCVMAMPQGYTFTEAAAIPEAFIRAWQILHRHGKVKRGQNVLIHAGASDIGSALAQITEKYFKATAITTSSEEKLDMCRAHASVTLSRTPDELGLAFAPKLKRLFGEESVNVIVDPVFGGTYLSENAQVLAPNGHLIVIAFMGGALVHMNALPLFREEAKI

SEQ ID NO: 20631 - protein, 337 aa, Fragaria vesca
  unsure (1)..(337): unsure at all Xaa locations
NLCPLNFTFAIHRLTMAAAPSESIPSVNKAWVXSEYGKTSDVLKFDPSVAVPEIKEDQVLIKVVAASLNPVDFKRALGYFKDTDSPLPTIPGYYVAGVVVKVGSQVTKFKVGDEVYGDLNETALVNPTRFGSLAEYTAADERVLAHKPKNLSFIEAASLPLAIETAHEGLERAELSAGKSVLVLGGAGGVGTHIIQLAKHVFGASKVAATASTKKLDLLRTLGADLAIDYTKENFEDLPEKFDVVYDAVGETDKAVKAVKEGGKVVTIVGPATPPAILFVLTSKGSVLEKLKPYLESGKVKPVLDPTSPYPFTKVVEAFGYLESSRATGKVVVYPIP

SEQ ID NO: 20632 - protein, 2152 aa, Saccharopolyspora spinosa
MTVTTSYEEVVEALRASLKENERLRRGRDRFSAEKDDPIAIVAMSCRYPGQVSSPEDLWQLAAGGVDAISEVPGDRGWDLDGVFVPDSDRPGTSYACAGGFLQGVSEFDAGFFGISPREALAMDPQQRLLLEVAWEVFERAGLEQRSTRGSRVGVFVGTNGQDYASWLRTPPPAVAGHVLTGGAAAVLSGRVAYSFGFEGPAVTVDTACSSSLVALHLAGQALRAGECDLALAGGVTVMSTPKVFLEFSRQRGLAPDGRCKSFAAGADGTGWGEGAGLLLLERLSDARRNGHEVLAVVRGSAVNQDGASNGLTAPNGSSQQRVITQALASAGLSVSDVDAVEAHGTGTRLGDPIEAQALIATYGRDRDPGRPLWLGSVKSNIGHTQAAAGVAGVIKMVMAMRHGQLPRTLHVESPSPEVDWSAGTVQLLTENTPWPRSGRVRRVGVSSFGISGTNAHVILEQPPGVPSQSAGPGSGSVVDVPVVPWMVSGKTPEALSAQATALMTYLDERPDVSSLDVGYSLALTRSALDERAVVLGSDRETLLCGVKALSAGHEASGLVTGSVGAGGRIGFVFSGQGGQWLGMGRGLYRAFPVFAAAFDEACAELDAHLGQEIGVREVVSGSDAQLLDRTLWAQSGLFALQVGLLKLLDSWGVRPSVVLGHSVGELAAAFAAGVVSLSGAARLVAGRARLMQALPSGGGMLAVPAGEELLWSLLADQGDRVGIAAVNAAGSVVLSGDRDVLDDLAGRLDGQGIRSRWLRVSHAFHSYRMDPMLAEFAELARTVDYRRCEVPIVSTLTGDLDDAGRMSGPDYWVRQVREPVRFADGVQALVEHDVATVVELGPDGALSALIQECVAASDHAGRLSAVPAMRRNQDEAQKVMTALAHVHVRGGAVDWRSFFAGTGAKQIELPTYAFQRQRYWLVPSDSGDVTGAGLAGAEHPLLGAVVPVAGGDEVLLTGRISVRTHPWLAEHRVLGEVIVAGTALLEIALHAGERLGCERVEELTLEAPLVLPERGAIQVQLRVGAPENSGRRPMALYSRPEGAAEHDWTRHATGRLAPGRGEAAGDLADWPAPGALPVDLDEFYRDLAELGLEYGPIFQGLKAAWRQGDEVYAEAALPGTEDSGFGVHPALLDAALHATAVRDMDDARLPFQWEGVSLHAKAAPALRVRVVPAGDDAKSLLVCDGTGRPVISVDRLVLRSAAARRTGARRQAHQARLYRLSWPTVQLPTSAQPPSCVLLGTSEVSADIQVYPDLRSLTAALDAGAEPPGVVIAPTPPGGGRTADVRETTRHALDLVQGWLSDQRLNESRLLLVTQGAVAVEPGEPVTDLAQAALWGLLRSTQTEHPDRFVLVDVPEPAQLLPALPGVLACGEPQLALRRGGAHAPRLAGLGSDDVLPVPDGTGWRLEATRPGSLDGLALVDEPTATAPLGDGEVRIAMRAAGVNFRDALIALGMYPGVASLGSEGAGVVVETGPGVTGLAPGDRVMGMIPKAFGPLAVADHRMVTRIPAGWSFARAASVPIVFLTAYYALVDLAGLRPGESLLVHSAAGGVGMAAIQLARHLGAEVYATASEDKWQAVELSREHLASSRTCDFEQQFLGATGGRGVDVVLNSLAGEFADASLRMLPRGGRFLELGKTDVRDPVEVADAHPGVSYQAFDTVEAGPQRIGEMLHELVELFEGRVLEPLPVTAWDVRQAPEALRHLSQARHVGKLVLTMPPVWDAAGTVLVTGGTGALGAEVARHLVIERGVRNLVLVSRRGPAASGAAELVAQLTAYGAEVSLQACDVADRETLAKVLASIPDEHPLTAVVHAAGVLDDGVSESLTVERLDQVLRPKVDGARNLLELIDPDVALVLFSSVSGVLGSGGQGNYAAANSFLDALAQQRQSRGLPTRSLAWGPWAEHGMASTLREAEQDRLARSGLLPISTEEGLSQFDAACGGAHTVVAPVRFSRLSDGNAIKFSVLQGLVGPHRVNKAATADDAESLRKRLGRLPDAEQHRILLDLVRMHVAAVLGFAGSQEITADGTFKVLGFDSLTVVELRNRINGATGLRLPATLVFNYPTPDALAAHLVTALSADRLAGTFEELDRWAANLPTLARDEATRAQITTRLQAILQSLADVSGGTGGGSVPDRLRSATDDELFQLLDNDLELP

SEQ ID NO: 20633 - protein, 2586 aa, Caenorhabditis elegans
MDPTQWWQKQDDIVISGVSGRFPRCDNVKMFGDMLLAGEDLVTEDSLRWTPGFCDLPKRHGKLKVLNKFDAGFFQVTPKQANFMDPQVRLLLEASWEAMVDAGINPTDLRGSKTGVFVGCSASETSGMLTQDPDTVTGYTLTGCVRSMFSNRISYTFDLQGPSFSVDTACSSSLLALQLAVDSIRQGQCDAAIVAGAHLTLTPTAALQFLRLGMLTDKGSCRSFDESGDGYCRTEGVAAIFIQRKKKAQRLYATVVHAKSNTDGHKEHGITFPSGERQAQLLQEVYSEAGIDPNSVYYVEAHGTGTKVGDPQEANAICEVFCSKRTDSLLIGSVKSNMGHAEPASGVCSLTKILLSIERQLIPPNLHYNTPNQYIPGLTDGRLKVVTEPTALPGGLIGINSFGFGGSNTHVILKAADHIAPPITPHPFTKLVTYCGRTQEAVENIFTEIESNKDDLYLQALLANQANMPANLLPFRGYMLLDRENNVETLKSITKVPITEARPIYFIYSGMGSQWPGMAIKLMKIPMFDDSLRASSKTLEEFGLDVYGMLCNPDPEQYSNNTMNCMLAITAIQIALTDVLTALGVSPDGIIGHSTGEMGCGYADGGITREQTMRLAYHRGTTIMKHTEIKGAMAAVGLTWEQVKEQAPPGVVAACHNGADSVTISGDAEGVATFCAQLKEKDIFAKVVDTSGIPFHSPAMLAVQDEMIECMRTAVPEPKPRSSKWISTSIPEDDWESDLAATCSAEYHVHNACSPVLFYEAIQKIPANAVTIEMAPHSLMQAILRRSLQKTVTNVGLMNRPKSENDDELESFLGSLGKIYQAGVNIQITELYPGGQYKGVVPKGTPMIGPMWKWDHTQDWLTIDGRQVLAGGSGSVASSATYNIDPFATDSKETYLLDHVIDGRVLYPFTGHMVLAWRTLCKLKGLDYTKTPVVFENINVFSATILTKPIKLDVVLSPGNGYFEIISDDQVAASGRIYIPEDNQPFYYGKLEDIRTSEIADRIELDTEDAYKEFLLRGYEYGQAFRGIYKTCNSGERGFLYWTGNWVTFLDSLLQTALLAERSDTLRLPTRVRHLRIDPNKHLEHVVEKDGIQVIELRNDHSTNGCIAGGVECCDLNAHSVARRIQVSGQLYHEKIFFVPHFDHNCLSGHKKTSTILKDYSAVIKQQLYTGFSKWQSAGLLKKLKNGAQIVKALAVLKASQSDVVLDDTVTRFTHDGKCTVLHHIADMFKIEDCEDFEDRVAAKLKSVRGIFELDRLWAGAVLNDRIVKSLQDICIENSAGHHATMAAVDLVSTDQIRHCIEANSSHPLLETDYTCIGANVDHLDESTLEIIGGKKQKIDLENNFTGHGEVKNLDYVLLDKVISKKADPIAFIEACKHLIRETGFLLVVEVTSQYEIALAIEGLLGNEMVGDASRKYNQFFTHEQLLDMFKSTGFLICNFQSDPALMTTTYAVRRVSPIPRDPVFIDVDDVKEFNWIEPLQKVSEERLNEPDSKTIWLVSNKCRNNGIVGLGLCFVEENLKINRFRSAFDMSANKEIRDGPPVWNIGDEETKKIVELDLHANDYMDGQWGSMRHIVVKDEDVHVYKDCEHAFINTLTRGDVSSLTWFESPNQYFDSMVKSKATQELCSVYYAPINFRDIMLAYGRLPPDAIPGNFADRECLLGMEFSGRLKDGTRLMGILPAQALATTVMVDRDYAWEVPRDWTLAEASTVPVVYTTAYYALVRRGLMKKGDKILIHGGAGGVGQAAIAIALAAGCEVFTTVGSAEKREFLKNLFPQLQEHHFANSRSADFELHIRQHTKGRGVNIVLNSLANEMLQASLRCLARHGRFLEIGKVDLSQNSSLGMAKLLDNVSVHGILLDSIMDPTVGDLDEWKEIARLLEQGIKSGVVKPLHSHSFPADKAEEAFRFMSAGKHIGKVIMEIRPDEGTKVCPPSKISVRAICRTLCHPQHTYLITGGLGGFGLELAQWLINRGARKLVLTSRTGIRTGYQARCVHFWRRTGVSVLVSTLNIAKKSDAVELINQCTAMGPIGGIFHLAMVLRDCLFENQNVQNFKDAAEAKYYGTINLDYASREHCDKNILKWFVVFSSITSGRGNAGQTNYGWSNSCMERMIDQRRADGFPGIAIQWGAIGDVGVILENMGDNNTVVGGTLPQRMPSCLSSLDNFLSWNHPIVSSFIKAELGSKKNVGGGDLMATIAHILGVNDISQLNADANLSDLGLDSLMGVEIKQALERDHDIVLSMKEIRTLTLNKLQQLADQGGTGRTALQVNELEMKKDGERDAELNTAEMLEQQMNQLFKMRVDVNDLDPQDIIVKANKVEEGPITFFVHSIEGIATPLKKVMNKCEFPAYCFQSTKNVPQTSIEDVAKCYIREMKKIQPSGPYRLVGYSYGACIGFEMANMLQESDGRDAVERLILLDGSHLYMQTYRNVYRMAFGVTGDSLVNNPLFESEIMCAMTLRFANVDYKKFRFELLQQPGFKARVQKVVDQVMLTGLFKSPETVAFACEAMHSKFLMADKYKPRRNFGGHITLIRAEQGAAREEDVGEDYGVAAVSEDCEVLKVKGDHDTFVQGKSSSVTVEHINRIILQ

SEQ ID NO: 20634 - protein, 328 aa, Caenorhabditis elegans
MSKSICKSSMRAAVVRRFGAPDVIEAVESDMPRLEKNQVLVRNYAAGVNPVDTYIRAGQYGKLPNLPYVPGKDGAGFVELVGESVKNVKVGDRVWYGSEADSTAEYVAVNRPFELPEGVSFEEGASLGVPYLTAYRALFHLAGAKTGDVILVHGASGGVGSALMQLAAWRNIEAVGTAGSADGIRFVKSLGARNVYNHSDKQYVSKMKNDYPGGFNHIFEMAAHTNLNTDLGLLAPRGRVAVIGNRAETTINARQLMVTEGAVYGVALGMSSEAELLDFGINIVSFLKETEFRPLINKLYRLEQLGLAHEEIMNNKGAKGNLVVQIEH

SEQ ID NO: 20635 - protein, 335 aa, Nostoc punctiforme
MKAVLMTAAGSPEVLQVQEVPNPAVPVGNTELLVRLVAAGINPIDTKLRSRGTFYPDRTPTILGCDGAGVVEAAGAGVQRFRPGDEVYFCYGGLGAHQGNYAEYSVVDERFVARKPASISFTEAAAAPLVLITAWEALYERGRLLPGERVFIHAGAGGVGHVAIQLAKLKGATVATTVSSEEKANFVKELGADHVIFYKQTDFVQAVLDWTGGEGVDLAFDTVGGETFHKTFPAVRVYGDIVTILEPDANTVWKTARLRNLRIGLELMLTPALLGLEDILQHHAEILEQCATWIDEGKLKIHVSHEFPLKEAAKAHQLIESGSVTGKIVLLISDK

SEQ ID NO: 20636 - protein, 337 aa, Nostoc punctiforme
MKAYEIKSNAGIDALALVDRAEPKPTAGQVLIQVKATSLNYRDLLVAEGAYGAGQKYPLIPLSDGAGEVVAVGEGVTRVKIGDRVAGIFFQDWIYGSLTKEKMKSDLGGGIDGMLAEYVVLHQDALVILPDYLSYIEGATLPCAAVTAWHGLVTKGNIGAGDNVLLLGTGGVSIFALQFAKIHGARAIITSSSDDKLARAKQLGADETINYKTTPDWEKQVYQLTNRTGVDHVVEVGGAGTLPKSLQAVRIGGRISLIGVLSGRGSEIDPMPILFKSLTVQGIYVGSREMFEAMNQAMQQHQIKPIIDRVFPFAEAREAYHYLKSAAHFGKIVIRNS

SEQ ID NO: 20637 - protein, 2210 aa, Nostoc punctiforme
MNNISKKVDKDKLEQLNSSQRILLALDEAVKKLKDVERAKTEAIAIVGLSCRFPGGVTNPEEFWQLLIDGVDAITEIPSQRWHLEDYYHPNPDTPGKMYSRYGGFLQQVDQFDAQFFGISPREAIKLDPQQRLLLEVTWEALENAGIIPQEQVNGQTGVFIGITTNDYARLITPGGDLSQIDPYYLTGNPLNAVAGRLSYTLGLHGPCMAVDTACSSSLVAVHLACQSLRNQECDRALAGGVNLILSPENNIGLSKAKVLSADGRCKTFDSEADGITRGEGCGVLVLKRLSDAVADGDRILALIRGSAVNQDGASSGFTVPNRNAQENLIRQTLTRANVKPEEVDYVEAHGTGTSLGDPIEVRALAAVLGAGRTAENPLKIGAVKTNIGHLESAAGIAGMIKVILSLQHQQIPPHLHLKQLNTHINWDELPVSVTTQATPWPVGNKQRLAGVSSFGASGTNAHVILAEAPTNNSLSKPQNAKFIERPQHLLNLSAKTEKALRELVQRYINYLQSNPEKSLADICFTANTGRSHWKYRLSILADSTMSALAQLTTWALGQDLPGVVLGEAESTSKKIAFLFTGQGSQYAGMGQKLYQTQAKFRQIIDQCDQILQPYLDKPLLEVLYPQPDTNSPIDNTAYTQVALFALEYALYQLWQSWGIKPDVVMGHSVGEYVAACVAGVFSLQDGLKLIAARGQLMQALPENGAMVAVMTTAEQLQPLLAAYKEKVAIAAVNAPQSLVISGEKSAISAITSQLETAGIKTKPLQVSHAFHSPLMQPMLADFLQVASQIKFSPPQLKLISNVTGELATTEIATAEYWCRHILNPVEFAASMVTLQQQKVAICVEIGPKPILLGMGRQCNPTVEGLWLPSLRSRQDDWQVMLLSLAQLHCHGVAVDWLLFDADYSRVRLHLPTYPFQRQRFWIETVDGQRDQPALISRNGKGRKIIHPLLGQRLPLATSQSIHFESQISAASPTFLQDHCIYDATILPATAYIEMALSAGAIVFKTDRVQLEAVSIQQALVFSGDEPKTLQVVLTPENTRVYSWQVLSYLEDESNVDNWTLHASGKVGLGNAETHSAAVDLAGLLSEDSTEISVKEYYQSLHDRGFDYGEQFQAIARLWQGETQAVGSVRLPLPLTADASKYLLHPVLLDACFQILGTNFPDNGQQDVYLPVGVEQLQVYQRAGNSLWSRVEKIEFQDVKQQHLQADLSLVNDAGELVAKITGLSFRRITQKAFQRILAKVLPAPQTTDNWLYQIAWQRQNLEPASSNKQPSSWLIFADQGGLGQKLAQLLTAAGDRCIMVSAGAVYQQLQADRYQINLAHPEDFGRLIQDNPCQGIVHLWSCDATTEPQLTSCGSVLFLLQAIYNAKLPALPSLYLVTKGTQTVGGQLTPLQVQSATLWGLGRVIALEHPELHCVRLDINPDAPEDHIPSVAQELLVPSREDQIAYRQGLRYVARLVRSDVAREADVNSQAFQLQISEYGVFENLTLAAMQRRQPGPGEVEIAVRAVGLNFRDVLNALGMLREYTEQMGITDAKELPFGGECSGIVVAVGENVSHLQVGDAVIAAQTIGSFASFVIVRSEFVVRKPENLTFEEAATIPTAFLTAYYGLYQQAQLKSGERILIHAAAGGVGQAAVQLAQRVGAEVLATASPRKWEHLRATGVKQVMNSRSLEFADQIREITSGQGIDVVLNSLNGEYIPKSLEVLSDRGRFIEIGKIGIWDAEQVKDSRPDVGYIPFDLLDISLENPSLIGEMLGELMAEFQQGSLKPLPVSVFSIQDVANAFRYMAQSKHIGKVVVSIPQRQMPKETTIQADSSYLITGGLGALGLQVAQWLVEQGAQNLVLMGRRGVSPENQPAIEQLEQAGARVLVVTADVSQQEDVSQMLATLNASMPPLRGIIHAAGLLADGMLLRQTWENFELVMAPKVAGAWNLHTLTKELDLDFFVCFSSVSALLGSPGQGNYAAANAFMDALAHHRQALGLPGSSINWGPWADAGMAAALSSREQARWAAQGVQPIPLEPGLQILAKVVQQNLAQVGVLPVDWSKFTAQFPSDVELPFLAEFTNAISKVTPQVAELRQQLEAAAPKQRPILLMNYVRSQIAKVLNLTSTEEIDPKEGFLQLGMDSLMAVELRNRLQSSLGCSVPASLIFDYPTVDALVSYLIQELWTDRPPEPSTENSPPPAQGIAESELEELSDSEAEALLLSKLDNLKY

SEQ ID NO: 20638 - protein, 347 aa, Halobacterium sp. NRC-1
MQAVTFDGHGGTGVIDYRTVPEPDLGADDVLVDVRAGALNHLDVWTRRGMPGIDLSMPHVPGSDAAGVVSAVGASVTRFEPGDRVAVLAGVSCGQCEFCRHGEPALCASFRVLGEHVPGVHSERAAVPADNLIAVPEHVDWETAAAAPLVFQTAWRMLNTRADVSPGESVLVLGASGGVGHAAVQIAAHAGAEVFATASTEQKLQYAAELGADHVVNYTETNFADEIRARTGKRGVDVVVDHVGEATWDDSLRSLAKGGRLVTCGATTGGRPETNVQRVFWNQLDILGSTMATPGEADAALEHVWDGTFDVRIRDVLPMRETARAHELLENREGFGKVVVKPDNELD

SEQ ID NO: 20639 - protein, 329 aa, Triphysaria versicolor
MAGKLMRAVQYDGYGGGAAGLKHVEVPIPSPGKGEVLIKLEAISLNQLDWKLQNGMVRPFLPRKFPFIPATDVAGEVVRIGQDVKNFKPGDKVVAMLGSFGGGGLAEYGVASEKLTVHRPPEVSAAESSGLPIAGLTAHMALTQHIGLNLDKSGPHKNILITAASGGVGQYAVQLAKLGNTHVTATCGSRNFDLVKSLGADEVIDYKTPEGAALKSPSGKKYDAVIHCASPLPWSVFKPNLSKHGKVIDITPGPRVMLTSAMTKLTCSKKRLVTLLVVIKGEHLSYLVELMREGKLKTVIDSKFSLSKAEEAWAKSIDGHATGKIVVEP

SEQ ID NO: 20640 - protein, 337 aa, Vibrio cholerae
MVYIQRDASASLFIRAIGIVEMENKRIVITQFGTPDVLAMQSAPIPTPKAGEVLVKVAFASVNPIDVKTRAGLGWAAAQNKDKLPWTPGYDISGRVVALGEGVSRLKERDNVAGFIGFPLRGGGYSQYVCVPEQELSLVPDAVTLEAAAALPLAGQTAAQALSKAQVQEGERVLILAGAGGVGHIAVQIALAAKTEVFTTCSEANLDYLATLGAHAINYQFAPVSQRLEEVDVLIDLVGGEAALDALKCLKDNARVITVPTLTAELICEKAKLLGFEATGMLVDPNPEQLDTMLYMVSVGLLKIEIQHIYSLLDAAQAHEQIESGHTRGKLLLDMKC

SEQ ID NO: 20641 - protein, 2422 aa, Bombyx mori
MAPTTVVEDRLTSGHRLSHPPSGDEVYVTGVSGYFPDSDSVKHLQENLFNKVDLISSDDRRWKLAHPEIPQRTGKINNVNKFDASFFGVHYKQAHTMDPMCRILLEKAYEAIVDAGLNPKELRDTKTGVFIGACFSESEKTWFYEKMQVNGFGITGCSRAMLANRISYWLGVTGPSYTVDSACSSSLYALEHAFRAIRDGHCDAAIVGGSNLCLHPFVSLQFSRLGVLSPDGKCKSFDNSANGYARSEAIVVCFLQKAKDSRRVYAQLLHAKTNCDGYKEQGITYPAGHIQKLLLREFYEECSIPPSELEFVEAHGTGTRVGDPEELLAIDEIFCTGRSGPLLLGSIKSNLGHSEPASGLCSIAKMCIAYTTGYIPPNLNYSIPREGVSALVDGRMNVITDKQAWNRGMSGINSFGFGGANAHVLLKNVARDKVNNGIPKDDLPRLVCASGRTESAVARIFDDLESRTVDAELVRLLHSIHDQDIAGHVVRGFTLLGSTPTKSESLARDIQYYSGVRRPVWFVYSGMGSQWPGMGAQLMRIPVFAAAIEKCNNVLKPKGINVVKIITDSDPKMFDDVLNSFVGIAAIQIGLTDVLKSVGIEPDHIIGHSVGELGCAYADGCFTAEQMILSAYSRGLASVETTLIKGSMAAVGLGYSQVKSMCPPEIVVACHNGPDSSTVAGPADAMKAFVAKLTAQGIFAKEVPSSNIAYHSKYVAEAGPKLLKYLSQVIPSPKPRTERWVSTSIPQSQWKESKARLSSAEYHTNNLLSPVLFEEASSLIHNNAITIEIAPHGLLQAILRRSLKKDVINIPLTQRGHSDNVQVLLTALGNLYQSGLNPHLANIYPHIPFPVSQGTPMLAHLVEWEHSEDWYVTSYKAQDKMKSGERTVRMSIVDEDSEYMAGHVVDGRNLYPATGYLVLVWETLGMMMGELYTEVSVVFENVRFQRATNIPKEGNLEFIIMIQKGSGNFEIVESGASIVTGRIYAKKNVGQDYRVLPFPKEETGPNIKHLLTKDFYKELRLRGYQYSGLFRGVLGCNVEGSRGRLAWVNNWVTFMDCMLQLKIIGQDTRGLFVPTRIEKLSIDAKMHYYAISKMNPDANRQSFEVRVYNEVDVIRAGGVEIRGLNATPITKRLPLGVPVLEKNEFIPFSSNTKMTVEDTLRSDIQLILENIQTYKVKTIELVDEEYKSNALEPLIEKVGELLGDLPLVQAELLLISEDPIEMPSNVTVENKKLTGETNTVIFIGANLLERPDVLRQAISTLRDKCFIISREKDRPDSKTYADKYDIITIQDTGSEYLVLFRKRVGARPAKFVRIVTADDTFAWIDKVKEELKEGQKIVLYSQDEHINGLLGLVNCLRKEPGGEIVYGLLINDPSAPPFNPDLEFYEEQLDKDLAINVYQDGQWGTYRHLLLGDLDTVKAKHAYVNTITIGDLSSLRWLEGPLRPNHVFKNPDEILINVYCTALNFRDIMTATGRVTVDAVASGRLAQECVQGFEVVGRTANGSRVMGMIRNKGLSNLAAGDKALLWSIPDEWTFEEAATIPVAYGTVYYAMVMVAQIKRGESILIHAGSGGVGQAAISVALHYGCEVFTTVGTAEKRAFIKKLFPALKDSHIGNSRDITFEDMVRRETNGKGVDIVLNSLSDEKLQASVRCLTYRGRFLEIGKFDISNNTPIGMYFFLKETSFHGIMLDYIFDQSDEFRRGLQDLLLSGIMNGAVRPLTYCTFEKNEVETAFRYMAAGKHIGKVIVKIRDEEPREEGPVRPTIIPVDALPRYICNENNVYVVVGGLGGFGLELADWLILRGARKLVLNSRRGLSNGYQSSRLRAWTSYGAEIHISTHDITTYTGCEEMIKMANALGHVDAIFNLAVVLKDSIFQNQTPETFKTSFGPKAIATMHLDKVTQKLCPGLKDFVIFSSVSCGRGNAGQTNYGMSNSVMERICESRKKIGLPALAVQWGAVGDVGLVADMQDEDVQLEIGGTLQQRISSCLLALDKFMKQDAPIVSSIVVAEKKAGGTGCGNIVDAVAQIMGIKDLKTVSQQVSLAELGMDSMMAVEIKQTLEREFEIFLTAQDIRTLTFARLVELTAQREAAASTSAARPITVEGAAGFRVLLRNFGDENLASEPLIYMPTLLSDGVEGEEVIQATERVMFMVPGLEGCAAVLEPLCRRLKTKVCVLQLGVEHKNENLEQMVDRLYQTAISKITPGTPFWLLGYSFGSLLTLELAARLEREGYHGVVFCLDGAPEFLHAILTMTISFKNDFQLQNSLICHTIDIVAPNNTIGKELMEKLNEYESYEERVEVAIKMSPIQTKYSDKFIGAIAAASYDRLKVVLNYNTKTVNKLKSPIVLMRPKENPPNVTCEDNYSLDKFSDNLTVHFLEGNHVSIIENKDCANIINRMLAERDEKTGKVSDNVVTNMLENQREVKV

SEQ ID NO: 20642 - protein, 2176 aa, Drosophila melanogaster
MVDDDERRWRHFNPEIPKRSGKICDLEKFDATFFGVHFKQAHTMDPQTRILIETAYEAVIDSGVNPKSLRGSKTGVYIGSCISESEKTWFYEKVSSGGFGITGCSRAMMANRISYCLGLEGPSFLLDTACSSSMYALDNAFSAIRNGEIDAAIIDGFCRPFDKNASGYTRSETINCLFLQKKKHAKRVYASIVYSKTNCDGYKPEGITYPSGIVQEKLLDQFYKDIDHKPSDLGYLEAHSTGTVVGDPEECKAIDNVLCSQREEPLLVGSVKSNVGHSEAASGICSLVKACFAFETGLIAPNINFTEVKQIIAPLAEGRLIVVKDVVPLPKPYIGINSFGFGGANAHALLKGYPKSKNNFGIPADDVPRLLTWAGRTEEAVEEIFNAVEKNPLDAEFIGLLQNIQEEDVSGMVFRGYAIFAKQGTGPCKLLAKDVQHYTGLQRPIVWVYSGMGSQWNQMGNSLMIIPRFRESVEICHQILLAKGLNLIHILTSNDPEVYQNILNSFVGIAAVQIGLTDVLRSLNIQPDYIIGHSVGELGCAYADGGLTAQQMILAAYYRGRVSVDLEKIRGSMAAVGLGYKTVLHMLPKSIETACHNGPDSCTISGPVDDVAQFVADLKTKGIFAKEVPCSNIAYHSKYISHMGPPLLNYMNEIIPHPKPRTKKWLSTSVPKIDWNKDKAKFCSAEYHTNNLLNSVLFDETFSLIPKNSLTIEVAPHGLLGAILKRSMPSGVHIPLTNRGNQNNASFFLSALGKIYLNGVLLPAANLYERIQFPVSRTTPSVSSLIRWDHSEDWFVTKYENMKTKSSGERVFSVNLASDNEEFLSGHIIDGKILVPATCYLQYVWETFSLMYHGPSYMDVPVEFEDIRFIRATSMPVDGKVDLTVMIHYGTGHFEVYNFQSKSKFPMIAKKDFYKELKLRGYHYNGAFQAVNLARSDGLFGRVQWNYNWVTFMDAMLQIQILGTDSRNLLLPTKIRKLKINGVHHFDLMTKMDPENRVFDVYVDPMYDRIIAGGIEIFGLHASLVQRRRPPGIPVLEEYVFLPFFSSSILSLKNAARVCVQIAIENNPTLKLKLVEVGADGKNHMLTEFIEAIQDLPVITGDYILLTSQNLEDLPGVHIENGSLSTQTNCHIIIIGGYEEDEVHEKITSAYNVLVDNGYIVFRQKCAKNVSCKIAEKFRTISKIPINNTEENLVLLQKISKKLTVPPVLVKVSQHDKTFEWILELQSAIITKAPVVVYSFNEKLNGQIGLVNCLRKEPDGNLIRCFFIDDDSAPDFDLSHPFYSTQYSLGLAFNIYRNPSKRLDHIYGNVIQRGDLSSLQWLKGPFNSQNCHIKIAFSSLNFRDVMLATGRLAVELYGSSRIDQNCVLGFEYSGINMLTGRRIMSMVVKGGVASYVEKPSKLIWDIPDDWSLEEAATVPVVYITVYYAFFMATDIRKGKSILIHAGTGGIGLAAIRVALAYNLEVFTTCSTANKKEFLLKTFPKLKESHIGNSRNTSFELMVHRETNGKGVDFVLNSLSEEKLLASLRCLGKSGHFLEIGKYDMANDNKIGLGCFLKEITFHAVLADSLLVAPDEDIWHLKSLIDMDISNGIIQPLPVKVFLAHEIEQAFRHLIGGKHIGKVVIQVREQPHDPSTLPVRVLNQVYFKHNHTYVIPGGLGGFGMELADWMAIRGARKLLLSSSRGITKDYQLYRIALWKTYGCEVAISTADITSKKGCAQLLSEANGMGPVGGIFNLAVVLKDCIFSNQNVNQFLECFAPKAIATTYLDDLSRIYCPELEHFVVFSSVSCGRGNAGQSNYGMANSVMERIIEHRNREGFPGKAIQWGAIGEVGLVADMAEDKIDMEIGGTLQQRISSCIQELDHLLCADASIVSSMVVAEKRTMRSGQGNVIDAVMNIMGIRDLKSVSLSTTLSEMGMDSLMAVEIKQTLERDFELILTPQDLRHLTFQKLQEFIDAKEKENTDGIQIIFASDNKLLGMELLIRNLGDEANCDQIIIPLQTSAAPSKQNLQPNIIIPGLEGTAGRACIVNHIFPEASKESMSTVFHQVDCLSDKMSLFMNYVEKQNMYSKKYSSTMVKAMFNRVKMAASFDLDGIIKIKSPITLVRPAEASLQDIDEDYCISLLTSGVVTLKVIEGNHTTMLDNPSLSQIIDDFDPVLLEDKHFEEYIRNDKPVSVV

SEQ ID NO: 20643 - protein, 1529 aa, Drosophila melanogaster
LSVELDLGKEENVYLAGHTIDGRVLFPATGYMTLAWMSLAQQQGLDYLRTPVLFEDVVFHRATILSVGTVVKLTLNFFPGSSSFEICEGTSLVTSGKIRLVSNVQQEQLQLSSLPGIAGSNKLSTKDIYKELRLRGYDYTGVFQGILESDISAVTGQLQWADNWISFMDTMLQFRILSNDIRELYVPTGIERALIDPLKHLELAKKHQQKLTVNWHRNISVVKCGGVEIHKMKTAQTQRRSGGQSPPSLERYRFWPHSQHLGQREEQEKSRSTALAVAIQLIIENSGGAVKLKGVELAGSRSTLDALSAVQLLELIEREPILVGDMAVVTSSSNESELGEQLKEHGIRVIVKDIKAGAVEQQCHFVYSVNMLAQNSVKDLQHCLDSLKSDSGFLLLEEAASRYNIIGKEKLNKLKLVSVLEQFFGTDRVLVLVRKLSKVQSSQALTLHLTNKQFKWVNELKNSIAKAQAEEKNLYLVAQGEPNSGALGLMNCLKREAGGHFLRLYLILDEGVPQFSLDDPFYAAQLAKDLVVNVYRNGSWGSYRHLKMESRPPMLPVEQAYVNTLVKGDLSSLRWIESPRSSPIQSQLEPCTVYYAPLNFRDVMLASGKLGVDALPGDLAYQDCVLGLEFAGRDSCGRRVMAMVTAKSLATNCLANRNLLWEVPSKWTMEQASTVPCVYATVYYALVVRGQMKEGERILIHAGSGGVGQAAISVALAHGLTVFTTVGSKEKREFLLKRFPKLKAKNIGNSRDTSFEQLIMSETHGNGVELVLNSLSEEKLQASIRCLALNGRFLEIGKFDLSNNTPLGMSVFLKNTSFHGILLDSVMEGEEEMQLMVAKLVAEGIKSGAVQPLPTTVFAEQEIEKAFRFMASGKHIGKVVIKVRLEEEQQAALPRLRQIQAIPRSYMHPEKSYILVGGLGGFGLELANWLVSRGARFLVLSSRSGVKSGYQALMIRRWHDRGVQVQIDTNDVTTAVGCQRLLEVSNKLALVGGIFNLAAVLRDGLIEDQSPKNFEKVSAPKLLATIHLDKISREICPALEYFVCFSSLSCGRGNMGQTNYGLANSTMERICEQRQEYGYPGTAIQWGAIGDTGLIIEHMGNNETVVGGTLPQRMISCLETLDLFLQQPHPVMASMVVAEKRKTEQANRLSLIATIANIMGLRDVKSVSDKTTLFDLGMDSLMSTEIKQTLERHFDLVLSAQEIRQLTFSALRQIDAQEPPSASVSSPSASSTLSRIKEEACVEVQPQSDETRKVFAKEVLPQEVMVRLRSKAPVASEDPAVFFLAPIEGFTIAVEALAASLTCPAYGLQCTEQVPLDSIEACAAYYLRQIQKLQPLGPYHIVGYSYGCLLAHAIAVALEQRRFGVKVIMLDGAPTMASGYVQEAKKQTDDLNRQQSMTLAYFGALLADVDYNQLLQLLDGVQTWPSKLDKLADTLAGYTQQTREVIKKAACMFKQKLLLSESYKGAKQLHSDVVLIKSAEHNAIMAQDYGLKEICSAQIDMHVVEGTHRTFLKEPHTLQIIERVLRKRP

SEQ ID NO: 20644 - protein, 384 aa, Plasmodium yoelii yoelii
MKGVILKGINELVFSESLTKPTLEKCKIQNQGNDLLLKVLSVGINRIDLLIKENKYPKFPIGKSLGLEISGIVEESNSNKFKKNDIVCSLLKYNGYNEYVLANSKHTMKIDSDKISMFEAASIPESFLTAYKLIYYTARFPLINNNDNKIVENKEGDKNNTTFTYTPISENCYYYYKQFSNQIYGNYFGKNEVNVLVYGALSSVGINLLQLLNYEKKRNIMNINKIIAITSNQTKAKVAMEFGATDYAFHNDENFVENILNISKNINLIFDCVGGGKIFENNLKICTNDTVWILYGLLGGPKVPSFNLAHLLTKRIILLTSTLYDRTDNYKEELIHSFQHHILPLIYNNTLKFCIHKVLPIEQIEEAHHIIKNNLNIGKVVCKF

SEQ ID NO: 20645 - protein, 236 aa, Pasteurella multocida
MSLFLLRWNGAMLKLDLGLRSSNLKKFYHLKIFLKILLLVVEICQRTITVQKGDFVVLGGATSSVGIATIQIAKMQGANVIALSRTHAKGDVLLQKGADFVIATKEDDVTAKLLEITNGKGVNLVFDPVGGKEAAKIINAMTQDGKYIIYGALSHDDIAVPVFPILGKHLTVRGYELFEITTVPEKLAQAKKFVFDGLASGQLKPEIDKVFAFDEMAEAHRYMESNAQIGKILVKV

SEQ ID NO: 20646 - protein, 379 aa, Torpedo californica
MTGEEVKEPKEQQEITEVKEQEPEISYNAIVLNGVGGYDKVKVEVKKGVPTLKSDEILVRVQACGLNFSDLLVRQGAFGKHHSLGTECAGVVEAIGDLVIDRKVGDKIIMLNIDGGLWTELVVTTVNRTFLMPDGMSFQEAAAISVNYTAAYVMIYDFANLRPSQSILIHMAAGGVGIAATQLCKLVHDVTIFGTASPSKHETIKENGVTYPIDYTTLDYAEEVRKIAPKGVDIVLDPLGGADDSKGFGLLKPLGKLVLYGSANQVTAPKRSSLAAAKVWWHKFNIDALQLINSNKAVCGFHLGRTDPDHVAEVIRKLISLYKEGKIKPKVDSVWSFEQVGDAMRHMRNTRTLEKSSWSLKSRQLMPQLEIKSVSKRQG

SEQ ID NO: 20647 - protein, 484 aa, Danio rerio
MSGEDAPAQQQNAEEQKQQETKTPAESPKTESKPDPPPTSASTEAAATAAAAADTPAPAAEKAPEEDTFTYRALVLTGYGGYDKVKLQVKKGKPALKSGEVMVRVKMCGLNFADLMARQGLYDRLPSPPVTPGMECSGVIEAVGEEVTDRKVGDKVLVLNRSGMWQEVVVVASTHTFLMPEGMSFEEAAALPVNYITAYMMLFDFGHLRPNQSVLVHMAAGGVGIAATQLCKTVNDVTVFGTASASKHEVISQGGVTHPIDYRTRDYVEEVRKISPKGLDIVLDPLGGSDTHKGYNLLKPMGKLISYGAANMLAGQKKNLFAVAKTWYQQFSVHTLSLIQGNRSVCGFHLGYLDSETELIDQAMTAVMDLYRQGKVKPRIDSTYHLEQVGDAMRRMQERNNIGKIILTTEPMKEEEKKEEAKKDEEKKDDKKKDDKKKDDKKKEDKKKDEAKKEEKKDEKKKEEAKKDDKKAEEKKEEVKKEEN

SEQ ID NO: 20648 - protein, 345 aa, Pseudomonas sp. W7
MKAIGYLEPQAIDQADALIDIELDTPTATGRDLLVKVHAISVNPVDTQVRRAAKPEAGQHKVLGWDAVGEVVATGLKTQLFKVGDLVWYAGDITRTGSNAEFQLVDERIVGAKPSSLSNVEAAAMPLTGITAWELLFDRLDFTPLLEGQAGATSAAPQARILIMGAAGVGSILTQLAAKLTNAVVIGTASREQTQRWVKELGADHVINHHQPLVPQLNALGIENVSHVISLTHTEQHYEQLVEALAPQGKLALIDDPQGGLDVMKLKQKSLSLHWELMFTRSMFNTWDMQKQHELLTQLAQLIDNGVIRTTLGENYGTINAENLKRAHAHIESNRAVGKIVLEGF

SEQ ID NO: 20649 - protein, 328 aa, Mycobacterium tuberculosis CDC1551
MTIMRAVVAESSDRLVWQEVPDVSAGPGEVLIKVAASGVNRADVLQAAGKYPPPPGVSDIIGLEVSGIVAAVGPGVTEWSAGQEVCALLAGGGYAEYVAVPADQVLPIPPSVNLVDSAALPEVACTVWSNLVMTAHLRPGQLVLIHGGASGIGSHAIQVARALAARVAITAGSPEKLELCRDLGAQITINYRDEDFVARLKQETDGSGADIILDIMGASYLDRNIDALATDGQLIVIGMQGGVKAELNLGKLLTKRARVIGTTLRARPVSGPHGKAAIAQAVAASVWPMIAANRVRPVIGTRLPIQQAAQAHELMLSGKTFGKILLTV

SEQ ID NO: 20650 - protein, 328 aa, Mycobacterium tuberculosis H37Rv
MTIMRAVVAESSDRLVWQEVPDVSAGPGEVLIKVAASGVNRADVLQAAGKYPPPPGVSDIIGLEVSGIVAAVGPGVTEWSAGQEVCALLAGGGYAEYVAVPADQVLPIPPSVNLVDSAALPEVACTVWSNLVMTAHLRPGQLVLIHGGASGIGSHAIQVVRALAARVAITAGSPEKLELCRDLGAQITINYRDEDFVARLKQETDGSGADIILDIMGASYLDRNIDALATDGQLIVIGMQGGVKAELNLGKLLTKRARVIGTTLRARPVSGPHGKAAIAQAVAASVWPMIAANRVRPVIGTRLPIQQAAQAHELMLSGKTFGKILLTV

SEQ ID NO: 20651 - protein, 327 aa, Escherichia coli K12
MATRIEFHKHGGPEVLQAVEFTPADPAENEIQVENKAIGINFIDTYIRSGLYPPPSLPSGLGTEAAGIVSKVGSGVKHIKAGDRVVYAQSALGAYSSVHNIIADKAAILPAAISFEQAAASFLKGLTVYYLLRKTYEIKPDEQFLFHAAAGGVGLIACQWAKALGAKLIGTVGTAQKAQSALKAGAWQVINYREEDLVERLKEITGGKKVRVVYDSVGRDTWERSLDCLQRRGLMVSFGNSSGAVTGVNLGILNQKGSLYVTRPSLQGYITTREELTEASNELFSLIASGVIKVDVAEQQKYPLKDAQRAHEILESRATQGSSLLIP

SEQ ID NO: 20652 - protein, 2603 aa, Phoma sp. C2932
MVPYYQPASSCGSNTMAAMDEHQHNEDATIPIAIIGMSCRFPGNATSPEKLWELCAQGRSAWSSIPKSRFRQEGFYNPNAERVGTSHVVGGHFLEEDPSLFDASFFNLSAEAAKTMDPQFRLQLESVYEAMESAGITLEHIAGSDTSVYAGACFRDYHDSLVRDPDLVPRFLLTGNGAAMSSNRVSHFYDLRGASMTVDTGCSTTLTALHLACQGLRNRESKTSIVTGANVILNPDMFVTMSSLGLLGPEGKSHTFDARANGYGRGEGIATVIIKRLDDALRAQDPIRCIIRGTALNQDGRTATLTSPSQTAQSDLIRACYRAAALDPNDTAFLAAHGTGTRTGDAVEIAAAADVFGEKRSPERPLWIGSVKTNIGHSEATSGLASVIQAALALEKGLIPPNINFKEPNEKLGQVSAAVRVPSNLQKWPSVSGVRRASVNNFGYGGANAHVILESGIPGHTPIANGSGRSNGTGNGHNGANGTTNGHNGTNGTTNGHFDATQATNGHYGTDETPDYAPLDSFVISISAKEEASARSMVTNLADYLRTLQVQDETKHFKSIAHTLGSHRSMFKWTAAKSITGPEELIAAAEGGQFQASRALERTRLGFVFTGQGAQWFAMGRELINTYPVFRQSLDRADRYLKEFGCEWSIIDELSRDAENSNVNDMTLSPPLCTAVQISLVQLLESWGIVPTAVTGHSSGEIAAAYAAGALDFKSAMAVTYFRGEVGLACQDKIVGKGGMIAVGLGPEDAEDRIARVQSGKIVVACINSQSSVTVSGDLSGIVELEDLLKAEGVFARRVKVQAAYHSHHMQVIANGYLTSLKDMLKPTKKFGKIIYSSPTTGRRETNAKLMASAQHWVNNMLSPVRFAESFQNMCFSNRNSSQSEEIFQDVDIVLEVGPHGMLQGPIQQMMSLPIFERARLPYISCLLRGQSAVHTMQTVAAGLMGWGYRVDMVAVNFPQGTYGVKILHDLPSYPWNHDNSHWWEPRLNKAHRQRVHPPHDLLGSLIVGRDLREPTWRHFIRVQDIPWIRDHVVQSALVYPGAGFICMAMEAMVQLHELRDSQSRKVAGYRLAEVDILRAMLIPDTSEGLEAHISLRPCSTKLLLTNEWYDFCVSSVGDDDKFVDHCRGRITIEFDTSGSADTPRTSLRERSRSTGLMRSVDPSNLYSFLRAQGIYHGPIFQNLKTISSRKDHSESSFVVANTASVMPNGFQSPHVIHPTTLDSIFQGAYTALPGAGLDQNTAMIPRSIQELYLSSALTSDVGQCLVSDTSLIRYDGQSFTVNVDVSSKADSEHTPVLEIKGLRNQSVGQMAPQPGDSSNNDLCFKLDWAPDISSVKQERLKEKFGFPLDPTEADIIMGLRQACIHFIHRSLQSLTAPDRDQLDWHQKRFYDWMVLQIQLAEEDRLAPNSSAWLQCSSSDEQKLLENVRASSVNGQMVVHVGKSMLAILRHEIAPLELMLQDKLLYRYYTDAIKWDRSYQQIDQLVKLHAHKCPTAKIIEIGAGTGGCTRAVLDALSNQGIARCAQYDFTDVSSGFFEAAQQKFAAFDDVIRFQKLDIEKDIEMQGFECGSYDLVIASQVLHATGKMEHTMANVRKLLKPGGKLLLVETTRDEMDLQLVFGLLPGWWLSSEEERQMSPSLSTNSWEKVLKKTGFDGLDIELRDCDSDEFYSFSVMMATASSTIASSSMAFAIVYGEVPLPDQFLDDMKTAISSSAVSDPVVGHLDSIDATGKFCIFIEDPETDILSSPDEKSYASIQKLVTRCKGLIWVSRGGAMHGTRPNSSLKTGLLRTLRLEYTEKRFISLDLDSARPQWNHDSITTINEVLCGALAQNADSSIKDSEFAEQDGQLFVPRISCDIARNEDLSSDSNSPAQMEPFHQPGKLLQMGIKTPGLIDTLQFSKTDATDNLPNDYIEIEPKAFGLNFRDVMVAMGQLEESIMGFECAGVVRRVGPSSAGHNIKVGDRVCALLGGQWTNTVRVHWHSVAPIPQAMDWETAASIPIVFVTAYISLVKIARMQAGETVLIHAASGGVGQAAIILAKHVGAEIFATVGTDEKRDLLIKEYKIPDDHIFSSRNALFAKSIRQRTNGKGVDVVLNCLAGGLLQESFDCLADFGRFIEIGKRDIELNHCLNMGMFARSATFTAVDLIAIGRDRSYMFAEALPKIMTLLQEKAIRPVTPISIYKIGDIETAFRLMQAGKHMGKIVITAPEDAMVPVITRPPKLQLRPDASYLIVGGLGGIGRSLCKNFVENGARSLVLLSRNANVSQQSGEFLDELRSTGCIVGVVDCDISSKTQVEATMLRLKKDMLPIRGIVHAGMVLQDSVFERMSLDDYNTAIRPKVQGSWNLHSGLSDCDLDFFIMLSSLAGVSGSASQANYTAGGAYQDALAKYRRAQGLSAVSIDLGMVQSVGYVAETKGVAERLVRMGYSPISEMEVLKIVEHAITNPPPEASSAQIITGISTKPGRHWTESSWLQDARFATLRERARDVKELSNSQGGAQDKQLAAGQELSMATSLVEAIDVVGRAITAKLATMFLIAAESIIASKSLSEYGVDSLVAVELRNWLAAQLSSDVSVFDVTQSQSLTALATTVATKSSRIDKSLLVA

SEQ ID NO: 20653 - protein, 327 aa, Salmonella enterica subsp. enterica serovar Typhi
MATRIEFHKHGGPEVLQTVEFTPTEPAEHEIQVENKAIGINFIDTYIRSGLYPPPSLPAGLGTEAAGVVSKVGSGVEHIRVGDRVVYAQSTLGAYSSVHNVPADKAAILPDAISFEQAAASFLKGLTVFYLLRKTYEVKPDEPFLFHAAAGGVGLIACQWAKALGAKLIGTVGSAQKAQRALDAGAWQVINYREESIVERVKEITGGKKVRVVYDSVGKDTWEASLDCLQRRGLMVSFGNASGPVTGVNLGILNQKGSLYATRPSLQGYITTREELTEASNELFSLIASGVIKVDVAENQRYALKDARRAHEVLESRATQGSSLLIP

SEQ ID NO: 20654 - protein, 2544 aa, Nitrosomonas europaea
MGRSINKHATDDSRSESLNTGTQESGTDKSSSSPVAIVGFAFRFPGDVSDETDFWNALKQKRDLVTQIPADRWAVDELQHDKRSEHGRSITFSAGVLSHIEEFDASFFGISPREAAVLDPQQRLLLELTWETMENAGIPPSSMAGSDCAVYVGISGFDYGMCEVDDLAVITSHSMTGNTLSIAANRISYAFDLHGPSLAVDTACSSSLVALHHACNCLRNGEASTALVGGVNLLLHPYPFVGFTKASMLSAKGRCKPFDASGDGYVRSEGAAVLLLKPLEKALADGDDVHAVILSSGVNADGARKTGITIPSSDGQAELMRAVLSRSGLSSKEVDFIEAHGTGTVVGDPVETRAIGMVYGQERTRPLPIGSVKANLGHLEPASGMAGLIKTILALKHRALPPAIHLHTPNPHIDFQALNLELIRKYKPFSRKRKKPLVAGVNSFGFGGANAHVLLKEFVPQDSKADTSSTMESLPPLFLSARTEAALRATAEHYVELLKGKSPQEFYDIAHAAAYRREQMEKRLALHTGKVDSTVDLLDRYAKGDMVSRVFVEDELPQSGGVAFVYSGNGTQWAGMGRALLAESPRFKEILSEIDEIMLPQAGFSLITELEAEDTNSRLDDTRVAQPLLFAIQVGVTTLLREQGIEPSAVTGHSVGEIAAAWASGALDLQQAIHVICVRSQAQGLTRGKGRMAAVGLSVEAIQEIITTLGVDAEVEIAGINSPGNVTLSGPLEDLQQIQSVAESRGIFFRLLDLDYAFHSRQMDAIEEPLIRQLGELAPAYTERATFVSTVTGNEIDGRLLDAGYWWRNVRQPVQFAAAINRIAGLGCRILIEIGPHAILQRYMGECLAAAEVQGRVIPTLRRDDNGLQRITETVLRTQLLAERPSLQTYFSVPGRRVRLPNYPWQRERHWIPWTNEGLHSLDRRRVHPLLGWRIPGVDTLWENTLDPVTLPWLADHKVGGAIVYPGAAYAEMSLAAAREWLGGKHFTVEQLDIISPMVFDGEHARTTHLILNPRDGGFQIKSRQRLSDDEWTLHASGRILEAVNRIPVARIDAPAVSAEHVGHEIHYQRASQLGLDYGPGFQGVSNINIAAERLEATLSCPELQHFDDYLLHPAILDLCFQSLIDFFGEAIDAGQGIALLPVKMGKLNFCGNGKVAFLRARLCRHGTRSALADFELLDNQNNLIASASACRFRAAHLKRHVQQNISNWRIVPWLKPHPLDGMTTAMPPVAGLIEQVRAQFDRVKHDRHTLFKEILPLTEALTLSFAWQAVRQIQQYRPLDWQQIFDGSHATAHARWLANLLITEGLLNKDDAGQWFVTIDADLPSPETVWQTLLNDFPVYLPQLMLMGRVGQQLPALLCGETDALKLLNELKHSPVAEMRYHDDPVYLGMRLALEEIFRNLAGSWPVSRRLRILEITAGSSELPKILTGSLPEDRFDYVLALPDEAMQARQQIEYQEDASIVVARYEPATLKLSADRRLPDAFDVIVLHHALHRTNSPHTALAQIRHLLAAGGILLLAEQHSDWSTNFLEGIDPGWWRQRNKTPDLPVSPLLSPATWQQLLKDAGFTDTETFFEPAAEGLAEGAYLLLARCPARDSAIIPEPVTASWLLVADESSATLARHLSNRLQSSGQQVTITSRIDDDLLQNTDHIVHLPGWNDTPDQAADTVTRLMEDVKLLAARIGKTPQFWLVTRGGTLISGCPAESESSPAQSALWGFGRVVMNEYPQLACTLIDLVCNPATVNLADRLVNELLVPDGSNEIVLSAAARYCLVMQEATNQQIRTTEQSEKKDERFHLDFHVPGQLRNLVWLPDVKRQLGDDEVEVCTRATGLNFRDVMYLMGLLPDEAVENGFAGASLGLEFSGIISRVGARVKGLLPGDAVMGFGSSCFASHVITRADAVAPMPENWSFEAAATVPTVFLTVYYALKQLAALQPGERVLIHGAAGGVGIAAIQLARYLGAEIYATAGSDEKRDFVKLLGADHVFDSRSLAFADDILDATAGEGVDVVLNSLAGEAMRRSIDVLKPFGRFLELGKRDFFENTPVGLRPFKNNISYFGIDADQLLTARPRLAVQLFHEVMALFREQALAPLPYRVFSANRITDAFRVMQQARHIGKIVVSLADARPDIEQPLQPVPAIRFERNSTWLVTGGLSGFGLESARWLAERGVDHLVLAGRRGMDTPGAKEIIETFAVQGVKVIAQACDITHAAAVDTLIERIGKTLPPLKGVLHAAAVFDDQLISSLDQKRISNVMDAKLLGAWHLHQATLGTPLDYFILYSSVTTAIGNPGQANYVAANAGLEGLAAMRRHMGLPATCIAWGPVSDTGYLARNQAVRDSLEQRLGKPPLPAAEALTQLDVALNDETGFVIPADFDWNTLSHLLPSASGNRFAILNRNRRSTSQTTESIDIRTFIIGKTRAEVTEIVRGFVVEEVAQILSISPDRIESGRSLHDHGMDSLMAVELALGLERRFGIQLPVMMLNDAPTIHTVTARIVEKLTNKGDMPEGEQSVSQVTEFIRQHGEELMPEEIDILSEDVRHFAQQGTSLIA

SEQ ID NO: 20655 - protein, 336 aa, Ferroplasma acidarmanus
MQAGFLNKLNSEIILEDYEPPEPGDNEVTIEQKYTGVCFRDILTQQGFFPRVSLPVIPGHEIGGTIIKKGKNVKDFNIGDRVSSLIYVPCGKCEFCLSGNENLCPNKVAYGEGRNGGYSRYVNADERSLVKVPPEVPEETVPIAACVIAMLYHAIGRVGKIKKGDYVLITGAGGGVGVHAVQMVKALGGHPIAETGSKWKEEELYKLGAEYVVSPEREYNKDVKEITGQGADIVLEDVGIATFSKSLRSLKTGGRLVVIGNLKPEPVELPLGLIILKGNSIKGSISSTRDDLKKALELSKSQISPVIGNKIELQDINDGYANMLDRKVLGRLLIKF

SEQ ID NO: 20656 - protein, 337 aa, Cytophaga hutchinsonii
MKAIGFKRSLPITDTNSFILFETDKPVASGRNLLVKIQAISVNPVDFKVRQNSAKEAELETPKIIGWDAVGIVEEIGNEVSLFKKGDTVFYAGELTKPGTNAEYQLVDERIVGLAPESLSLAEAAALPLTALTAWEILFDRIRIQPDKDKGKSILIIGGAGGVGSIAIQLAKKVAGLTVIATASRPETKQWCKDLGADHVVNHADLLTEMQSIGFKQVDFILDFVDANAYWDVMAELIKPQGHIASITGSATPVALNKLKNKSVSFSWELMFTRAMFNTDDMIEQHEILTKVAALIDKKEIRTTLKQVLKGFTVENLKQAHVLLESGKTIGKVVIEF

SEQ ID NO: 20657 - protein, 327 aa, Salmonella typhimurium LT2
MATRIEFHKHGGPEVLQTVEFTPAEPAEHEIQVENKAIGINFIDTYIRSGLYPPPSLPAGLGTEAAGVVSKVGNGVEHIRVGDRVVYAQSTLGAYSSVHNVTADKAAILPDAISFEQAAASFLKGLTVFYLLRKTYEVKPDEPFLFHAAAGGVGLIACQWAKALGAKLIGTVGSAQKAQRALDAGAWQVINYREESIVERVKEITGGKKVRVVYDSVGKDTWEASLDCLQRRGLMVSFGNASGPVTGVNLGILNQKGSLYATRPSLQGYITTREELTEASNELFSLIASGVIKVDVAENQRYALKDARRAHEVLESRATQGSSLLIP

SEQ ID NO: 20658 - protein, 210 aa, Ovis aries
PDAIPGKWASRNCMLGMESSGRDASGKRVMGLVPAEGLATSTLVPQSFLWDVPSNWTLEEAASVPVVYSTAYYALIVRGRMQPGETVLIHSGSGGVGQAAIAIALSLGCRVFTIVGSAEKRAYLQSRFPQLNETSFANSRDTSFEQHVLWHTAGKGVDLVLNSLAEEKLQASVRCLAQHGRFLEIGKFDLSNNHPLGMAIFLGNVTGHGI

SEQ ID NO: 20659 - protein, 400 aa, Rhodopseudomonas palustris
MMNIHSVKGQKIAAGERTQEVDHPHSLVAQFGADQPLPLDCGIELSPFQIAYQTYGTLNADKSNAILVCHALTMDQHIANVHPITGKPGGWLTLVGPGKPIDTDRYFVICSNVIGGCMGSTGPASINPATGKAWGLDFPVITIPDMVRAQAMLIDRFGIDKLFCVVGGSMGGMQVLQWSVAFPERVFSALAIACATRHSAQNIAFHELGRQAVMADPDWQHGRYFEHGCFPHRGLAVARMAAHITYLSDAALHRKFGRKMQDRELPTFSFDADFQVESYLRYQGSSFVERFDANSYLYLTRAMDYFDIAADHDGVLAAAFRGTQTRFCVVSFTSDWLFPTSESRAIVHALNAGGARVSFAEIVTDKGHDAFLLDEPEFIDIARAFLQSAGTARGLGKAEH

SEQ ID NO: 20660 - protein, 391 aa, Rhodospirillum rubrum
MNVLPAASQPLNQSVTLCVDAPMRLDSGLELGPLTVAYQTIGRLNAERTNAILICHALTGDQHVIGPHPVTGRPGWWETLVGPGKTIDTDRYFIICSNVLGGCLGTTGPKEINPATGKPWGLGFPVITIGDMVRAQALLLDHLGIERLFCAIGGSMGAMQVLQWAVSYPERVRAVVPIAGSWRHSAQNIAFHEVGRQAIMADPDWNGGDYLNQGTVPRRGLAVARMTAHITYLSEPALQSKFGRKLQDRASITYGFDADFQVESYLRHQGANFVKRFDANSYLYITRAMDYFDLAAEHDGVLARAFQGTKVRFCVVSFTSDWLFPTAESRAVVRAMNAAAADVSFVEVTTDKGHDAFLLDEPEFHDTLQGFLDGAADMFGLPRGLFSGIRP

SEQ ID NO: 20661 - protein, 132 aa, Rhodospirillum rubrum
VPRRGLAVARMTAHITYLSEPALQSKFGRKLQDRASITYGFDADFQVESYLRHQGANFVKRFDANSYLYITRAMDYFDLAAEHDGVLARAFQGTKVRFCVVSFTSDWLFPTAESRAVVRAMNAAAADVSFVE

SEQ ID NO: 20662 - protein, 407 aa, Chloroflexus aurantiacus
MEAIVQAPTPEGVGIVRTQRMHWTTPLTLTSGATLGPITLAYETYGELAPDRSNAILILHALSGDAHAAGFHSPTDRKPGWWDAMIGPGRPFDTNRYFVICSNVIGGCRGSTGPSSPHPSDGRPYGSRFPLITIEDMVHAQQRLIDALGIDTLLAVAGGSMGGFQALAWTVEYPQRVRGAILLATSARSSPQTVAWNYIGRRAIMADPRWRGGDYYDSDAPRDGLAVARMLGHITYLCEEKLEQRFGRRVDGDALDLGPRFAIEHYLEHQAARFNDRFDANSYLVITRAMDNWDLTARYGSLTAAFDLTRARFLALAYSSDWLYPPAETYQMAAAAQAAGRSFTTHLITTDAGHDAFLTDVACAERADPRFSEQTDDRIVWRMGCFFNSFFMTHTGCACTDLLHKCM

SEQ ID NO: 20663 - protein, 390 aa, Ralstonia metallidurans
MTDVAPPAGVLDVPTDSVGVVTPQRMHFSEPLQLRNGSQIADYDLMVETYGTLNAARTNAVLVCHALNASHHVAGIAADNPRDIGWWDNMVGPGKPLDTNRFFVIGVNNLGSCFGSTGPMSTNPSTGAPYGALFPVVTVEDWVNAQARVADIFGIQQFAAVMGGSLGGMQALAWSLMYPERLRHCIVVASTPKLSAQNIAFNEVARSSILSDPDFHGGNYYAHNVKPKRGLRVARMIGHITYLSDEDMAEKFGRSLKAEDIRFSFDVEFQVESYLRYQGDKFAEYFDANTYLLITRALDYFDPALAHGGDLTRAMAQTQAGFLVVSFTTDWRFAPNRSREIVKALLDNKRPVSYAEIDAPHGHDAFLLDDARYHNLMRAYYDRIAEEIGA

SEQ ID NO: 20664 - protein, 379 aa, Neisseria meningitidis MC58
MSQNASVGIVMPQKIPFEMPLVLENGKTLPRFDLMIETYGELNAEKNNAVLICHALSGNHHVAGRHSAEDKYTGWWDNMVGPGKPIDTERFFVVGLNNLGGCDGSSGPLSINPETGREYGADFPVVTVKDWVKSQAALADYLGIEQWAAIVGGSLGGMQALQWTISYPERVRHALVIASAPKLSTQNIAFNDVARQAILTDPDFNEGHYRSHNTVPARGLRIARMMGHITYLAEDGLGKKFGRDLRSNGYQYGFGVEFEVESYLRYQGDKFVGRFDANTYLLMTKALDYFDPAADFGDSLTRALQNVKAKFFVASFSTDWRFAPERSHELVKALIAAQKSVQYIEVKSAHGHDAFLMEDEAYMRAVAAYMNNVYKECQQ

SEQ ID NO: 20665 - protein, 379 aa, Neisseria meningitidis Z2491
MSQNASVGIVTPQKIPFEMPLVLENGKTLPRFDLMIETYGELNAEKNNAVLICHALSGNHHVAGRHSAEDKYTGWWDNMVGPGKPIDTERFFVVGLNNLGGCDGSSGPLSINPETGREYGADFPVVTVKDWVKSQAALTDYLGIGQWAAVVGGSLGGMQALQWTISYPERVRHALVIASAPKLSTQNIAFNDVARQAILTDPDFNEGHYRSRNTVPARGLRIARMMGHITYLAEDGLGKKFGRDLRSNGYQYGYGVEFEVESYLRYQGDKFVGRFDANTYLLMTKALDYFDPAADFGNSLTRAVQDVQAKFFVASFSTDWRFAPERSHELVKALIAAQKSVQYIEVKSAHGHDAFLMEDEAYMRAVAAYMNNVYKECQQ

SEQ ID NO: 20666 - protein, 334 aa, Deinococcus radiodurans
MTAVLAGHASALLLTEEPDCSGPQTVVLFRREPLLLDCGRALSDVRVAFHTYGTPRADATLVLHALTGDSAVHEWWPDFLGAGRPLDPADDYVVCANVLGGCAGTTSAAELAATCSGPVPLSLRDMARVGRALLDSLGVRRVRVIGASMGGMLAYAWLLECPDLVEKAVIIGAPARHSPWAIGLNTAARSAIALAPGGEGLKVARQIAMLSYRSPESLSRTQAGQRVPGVPAVTSYLHYQGEKLAARFDEQTYCALTWAMDAFQPSSADLKAVRAPVLVVGISSDLLYPAAEVRACAAELPHADYWELGSIHGHDAFLMDPQDLPERVGAFLRS

SEQ ID NO: 20667 - protein, 381 aa, Burkholderia fungorum
MESIGIVAPQKMHFTEPLPLQNGSSLAGYDLMVETYGTLNAARSNAVLVCHALNASHHVAGVYADNPRDIGWWDNMVGPGKPLDTDKFFVIGVNNLGSCFGSTGPMSIDPSTGNPYGATFPVVTVEDWVNAQARVADQFGITRFAAVMGGSLGGMQALAWSMMYPERVAHCIVVASTPKLSAQNIAFNEVARSAILSDPDFHGGNYYAHNVKPKRGLRVARMIGHITYLSDDDMAEKFGRSLRRAEGALDAYNFNFDVEFEVESYLRYQGDKFADYFDANTYLLITRALDYFDPAKAFAGDLTAAVAHTTAKYLIASFTTDWRFAPARSRELVKALLDHKRTVTYAEIDAPHGHDAFLLDDARYHNLMRAYYERIANEVNA

SEQ ID NO: 20668 - protein, 384 aa, Burkholderia fungorum
MSPTASFSWMAARSSSKGHRSRSSTTRLTSAPENSLTSSPIKYEAHMTDFETFNLGRVALQSGATMPDMLLSYKTYGRLNAARDNAIVYPTFYSGSHADNEWLIGEHMGLDPREYFIIVPNMFGNGVSSSPSNNPPPYDRGRFPHVTLYDNVAMQHRLVTEKFGIESLRLVTGWSMGAMQAFHWAAMYPQMVERILPFCGAARCSRHNFVFIEGLKAPLLLDPEFKDGFYDAPPTRGMRAAARVFAGWGFSQAFLRQRLDMEAMGYGSLEDFITQFWEGDFLKKDANNILSMMWSWQYGDISANPLYQGDFDRALGSITAKAIVMPGRTDLYFPPEDSEYEVSKMPNAQLRPIESVWGHFAGGPAANAVDIRFIDSAVREILAG

SEQ ID NO: 20669 - protein, 230 aa, Bacillus cereus
MQIVKKEKFVLKEFTFENGREIPVQMGYETYGTLNRERSNVILVCHYFSATSHAAGKYTVHDEESGWWDGLIGPGKAIDTNKYFVICTDNLCNVQVRNPYVITTGPKSINPETGEEYAMEFPVFTFLDVARMQYELIKGMGISRLHAVIGPSAGGMIAQQWAVHYPHMVERMIGVITNPQNPIITSVNVAQNAIEAIQLDPSWKEGKYGEQQPIKGLHLANRMMFMNAFD

SEQ ID NO: 20670 - protein, 370 aa, Xylella fastidiosa Dixon
MTEFIPPGSLFHALSSPFAMKRGGQLHHARIAYETWGRLNASATNAILIMPGLSPNAHAAHHDSNAEPGWWESMLGPGKPIDTDRWFVICVNSLGSCKGSTGPASYNPITQAMYRLDFPALSIEDGANSAIEVVHALGIKQLASLIGNSMGGMTALAILLLHPDIARSHINISGSAQALPFSIAIRSLQREAIRLDPHWRQGDYDDTHYPESGLRIARKLGVITYRSALEWDGRFGRVRLDSDQTNDTPFGLEFQIENYLESHAHRFVHTFDPNCYLYLSRSMDWFDVAEYANGDILAGLARIRIQRALAIGSHTDILFPIQQQQQIAEGLRRGGTHATFLGLDSPQGHDAFLVDIARFGPPVKEFLDEL

SEQ ID NO: 20671 - protein, 340 aa, Xylella fastidiosa Dixon
MRSVNPSFTFCLDMPTPDDDGQIAVRGEIMVPLSMCHAGWVDLRLRYELIGCAAGPVVFVLGGISAHRHIAATARFPEKGWLEGLVGTERALNPERFRLLSFDFLGADGQLDVPIDTADQADAIALLLERLGIATLYGFVGYSYGALVGLQFAIRHSERVRRMIVVSGAHRAHPYAAAWRALQRRAVALGQLQCAEHQGLALARQLAMLSYRTPEEFEERFDAAAQVINGRVRVAAEDYLDAVGAQYVACTPVNAYLRLSESIDLHRVDPTQVVVPTVVVAVEGDRLVPLSDLVALIEGLGPCGSLRVLRSPYGHDAFLKEINRIDAILTTALRPIGESI

SEQ ID NO: 20672 - protein, 370 aa, Xylella fastidiosa Ann-1
MTEFIPPGSLFHALSSPFAMKRGGQLHHARIAYETWGRLNASATNAILIMPGLSPNAHAAHHDSNAEPGWWESMLGPGKPIDTDRWFVICVNSLGSCKGSTGPASYNPITQAMYRLDFPALSIEDGANAAIEVVHALGIKQLASLIGNSMGGMTTLAILLLHPDIARSHINISGSAQALPFSIAIRSLQREAIRLDPHWKQGDYDDTHYPESGLRIARKLGVITYRSALEWDGRFGRVRLDSDQTNDTPFGLEFQIENYLESHAHRFVHTFDPNCYLYLSRSMDWFDVAEYANGDILAGLARIRIQRALAIGSHTDILFPIQQQQQIAEGLRRGGTHATFLGLDSPQGHDAFLVDIAGFGPPVKEFLGEL

SEQ ID NO: 20673 - protein, 340 aa, Xylella fastidiosa Ann-1
MRSVNPSFTFCLDMPTPDDDGQIAVRGEIMVPLSMCHAGWVDLRLRYELIGCAAGPVVFVLGGISAHRHIAATARFPEKGWLEGLVGTERALNPERFRLLSFDFLGADGQLDVPIDTADQADAIALLLERLGIATLYGFVGYSYGALVGLQFAIRHSERVRRMIVVSGAHRAHPYAAAWRALQRRAVALGQLQCAEHQGLALARQLAMLSYRTPEEFEERFDVAAQVINGRVRVAAEDYLDAVGAQYVACTPVNAYMRLSESIDLHRVDPTQVVVPTVVVAVEGDRLVPLSDLVALIEGLGPCGSLRVLRSPYGHDAFLKETNRIDAILTTALRPIGESI

SEQ ID NO: 20674 - protein, 394 aa, Magnetococcus sp. MC-1
MTHEPLTASVGIVTPQHVRLFGASTPLQLDGGTLLHSVDVSYETYGTLNQERSNAVLICHALSGNAHAAGYHSKDDKRPGWWDHYIGPGKPFDTNRYFVIASNNLGGCDGTTGPSSIDPATGMPYGLNFPMITIGDIVRVQHALVRQLGIERLMAVVGGSMGGMQALQWALDYPHMVPASVIIAAAPRLTAQNIAFNAVARQAIMADPHFNGGDYYTLPGDPTTKARPESGLALARMMAHITYLSEQGLHERFGRRLQDRDALSYGFETDFAVESYLSYQGSSFVKRFDANSYLYITKAMDYFDPFPDAETTVQRLTGVESHFLVMSFDTDWRFDTSRSKELVRILHRSLKDCTFQEFSSPAGHDAFLLPHPSYEKSLGSFLLRTWQSITGGQA

SEQ ID NO: 20675 - protein, 329 aa, Staphylococcus aureus subsp. aureus Mu50
MFKEERTMTNYTVDTLNLGKFITESGEVIDNLRLRYEHVGYHGQPLVVVCHALTGNHLTYGTDDYPGWWREIIDGGYIPIHDYQFLTFDVIGSPFGSSSPLNDPHFPKKLTLRDIVRANERGIQALGYDKINILIGGSLGGMQAMELLYNQQFEVDKAIILAATSRTSSYSRAFNEIARQAIHLGGKEGLSIARQLGFLTYRSSKSYDERFTPDEVVAYQQHQGNKFKEHFDLNCYLTLLDVLDSHNIDRGRTDVTHIFKNLETKVLTMGFIDDLLYPDDQVRALGERFKYHRHFFVPDNVGHDGFLLNFSTWAPNLYHFLNLKHFKRK

SEQ ID NO: 20676 - protein, 379 aa, Pseudomonas putida KT2440
MSTVFPEDSVGLVVPQTARFDEPLALACGRSLASYELVYETYGTLNASASNAVLICHALSGHHHAAGYHAATDRKPGWWDSCIGPGKPIDTNRFFVVSLNNLGGCNGSTGPSSVNPATGKPYGADFPVLTVEDWVHSQVRLGERLGIQQWAAVVGGSLGGMQALQWTISYPERVRHCVDIASAPKLSAQNIAFNEVARQAILTDPEFHGGSFQDQGVIPKRGLMLARMVGHITYLSDDSMGEKFGRELKSDKLNYDFHSVEFQVESYLRYQGEEFSGRFDANTYLLMTKALDYFDPAATHGGDLAATLAHVTADYCIMSFTTDWRFSPARSREIVDALMAARKNVCYLEIDSPYGHDAFLIPTPRYMQGFSNYMNRIAI

SEQ ID NO: 20677 - protein, 370 aa, Xylella fastidiosa 9a5c
MTEFIPPGSLFHALSSPFPMKRGGQLHRARIAYETWGHLNASATNAILIMPGLSPNAHAAHHDSNAEPGWWESMLGPGKPIDTDRWFVICVNSLGSCKGSTGPASYNPITQAMYRLDFPALSIEDGANAAIEVVHALGIKQLASLIGNSMGGMTALAILLLHPDIARSHINISGSAQALPFSIAIRSLQREAIRLDPHWNQGHYDDTHYPESGLRIARKLGVITYRSALEWDGRFGRVRLDSDQTNDTPFGLEFQIENYLESHAHRFVHTFDPNCYLYLSRSMDWFDVAEYANGDILAGLARIRIQRALAIGSHTDILFPIQQQQQIAEGLRRGGTHATFLGLDSPQGHDAFLVDIAGFGPPVKEFLDEL

SEQ ID NO: 20678 - protein, 345 aa, Xylella fastidiosa 9a5c
MLETAMRSVNPSFTFCLDMPTPDDDGQIAVRGEIMVPLSMCHAGWVDLRLRYELIGCAAGPVVFVLGGISAHRHIAATARFPEKGWLEGLVGTERALNPERFRLLSFDFLGADGQLDVPIDTADQADAIALLLERLGIATLYGFVGYSYGALVGLQFAIRHSERVRRLIVVSGAHRVHPYAAAWRALQRRAVALGQLQCAEHQGLALARQLAMLSYRTPEEFEERFDAAAQVINGRVRVAAEDYLDAVGAQYVACTPVNAYLRLSESIDLHRVDPRQVVVPTVVVAVEGDRLVPLSDLVALIEGLGPCGSLRVLRSPYGHDAFLKETNRIDAILTTALRPIGESI

SEQ ID NO: 20679 - protein, 368 aa, Listeria innocua
MTLQQKELFQKSPLLLENGETLSPVLVGYETYGTLSASRDNCILLEHALTGTAHAAKHFEDDAPGWWDDYIGPGKTIDTDKYFLVCTNVFGGCSGTTGPSSINPKTGEPFRLQFPGFSIKDIIKVQRELLEQLGVTRIVSVIGGSMGGMQATEWAIDYADITDSIINIASPLAAGPDAIGYNLIMRMAILNDPDFNGGNYIGQPEGGLATARMVGMMTYRTSELFSKRFERFTVAESSPAAFSKEHFQIESYLQYQGDTFVERFDANSYLYLTKAIDLFDVTAPAKDDLPAFSKIKIPYLLIGITTDQLFRIHDLRRGYELLKEWDVPVTYHEVASEYGHDAFLVEKEVPKFEPLIRSFLNNLPVKSI

SEQ ID NO: 20680 - protein, 368 aa, Listeria monocytogenes EGD-e
MTLQQKELFQKSPLLLENGETLSPVLVGYETYGTLSASRDNCILLEHALTGTAHAAKHFEDDAPGWWDDYIGPGKTIDTDKYFLVCTNVFGGCSGTTGPSSINPKTGEPFRLQFPGFSIKDIIKVQRELLEQLGVTRIVSVIGGSMGGMQATEWAIDYADITDSIINIASPLAAGPDAIGYNLIMRMAILNDPDFNGGNYVGQPEGGLATARMVGMMTYRTSELFSKRFERFTVAESSPAAFSKEHFQIESYLQYQGDTFVERFDANSYLYLTKAIDLFDVTAPAKDDLPAFSKIKIPYLLIGITTDQLFRIHDLRRGYELLKEWDVPVTYHEVASEYGHDAFLVEKEVPKFEPLIRSFLSNLPVKSI

SEQ ID NO: 20681 - protein, 379 aa, Corynebacterium glutamicum
MPTLAPSGQLEIQAIGDVSTEAGAIITNAEIAYHRWGEYRVDKEGRSNVVLIEHALTGDSNAADWWADLLGPGKAINTDIYCVICTNVIGGCNGSTGPGSMHPDGNFWGNRFPATSIRDQVNAEKQFLDALGITTVAAVVLLGGSMGGARTLEWAAMYPETVGAAAVLAVSARASAWQIGIQSAQIKAIENDHHWHEGNYYESGCNPATGLGAARRIAHLTYRGELEIDERFGTKAQKNENPLGPYRKPDQRFAVESYLDYQADKLVQRFDAGSYVLLTDALNRHDIGRDRGGLNKALESIKVPVLVAGVDTDILYPYHQQEHLSRNLGNLLAMAKIVSPVGHDAFLTESRQMDRIVRNFFSLISPDEDNPSTYIEFYI

SEQ ID NO: 20682 - protein, 322 aa, Staphylococcus epidermidis ATCC 12228
MTNYTVNTLELGEFITESGETIDHLRLRYEHVGLPGQPLVVVCHALTGNHLTYGTDAQPGWWREIIDGGYIPVHDYQFLTFNVIGSPFGSSSKLNDDNFPEHLTLRDIVRAIELGIQALEFKKINILIGGSLGGMQAMELLYNRQFEVEKAIILAATDKTSSYSRAFNEIARQAIHIGGKEGLSIARQLGFLTYRSSKSYDQRFTPDEVVSYQQHQGDKFKEYFDLNCYLTLLDVLDSHHLDRGRDDVDEVFQSLETKVLTMGFIDDLLYPDDQVRALGERFKYHRHFFVPDNVGHDGFLLNFNDWAPNLYHFLNLKQFRRK

SEQ ID NO: 20683 - protein, 382 aa, Mycobacterium leprae
MTISKVPTQKLPAEGEVGLVDIGSLTTESGAVIDDVCIAVQRWGELSPTRDNVVMVLHALTGDSHITGPAGPGHPTPGWWDWIAGPGAPIDTNRWCAIATNVLGGCRGSTGPSSLARDGKPWGSRFPLISIRDQVEADIAALAAMGITKVAAVVGGSMGGARALEWIIGHPDQVRAGLLLAVGVRATADQIGTQTTQIAAIKTDPNWQGGDYYETGRAPENGLTIARRFAHLTYRSEVELDTRFANNNQGNEDPATGGRYAVQSYLEHQGDKLLARFDAGSYVVLTETLNSHDVGRGRGGIGTALRGCPVPVVVGGITSDRLYPLRLQQELAEMLPGCTGLQVVDSTYGHDGFLVESEAVGKLIRQTLELADVGSKEDACSQ

SEQ ID NO: 20684 - protein, 370 aa, Xylella fastidiosa Temecula1
MTEFIPPGSLFHALSSPFAMKRGGQLHHARIAYETWGRLNAGATNAILIMPGLSPNAHAAHHDSNAEPGWWESMLGPGKPIDTDRWFVICVNSLGSCKGSTGPASYNPITQAMYRLDFPALSIEDGANAAIEVVHALGIKQLASLIGNSMGGMTALAILLLHPDIARSHINISGSAQALPFSIAIRSLQREAIRLDPHWKQGHYDDTHYPESGLRIARKLGVITYRSALEWDGRFGRVRLDSDQTNDTPFGLEFQIENYLESHAHRFVHTFDPNCYLYLSRSMDWFDVAEYANGDIIAGLARIRIQRALAIGSHTDILFPIQQQQQIAEGLRRGGTHATFLGLDSPQGHDAFLVDIAGFGPPVKEFLDEL

SEQ ID NO: 20685 - protein, 345 aa, Xylella fastidiosa Temecula1
MLETAMRSVNPSFTFCLDMPTPDDDGQIAVRGEIMVPLSMCHAGWVDLRLRYELIGCAAGPVVFVLGGISAHRHIAATARFPEKGWLEGLVGTERALNPERFRLLSFDFLGADGQLDVPIDTADQADAIALLLERLGIATLYGFVGYSYGALVGLQFAIRHSERVRRMIVVSGAHRAHPYAAAWRALQRRAVALGQLQCAEHQGLALARQLAMLSYRTPEEFEERFDVAAQVINGRVRVAAEDYLDAVGAQYVACTPVNAYMRLSESIDLHRVDPTQVVVPTVVVAVEGDRLVPLSDLVALIEGLGPCGSLRVLRSPYGHDAFLKETNRIDAILTTALRPIGESI

SEQ ID NO: 20686 - protein, 394 aa, Magnetospirillum magnetotacticum
MSLNETVPTVSPNALGLKVELGRDRPIRLDCGVELGPIQVAYQTYGSLNADKSNAILICHALTGDHYVADPHPITAKPGWWSELVGPGRVFDTDRYFLICSNVLGGCMGTTGPMDENQETGQPWGLDFPVITIGDMVKVQARLVDHLGIDQLFCVVGGSMGGMQVLKWAQTYPERVFSAIPIAAAARHSAQNIAFHEVGRQAIMADPDWCDGNYLKEGKRPHRGLAVARMAAHITYLSEPALHQKFGRNLQNRDTVTYGFDADFQVESYLRHQGSTFVDRFDANSYLYITRAMDYFDLAAENGGVLANAFRGTRTRFCVVSFTSDWLFPTSESRAVVHALNAVAANVSFVEIKSDKGHDAFLLDEPEFHATLTGFLDGAAAHRGLPRQTSGAGP

SEQ ID NO: 20687 - protein, 540 aa, Methanosarcina acetivorans C2A
MAVSSGNSSVNSSKKLFSGKKGQSIGIVRSMNYKIPGTFGLESGKTLSGVRVEYEMYGKMNADKSNVILICHALTGDAHAAGFHEGDKKPGWWEIVIGPNKAFDTEKYCVICSNILGGCKGSTGPSSIDPETGKHYGISFPVITVKDMVNAQKKLIEHLGVKQLFAVAGGSMGGMQVLQWTVSYPEMVRKAIAIATTASTTPQQIAFGAIGRKAITDDPKWNGGDYYGKEIPSQGLALARMIGHITYLSDASMQNKFGRLQQDTDKSGIKGTTGTEGKNSSEISSEISSISSEISSELSYDFTPNFQVESYLNYKGDNFTKRFDANSYLYITKAVDYFDLAKNGSLIEGFSGVTAKYLVISISSDWLYPPYQSQEIVSALTANGVDARYEEIRSQHGHDAFLLEEGQLSYLLRSFLSHILVSDVMNRNFYTVSRDETIEHSSKLMVKECVSHLPVISEDGKLEGIVTSWDITKAVACKINELDEIITRDVKYVYEDEKIEHASSIMEKHSISALPVIDSEHRIIGIVTSESISALFGKYD

SEQ ID NO: 20688 - protein, 366 aa, Leptospira interrogans serovar lai str. 56601
MNETGSIGIIETKYAEFKELILNNGSVLSPVVIAYETYGTLSSSKNNAILICHALSGDAHAAGYHSGSDKKPGWWDDYIGPGKSFDTNQYFIICSNVIGGCKGSSGPLSIHPETSTPYGSRFPFVSIQDMVKAQKLLVESLGIEKLFCVAGGSMGGMQALEWSIAYPNSLSNCIVMASTAEHSAMQIAFNEVGRQAILSDPNWKNGLYDENSPRKGLALARMVGHITYLSDDKMREKFGRNPPRGNILSTDFAVGSYLIYQGESFVDRFDANSYIYVTKALDHYSLGKGKELTAALSNATCRFLVVSYSSDWLYPPAQSREIVKSLEAADKRVFYVELQSGEGHDSFLLKNPKQIEILKGFLENPN

SEQ ID NO: 20689 - protein, 328 aa, Streptomyces clavuligerus
MECRIFEIDELPLLDGEVLRDARIGYAMYGTPNADGTNVVLCPSFFGRDHTGYDWLIGAGLPLDTRRYCVVTAGLFGNGVSSSPGNHPSGSRFPLITPQDNVAAQHRLLTEELGVRELALVTGWSMGAAHAYQWAVSHPGMVRRIAPICGAPVSSPHSLVLLSGLAAALSADAGERGRKAAGRVFAGWGTSRSFWARRAHRELGFATREEYLTGFWEQVFLSGPGAADLLTMVRTWENTDVGATPGAGGSVEAALASVTARAVVLPGALDVCFAVEDEKRVADLLPYASLEVIPGVWGHLAGSGGSAADREFIGGALRRLLDSPVDGG

SEQ ID NO: 20690 - protein, 380 aa, Xanthomonas campestris pv. campestris str. ATCC 33913
MTEFIPTGTRFHALPSPLPMKRGGVLHQARVAYETWGTLDADHGNAVLIVTGLSPNAHAAANADNPEPGWWEAMVGPGKPIDTDRWFVVCVNSLGSCKGSTGPASIDPATGAPYRLSFPELSIEDVADAAADVVRALGIAQLACLIGNSMGGMTALALLLRHPGIARSHINISGSAQALPFSIAIRSLQREAIRLDPHWNGGHYDDVQYPESGMRMARKLGVITYRSALEWDGRFGRVRLDSELTAEDPFGLEFQVESYLEGHARRFVRFFDPNCYLYLSRSMDWFDLAEYAPDTRADAAAPESGVLAGLAQIRIARALAIGANTDILFPVQQQEQIAEGLRAGGADAQFLGLDSPQGHDAFLVDFARFGPAVRAFLADC

SEQ ID NO: 20691 - protein, 343 aa, Xanthomonas campestris pv. campestris str. ATCC 33913
MSLVTTASPLTTADTYTPAADSDAPPAVRGELVINLPMRHAGQRELRLRYELVGAEQAPVVFVAGGISAHRHLAASAVFPEKGWVEGLVGAGRALDPASRRLLAFDFLGADGSLDAPIDTADQADAIAALLDALGIARLHGFVGYSYGALVGLQFASRHAARLHTLVAVSGAHRAHPYAAAWRALQRRAVALGQLQCAEHHGLALARQFAMLSYRTPEEFSERFDAPPELINGRVRVAAEDYLDAAGAQYVARTPVNAYLRLSESIDLHRIDPAAVAVPTVVVAVEGDRLVPLADLVSLVEGLGPRGSLRVLRSPFGHDAFLKEIDRIDAILTTALRTTGETA

SEQ ID NO: 20692 - protein, 400 aa, Xanthomonas axonopodis pv. citri str. 306
MTEFIPAGTLYHALPSPFPMKRGGVLHQARVAYETWGTLAADRSNAILIVTGLSPNAHAAANQANPEPGWWEAMLGPGKPIDTARWFVVCVNSLGSCKGSTGPASVNPDTGAPYRLSFPDLSIEDVADAAADVVHALGIAQLACLIGNSMGGMTALALLLRHPGIARSHINISGSAQALPFSIAIRSLQREAIRLDPHWNGGHYDDVRYPESGMRMARKLGVITYRSALEWDGRFGRVRLDSEQAADDPFGLEFQVESYLEGHARRFVRFFDPNCYLYLSRSMDWFDLAEYVEERPVAGSAIDNARADARPASAKPQTGVSTADTVLAGLARIRIARALAIGANTDILFPVQQQEQIADGLRAGGADAQFIGLDSPQGHDAFLVDFARFGPAVSDFLQDC

SEQ ID NO: 20693 - protein, 343 aa, Xanthomonas axonopodis pv. citri str. 306
MSLVNTASPSTNDFVDTPASSDDGITAVRGELVIALPMRHAGMRELRLRYELIGAANAPVVFVAGGISAHRHLAASNLFPEKGWVDGLVGSGRALDPASRRLLAFDFLGADGILDAPIDTADQADAIAALLDALGIGRLHGFVGYSYGALVGLQFAIRHEARVGTLVAVSGAHRAHPYAAAWRALQRRAVALGQLQCAEQHGLALARQFAMLSYRTPEEFSERFDAPPEVINGRVRVAAEDYLDAAGAQYVARTPVNAYLRLSESIDLHRIDPAQVRVPTVVVAVEGDRLVPLADMVSLVEGLGPRGSLRVLRSPYGHDAFLKEIDRIDAILTTALRSTGETP

SEQ ID NO: 20694 - protein, 382 aa, Caulobacter crescentus CB15
MAALDPITPAGGGTWRFPANEPLRLDSGGVIEGLEIAYQTYGQLNADKSNAVLICHALTGDQHVASPHPTTGKPGWWQRLVGPGKPLDPARHFIICSNVIGGCMGSTGPASINPATGKTYGLSFPVITIADMVRAQAMLVSALGVETLFAVVGGSMGGMQVQQWAVDYPERMFSAVVLASASRHSAQNIAFHEVGRQAIMADPDWRGGAYAEHGVRPEKGLAVARMAAHITYLSEPALQRKFGRELQRDGLSWGFDADFQVESYLRHQGSSFVDRFDANSYLYITRAMDYFDIAASHGGVLAKAFTRARNVRFCVLSFSSDWLYPTAENRHLVRALTAAGARAAFAEIESDKGHDAFLLDEPVMDAALEGFLASAERDRGLV

SEQ ID NO: 20695 - protein, 356 aa, Chlorobium tepidum TLS
MTRMDHRSIISDTTQYFESNEPLQLELGGELPGVRVAYRTWGTLNAEKSNVILVCHALTGNADADSWWCGMFGEGRAFDETRDFIVCSNVLGSCYGTTGPMSVNPLSGRHYGPDFPRITIRDMVNVQRLLLRSLGIDRIRLIVGASLGGMQVLEWGAMYPEMAGALMPMGVSGRHSAWCIAQSEAQRQAIAADAEWQDGWYDPEVQPRKGLAAARMMAMCTYRCFENYQQRFGRKQREDGLFEAESYVRHQGDKLVGRFDANTYITLTRAMDMHDLGRGRDSYEAALGALKMPVEILSIDSDVLYPRQEQEELARLIPGSRLLFLDEPYGHDAFLIDTETVSRMVCEFKRQLIVDN

SEQ ID NO: 20696 - protein, 448 aa, Corynebacterium efficiens YS-314
MPCRWGRVVARAPQAGHRYIQSHPAGVLHERPPETGLDRAVHINLARVPTPGAPTQRTSTMLPQSEQAEFPMPQLAPEGQLATQQIGDIRTEAGALIPDVTIAYHRWGEYEENADGSTNVVLIEHALTGDSNAADWWCDLVGPGKAIDTDLYCVICTNVLGGCNGSTGPSSQHPDGGFWGSRFPATDIRDQVKAEKQFLDAIGITRVKAVLGGSMGGARTLEWAAMFPDVVDAAAVLAVSARASAWQIGIQSAQIMAIENDHHWHEGNYYESGCNPSKGLGAARRIAHLTYRGELEIDERFGTQPQKGENPLGPYRRPDQRFAVESYLDHQADKLVKRFDAGSYVTLTDALNRHDIGRGRGGLNKALESITIPVMVAGVDTDILYPYHQQEHLSRNLGNLLAMAKIVSPVGHDAFLTESRQMDRILRNFFSLISPDEDNPSTYIEFFI

SEQ ID NO: 20697 - protein, 322 aa, Staphylococcus aureus subsp. aureus MW2
MTNYTVDTLNLGKFITESGEVIDNLRLRYEHVGYHGQPLVVVCHALTGNHLTYGTDDYPGWWREIIDGGYIPIHDYQFLTFDVIGSPFGSSSPLNDPHFPKKLTLRDIVRANERGIQALGYDKINILIGGSLGGMQAMELLYNQQFEVDKAIILAATSRTSSYSRAFNEIARQAIHLGGKEGLSIARQLGFLTYRSSKSYDERFTPDEVVAYQQHQGNKFKEHFDLNCYLTLLDVLDSHNIDRGRTDVTHVFKNLETKVLTMGFIDDLLYPDDQVRALGERFKYHRHFFVPDNVGHDGFLLNFSTWAPNLYHFLNLKHFKRK

SEQ ID NO: 20698 - protein, 377 aa, Corynebacterium glutamicum ATCC 13032
MPTLAPSGQLEIQAIGDVSTEAGAIITNAEIAYHRWGEYRVDKEGRSNVVLIEHALTGDSNAADWWADLLGPGKAINTDIYCVICTNVIGGCNGSTGPGSMHPDGNFWGNRFPATSIRDQVNAEKQFLDALGITTVAAVLGGSMGGARTLEWAAMYPETVGAAAVLAVSARASAWQIGIQSAQIKAIENDHHWHEGNYYESGCNPATGLGAARRIAHLTYRGELEIDERFGTKAQKNENPLGPYRKPDQRFAVESYLDYQADKLVQRFDAGSYVLLTDALNRHDIGRDRGGLNKALESIKVPVLVAGVDTDILYPYHQQEHLSRNLGNLLAMAKIVSPVGHDAFLTESRQMDRIVRNFFSLISPDEDNPSTYIEFYI

SEQ ID NO: 20699 - protein, 349 aa, Corynebacterium glutamicum ATCC 13032
MLDNSFYTAEVQGPYETASIGRLELEEGGVIEDCWLAYATAGTLNEDKSNAILIPTWYSGTHQTWFQQYIGTDHALDPSKYFIISINQIGNGLSVSPANTADDSISMSKFPNVRIGDDVVAQDRLLRQEFGITELFAVVGGSMGAQQTYEWIVRFPDQVHRAAPIAGTAKNTPHDFIFTQTLNETVEADPGFNGGEYSSHEEVADGLRRQSHLWAAMGFSTEFWKQEAWRRLGLESKESVLADFLDPLFMSMDPNTLLNNAWKWQHGDVSRHTGGDLAAALGRVKAKTFVMPISEDMFFPVRDCAAEQALIPGSELRVIEDIAGHLGLFNVSENYIPQIDKNLKELFES

SEQ ID NO: 20700 - protein, 379 aa, Thermobifida fusca
MSHDTTPPLPATGAWREGDPPGDRRWVELSEPLPLETGGELPGVRLAYETWGSLNEDRSNAVLVLHALTGDSHVVGPEGPGHPSPGWWEGIIGPGLALDTDRYFVVAPNVLGGCQGSTGPSSTAPDGRPWGSRFPRITIRDTVRAEFALLREFGIHSWAAVLGGSMGGMRALEWAATYPERVRRLLLLASPAASSAQQIAWAAPQLHAIRSDPYWHGGDYYDRPGPGPVTGMGIARRIAHITYRGATEFDERFGRNPQDGEDPMAGGRFAVESYLDHHAVKLARRFDAGSYVVLTQAMNTHDVGRGRGGVAQALRRVTARTMVAGVSSDFLYPLAQQQELADGIPGADEVRVIESASGHDGFLTEINQVSVLIKELLAQ

SEQ ID NO: 20701 - protein, 381 aa, Microbulbifer degradans 2-40
MPAPFPEDSVGLVTPQLFHFDQPLALANGRSLDSYELMVETYGELNAEKSNGILICHALSGSHHVAGYHSEDDKKPGWWEHYVGPGKPIDTNRFYVVCMNNIGGCHGSTGPQSINPATGKPWGSSFPFLRVRDWVETQVRLADRLGINQWAAVVGGSLGGMQAMRWALEHPNRLRHCVVIASAMNLTAQNIAFNETARQAIQSDPNFFNGDYLAQSTLPKRGLSVARMIGHITYLSDDGMGKKFGRELRSGSFDRGNDQLVEFQIESYLRYQGSTFSEVFDANTYILMTRALDYFDLAREYNGDAAEAFKQASCKFLVVSFTSDWRFAPERSREIVTALMRANRDVVYGEIDSVHGHDAFLVPNQLRYWELFSAYMNRVEV

SEQ ID NO: 20702 - protein, 357 aa, Haemophilus somnus 129PT
MAVQTLTLFTDYPLMLVQGGQLKNIEVAYQTYGTLNKDKSNVILICHALTGDAEPYFADKSQNGWWQSFMGEGLALDTSKYFFICSNVLGGCKGTTGPSSINPDTNKPYGSQFPHIIVQDMVKVQRELLNTLDIAKLYAVIGGSFGGMQATQWAIDYPDCVSRVVNLCSSLYLSAEAIGFNHVMRQAIINDPHFNNGDYYDRLPPSKGLSIARMLAMLTYRTDFQLEKAFGRAKKAESLYWGDYFQVESYLTYQGKKFLERFDANSYVHLLRALDLYDPAWNYKDIKAALSRIKARYTLVAVTTDQLFKLTDLHKSKALLEQSGVDLNYYEFPSDYGHDAFLVDYDFFESKIMTGLA

SEQ ID NO: 20703 - protein, 379 aa, Pseudomonas syringae pv. syringae B728a
MPTVFPHDSVGLVTPQTAHFSEPLALACGRSLPAYDLIYETYGQLNAARSNAVLICHALSGHHHAAGFHSADDRKPGWWDSCIGPGKPIDTTKFFVVSLNNLGGCNGSTGPSSIDPDTGKPFGANFPVVTVEDWVNSQARLADLLGIDTWAAVIGGSLGGMQALQWTISYPNRVRHCLAIASAPKLSAQNIAFNEVARQAILTDPEFHGGSFQERGVIPKRGLMLARMVGHITYLSDDSMGEKFGRGLKSEKLNYDFHSVEFQVESYLRYQGEEFSGRFDANTYLLMTKALDYFDPAANFNDDLAKTFANATARFCVMSFTTDWRFSPARSRELVDALMAARKDVCYLEIDAPQGHDAFLIPIPRYLQAFGNYMNRISL

SEQ ID NO: 20704 - protein, 356 aa, Pseudomonas syringae pv. syringae B728a
MHRLISRPTIGLLFSMALLGSAVSAAPLPAATEGDWVAPQFTFHTGEKLANLKLHYITLGNPKNPAILFLHGTYRPGSDMLSKDFGGELFGPGQPLDASKYYIISTDGIGVGQSSKPSDGLRTRFPAYNYNDMVKAQYRLVTEGLGIKHLRLIIGNSMGGMQTWMWGQNWPQMMDALVPMASQPTEMSSRNWMMRRLLVESIKQDPAWNNGNYSAQPPSLRLANAMFSVATSGGTLAYQATAPTRAQADKLVDERLSAAQTGDANDFIYQWQSSADFNAAPGLKKIQAPVLAINSADDERIPPETGLMEASMKELKHARLLLIPASADTRGHGTTSMAKFYSKELGQFMRETEKAK

SEQ ID NO: 20705 - protein, 379 aa, Pseudomonas fluorescens PfO-1
MPAAFPPDSVGLVTPQTAHFSEPLALACGRSLADYDLIYETYGTLNAQASNAVLICHALSGHHHAAGYHSVDDRKPGWWDSCIGPGKPIDTNKFFVVSLNNLGGCNGSTGPSSLNPETGKPFGADFPVLTVEDWVHSQARLADLLGIGQWAAVIGGSLGGMQALQWTITYPDRVRHCLAIASAPKLSAQNIAFNEVARQAILTDPEFHGGSFQEHGVIPKRGLMLARMVGHITYLSDDSMGEKFGRGLKSEKLNYDFHSVEFQVESYLRYQGEEFSGRFDANTYLLMTKALDYFDPAANFNDNLAKTFEGAKAKFCVMSFTTDWRFSPARSRELVDALMAARKDVSYLEIDAPQGHDAFLIPIPRYLQAFGNYMNRITL

SEQ ID NO: 20706 - protein, 379 aa, Pseudomonas aeruginosa PAO1
MPTVFPDDSVGLVSPQTLHFNEPLELTSGKSLAEYDLVIETYGELNATQSNAVLICHALSGHHHAAGYHSVDERKPGWWDSCIGPGKPIDTRKFFVVALNNLGGCNGSSGPASINPATGKVYGADFPMVTVEDWVHSQARLADRLGIRQWAAVVGGSLGGMQALQWTISYPERVRHCLCIASAPKLSAQNIAFNEVARQAILSDPEFLGGYFQEQGVIPKRGLKLARMVGHITYLSDDAMGAKFGRVLKTEKLNYDLHSVEFQVESYLRYQGEEFSTRFDANTYLLMTKALDYFDPAAAHGDDLVRTLEGVEADFCLMSFTTDWRFSPARSREIVDALIAAKKNVSYLEIDAPQGHDAFLMPIPRYLQAFSGYMNRISV

SEQ ID NO: 20707 - protein, 457 aa, Methanosarcina barkeri
VPFIILKQEALRYSFPILTIADMVNAQKKLVEHLGVKQLFAVAGGSMGGMQVLQWTVSYPEMVKKAIAIATTASTTPQQIAFGAIGRKAITDDPKWNGGNYYGKKTPAQGLALARMIGHITYLSDASMQKKFGRDKQEKVGPDMPKISSKVSSEVSPAASSKTSSETSPETSSKTSSKTSSETSSKTSSKTSSKTSSKTSSETSSETSSKTFSETFPDRSSHFQVESYLNHQGDTFTKRFDANSYLYITKAVDFFDLSKNGSLIEGLSVVTAKYLVISITSDWLYPPYQSQEIVSALTANGVDAKYEEIRSQYGHDAFLLEEGQLNYLIRGFLSQILVSDIMYRNFYSVSRNETIENASTLMVKKKVNHLPVVSEDGKLEGIVTSWDITKAVACKITELDEIITRDVKYVFSGDKIETASSIMEDFSISALPVIDSENRVIGMVTSESISALIGKFS

SEQ ID NO: 20708 - protein, 379 aa, Pseudomonas syringae pv. tomato str. DC3000
MPTVFPHDSVGLVTPQTAHFSEPLALACGRSLPAYDLIYETYGQLNAARSNAVLICHALSGHHHAAGFHSADDRKPGWWDSCIGPGKPIDTDKFFVVSLNNLGGCNGSTGPSSIDPDTGKPFGANFPVVTVEDWVNSQARLADVLNIDTWAAVIGGSLGGMQALQWTISYPDRVRHCLAIASAPKLSAQNIAFNEVARQAILTDPEFHGGSFQERGVIPKRGLMLARMVGHITYLSDDSMGEKFGRGLKSEKLNYDFHSVEFQVESYLRYQGEEFSGRFDANTYLLMTKALDYFDPAANFNDDLAKTFANATARFCVMSFTTDWRFSPARSRELVDALMAARKDVCYLEIDAPQGHDAFLIPIPRYLQAFGNYMNRISL

SEQ ID NO: 20709 - protein, 400 aa, Bradyrhizobium japonicum USDA 110
MVGVTSISSPAISADERSHEVDHPSSLVAHFGADQPLPLDCGIDLTPFQIAYQTYGELNADRSNAILICHALTGDQHVANVHPVTGKPGWWETLVGAGRPLDPSQYFIICANVIGGCMGSTGPASINPATGKVWGLDFPVITIPDMVRAQAMLIDRLGIDTLFAVVGGSMGGMQVLQWTAAYPERVYSALAIACSTRHSAQNIAFHELGRQAVMADPDWHNGGYADRGIHPHRGLAVARMAAHITYLSDAALHRKFGRRMQDRDLPTFSFDADFQVESYLRYQGSSFVERFDANSYLYLTRAMDYFDIAGDHGGVLAKAFAGIKTRFCVVSFTSDWLFPTSESRALVHALNASSARVSFAEIETDRGHDAFLLDVPEFFDIARAFLESAGKARGLNGRGG

SEQ ID NO: 20710 - protein, 356 aa, Bradyrhizobium japonicum USDA 110
MHRHFSGAFCDRVSGVERMTAQRDYETFEAGDVTLQSGAIFPSMTLAYKTYGTLSPAKDNVILYPTSFSAQHYDTEWLIGSGGVLDPERYFIIIPNLFGNGLSSSPSNTAGPFPEPTYHDAIAVQHRLLTGRFGISKLALVYGWSMGGMQAYHWAASHPDMVERAAVVCGSARCAPYNHVFLESVKAALTGDPAFRNGRFVEKPTVGYRAMGRVYAGWAMSHGFYRDELWREAGFSSLEDYLVRGWDATFARRDANDLLAQIGIWQSGDISRCAAFGGDLDRALAAIKAHMLLMPGATDRYFDVRDNEDELGRLVNAKSAVLHPIPSLHGHRAGNPVNNPPDQAFIRAEIAQLLSK

SEQ ID NO: 20711 - protein, 353 aa, Bradyrhizobium japonicum USDA 110
MKASCAALSAILLSISAAAMAADYPAPKQADWIARDFKFHTGDVMPELRLHYTTVGEPSGQPVLVLHGTGGSGASMLTPSFAGELFGAGQPLDAAKYYIIIPDGIGHGKSSKPSDGMKTGFPKYDYDDMVEAQYRLVTEGLGVKHLRLVIGNSMGGMHTWLWGEKYPKAMDALIPMASQPTEMASRNWMLRRIMLDTIRNDPDYNGGNYSSQPRMMKYAVTAYGIASIGGTLAYQSQAPTAAKADKIVDERLATPITADANDFVYQWESSHDYNAGEKLEQIEASLLLINSADDERNPPETGLTDAAMKQVKNGRLYLIPASTETRGHGTTGNAKFYSEQVRQLLQTAPQRTM

SEQ ID NO: 20712 - protein, 374 aa, Bacillus cereus ATCC 14579
MQIVKKEKFVLKGFTFENGREIPVQMGYETYGTLNRERSNVILVCHYFSATSHAAGKYTVHDEESGWWDGLIGPGKAIDTNKYFVICTDNLCNVQVRNPYVITTGPKSINPETGEEYAMDFPVFTFLDVARMQYELIKGMGISRLHAVIGPSVGGMIAQQWAVHYPHMVERMIGVITNPQNPIITSVNVAQNAIEAIQLDPSWKGGKYGEEQPIKGLHLANRMMFMNAFDEHFYEMAFPRNSIEIEPYEKFSTLTSFEKEINKATYRSIELVDANSWMYTAKAVLLHDIAHGFSSLEESLSNIEANVLMIPCKQDLLQPSRYNYKMVDILQKQGKYAEVYEIESINGHMAGAFDIHLFEKKVYEFLNRKVSSFV

SEQ ID NO: 20713 - protein, 109 aa, Saccharomyces paradoxus
NNFPIAYKTWGTLNEAADNVLVICHALTGSADVADWWGPLLGNNLAFGPSRFFIICLNSMGSPYGSFSPLTINEETGVRYGPEFPLCTVRDDVKAHRIVLDSLGVKSIA

SEQ ID NO: 20714 - protein, 380 aa, Thermus thermophilus
MSEIALEAWGEHEALLLKPPRSPLSIPPPKPRTAVLFPRREGFYTELGGYLPEVRLRFETYGTLSRRRDNAVLVFHALTGSAHLAGTYDEETFRSLSPLEQAFGREGWWDSLVGPGRILDPALYYVVSANHLGSCYGSTGPLSLDPHTGRPYGRDFPPLTIRDLARAQARLLDHLGVEKAIVIGGSLGGMVALEFALMYPERVKKLVVLAAPARHGPWARAFNHLSRQAILQDPEYQKGNPAPKGMALARGIAMMSYRAPEGFEARWGAEPELGEIHLDYQGEKFLRRFHAESYLVLSRAMDNHDVGRGRGGVEEALKRLRAIPSLFVGIDTDLLYPAWEVRQAAKAAGARYREIKSPHGHDAFLIETDQVEEILDAFLP

SEQ ID NO: 20715 - protein, 369 aa, Geobacter metallireducens
MSVGIVQEQSVTFDTELRLESGRILGPITLAYETYGELNADRSNAILVAHAWTGNAHLAGKNSEEDTKPGWWDAIVGPGRLLDTDRCFVICSNVIGSCYGSTGPASINPKTGKRYNLTFPVITVRDMVRAQALLLDHLGIDRLLTVLGGSMGGMQALEWATQFPDRIRSAIALATTSRPSPQAISLNAVARWAIFNDPTWKKGEYRKNPKDGLALARGIGHITFLSDESMWQKFGRRFNARDGLFDFFGQFEVERYLSYNGYNFVDRFDTNSFLYLAKALDLYDTAWGYESLEEAFSRVKAPIQFFAFTSDWLYPPYQTEEMATILRSLGKPVEYHLIESAYGHDAFLLEHETFAPMVREFLDKVERSE

SEQ ID NO: 20716 - protein, 379 aa, Leptospira meyeri
MPTSEQNEFSHGSVGVVYTQSIRFESLTLEGGETITPLEIAYETYGTLNEKKDNAILVCHALSGDAHAAGFHEGDKRPGWWDYYIGPGKSFDTNRYFIISSNVIGGCKGSSGPLTINGKNGKPFQSTFPFVSIGDMVNAQEKLISHFGIHKLFAVAGGSMGGMQALQWSVAYPDRLKNCIVMASSSEHSAQQIAFNEVGRQAILSDPNWNQGLYTQENRPSKGLALARMMGHITYLSDEMMREKFGRKPPKGNIQSTDFAVGSYLIYQGESFVDRFDANSYIYVTKALDHFSLGTGKELTKVLAKVRCRFLVVAYTSDWLYPPYQSEEIVKSLEVNAVPVSFVELNNPAGRHDSFLLPSEQQDSILRDFLSSTDEGVFL

SEQ ID NO: 20717 - protein, 358 aa, Pseudomonas putida
MSTVFPEDSVGLVVRQTSRFDEPLALACGRSLASYELVYETYGTLNASASNAVLICHALSGHHHAAGYHAATDRKPGWWDSCIGPGKPIDTNRFFVVSLNNLGGCNGSTGPSSVNPATGKPYGAEFPVLTVEDWVHSQARLADRLGIQQWAAIVGGSLGGMQALQWTMTYPERVRHCVDIASAPKLSAQNIAFNEVARQAILTDPEYRRGSFPGPGVIPKRGLMLARMVGHITYLSDDSMGEKFGRELKATSSTTTSTASSSRSKATCAIRARSFPAVSTPTPTLMTKALDYFDPAATHGGDLAATLAHVTADYCICRSPPTALLSGPFARDRRRADGRAQERLLPGDRFALRARCIS

SEQ ID NO: 20718 - protein, 403 aa, Ralstonia solanacearum
MTELQVDPAASADPAAAADTPRHPAATLPPDSVGLVVPERMHFAEPLPLRNGSQLVGYDLMVETYGTLNAERSNAVLICHALNASHHVAGVHAEGEVGWWDNMVGPGKPVDTNRFFVIGVNNLGSCFGSTGPMSPHPQTGQPYGARFPVVTVEDWVNAQARVADRFGIRQFAAVMGGSLGGMQALAWSLMYPERVRHCVVVASTPKLSAQNIAFNEVARSAILSDPDFHGGDYYAHNVKPKRGLRVARMIGHITYLSDEDMAEKFGRELKAEDIRFSFDVEFQVESYLRYQGDKFAEYFDANTYLLITRALDYFDPALAYEGSLTRAVAHTRASYLVVSFTTDWRFAPARSRELVKALLDNKRPVTYGEIDAPHGHDAFLLEDARYHALVRAYYERIAQEIGA

SEQ ID NO: 20719 - protein, 363 aa, Azotobacter vinelandii
MLHFSEPLTLACGRSLSDYELVYETYGELNAARSNAVLVCHALSGHHHAAGYHSPEDRKPGWWDSCIGPGKPIDTRRFFVVALNNLGGCNGSTGPGSLNPATARPYGADFPVVTVEDWVHSQARLADALGIQQWAAVIGGSLGGMQALQWTISYPERVRHCLAIASAPKLSAQNIAFNEVARQAILSDPEFHGGHFQEHGVIPRRGLMLARMVGHITYLSDDAMGEKFGRELKTDQLNYDFHSVEFQVESYLRYQGEEFSGRFDANTYLLMTKALDYFDPAAAHGDDLAKTLAVARADFCLMSFTTDWRFSPARSREIVDALIAAGKNVSYLEIDAPQGHDAFLMPIPRYLQGFASYMNRIAV

SEQ ID NO: 20720 - protein, 389 aa, Mesorhizobium loti
MAALRAGKTNNEADQPSSPVLRFGADKPLKLDAGTLLSPFQIAYQTYGTLNDARSNAILVCHALTGDQHVANTNPVTGKPGWWEVLIGPGRIIDTNRFFVICSNVIGGCLGSTGPASTNPATGKPYGLDLPVITIRDMVRAQQMLIDHFGIEKLFCVLGGSMGGMQVLEWASSYPERVFSALPIATGARHSSQNIAFHEVGRQAVMADPDWHGGKYFENGKRPEKGLAVARMAAHITYLSEAALHRKFGRNLQDREALTFGFDADFQIESYLRHQGMTFVDRFDANSYLYMTRSMDYFDLAADHGGRLADAFAGTKTRFCLVSFTSDWLFPTEESRSIVHALNAAGASVSFVEIETDRGHDAFLLDEPELFAAINGFIGSAARARGLSA

SEQ ID NO: 20721 - protein, 199 aa, Triticum aestivum
  unsure (1)..(199): unsure at all Xaa locations
KYQXMTDIKNYSLGNFTPQNGSVLPRAWISYKTFGDPSLPAVLYPSWFSGAISDNEWLIGNDKTLSPEKYFIIITALFGNGQSTSPSNSDITPFPDVSFYDNVKAQHQLMTHLGIKHLRAVLGWSMGAAQSFQWATQYPDFMDICVPFCGSARTSLHNQVFLEGVKSALLVSKDVLSPRHTARETGPXKKRRRXESFWX

SEQ ID NO: 20722 - protein, 504 aa, Schizosaccharomyces pombe
MLRASSKRLQLSWQVFRRFQSSNPQLSFPCVDQAQERSRQFEQSLQKQQACPNSVDPSASITSPSLSSGPEPVYGKIVSGFKKFYHNKPFLCDHGGILPKFEIAYETWGTLNKDHSNAILLHTGLSASSHAHSHPENTAPGWWEQFIGPGKDVDTNKFFVICTNVLGSCYGSTGPSSVDPGDGKHYATRFPIITVNDMIRAQLLLLDHLKIEKLYASVGSSLGGMQSLTLGALAPHRVGRIASISGGARSHPYSIALRFTQRQILMNDPYWNRGFYYDGVPPHTGMKLAREVATISYRSGPEWEQRFGNRRADPSVSPAFCPDFLIETYLDHAGEKFCLQYDPNSLLYISKAMDMHDMSASHQRSLSENRKKNQHKLDKYLSADVSAEEIIKLNEDTSVLPDVPYQEIANEDRAPEPDPETNLIAGLAPLKDTPVMVMGVESDNLMPVECQRETARCLEKAGNKQVVYHELDANESFYGHDTFLIYRKDLDLVGGKLKKFLELS

SEQ ID NO: 20723 - protein, 149 aa, Saccharomyces bayanus
RIVQVPELVLESGVVLNNFPIAYKTWGTLNEACDNVLVICHALTGSADVADWWGPLLGNDLAFDPSRFFIICLNSMGSPYGSFSPLTINEQTGTRYGPEFPLCTVRDDVRAHRIVLDSLGVKSIACVIGGSMGGMLSLEWTAMYGNEYV

SEQ ID NO: 20724 - protein, 142 aa, Saccharomyces bayanus
  unsure (1)..(142): unsure at all Xaa locations
VQVPELVLESGVVXNNFPIAYKTWGTLNEACDNVLVICHALTGSADVADWWGPLLGNDLAFDPSRFFIICLNSMGSPYGSFSPLTINEQTGTRYGPEFPLCTVRDDVRAHRIVLDSLGVKSIACVIGGSMGGMLSLEWTAMY

SEQ ID NO: 20725 - protein, 525 aa, Neurospora crassa
MRPQKHIAASLRRVSGALSHASYSPATSQSSRTAAVAGLRLSRAQPQQQQQQRCLHGQAPRRSGASNPAMAFPCLDALETRSETLKKRSDASGPEPSYVAGATQTFHCDEPLLLDWGGMLPEFDIAYESWGEMNADKSNVILLHTGLSASSHAHSTSANPQPGWWERFIGPGLALDTDKYHIICTNVIGGCYGSTGPSSIDPADGQRYATRFPILTLEDMVRAQFRLLDNLGVNKLYASVGSSMGGMQSLAAGVLFPERVGRIISISGCARSHPYSIAMRHTQRQVLMMDPNWNRGFYYDNVPPHAGMKLAREIATVTYRSGPEWELRFGRRRADPSKPPALCPDFLIETYLDHAGEKFCLTYDPNSLLYVSKAMDLFDLGHAGQKAAASRRAERLDSLHKGVYASNENVSCSLTLPDKPYEEQPESAGSADIDTKLATQSDSKPPEDLIKGLSALRDHPALVMGVASDILFPAWQQREIADALRLAGNRNVAHYELSEEQSMFGHDTFLLDVKNVGGAIKNFLQ

SEQ ID NO: 20726 - protein, 401 aa, Halobacterium sp. NRC-1
MAAALAVIAVHNTVAKNYYQVCTDGGPMPTTELDGFTFACGDTVDSLTVAYRTYGDYTGSNAVLVCHALTGSQHVRGRADGDDRGWWPDIVGPGRPIDTTEYFVVCANVPGSCHGTDGPPADGPGGDPWGTAFPPVTVPDWTRCQRRLLDTLGVDRLHAVVGGSVGGMNALDWARRYPDDVHRIAAVATAPRLDAQCLGLNAIARRAIRGDPNWNDGDYYGGAHPDRGLALARQLGHVMYLSKASMADKFGRRTATTDTALPADPAAEFFATRDVESYLDYQADTFVARFDANSYLYLLRAMDAYDLAAGRPSVADALAAFDGDALVLSFTGDWHFTAAQSATVADAFRAGGAAGVAHHVVDSDYGHDAFLVDSAAVGPPLADFLAAGTDGAAVTDATGGV

SEQ ID NO: 20727 - protein, 358 aa, Haemophilus influenzae Rd
MSVQNVVLFDTQPLTLMLGGKLSHINVAYQTYGTLNAEKNNAVLICHALTGDAEPYFDDGRDGWWQNFMGAGLALDTDRYFFISSNVLGGCKGTTGPSSINPQTGKPYGSQFPNIVVQDIVKVQKALLDHLGISHLKAIIGGSFGGMQANQWAIDYPDFMDNIVNLCSSIYFSAEAIGFNHVMRQAVINDPNFNGGDYYEGTPPDQGLSIARMLGMLTYRTDLQLAKAFGRATKSDGSFWGDYFQVESYLSYQGKKFLERFDANSYLHLLRALDMYDPSLGYDNVKEALSRIKARYTLVSVTTDQLFKPIDLYKSKQLLEQSGVDLHFYEFPSDYGHDAFLVDYDQFEKRIRDGLAGN

SEQ ID NO: 20728 - protein, 360 aa, Pasteurella multocida
MAVQKVKLFTEAPFTLSLGGTLQDIEIAYQTYGELNKEKTNAILICHALTGDAEPYFADHSQRGWWQTFMGEGLALDTSQYFFICSNVLGGCKGTTGPSSINPKTNKPYGSQFPNIIVQDIVALQRALLTHLNIPRLHAVIGGSFGGMQATQWAIDYPDDVSNVINLCSSLLFGAEAIGFNHVMRQAVINDPNFNGGDYYDSQPPEKGLAIARMLGMLTYRTDLQLTKAFGRATKAETEFWGDYFQVESYLSYQGKKFLARFDANSYLHLLRALDLYDPGFQYESLSAALARIKARYTLVAVENDQLFKLTELQKSKKLLEESGVDLVYYQFSSDYGHDAFLVDYAFFEKKIRLALANQD

SEQ ID NO: 20729 - protein, 379 aa, Mycobacterium tuberculosis CDC1551
MTISDVPTQTLPAEGEIGLIDVGSLQLESGAVIDDVCIAVQRWGKLSPARDNVVVVLHALTGDSHITGPAGPGHPTPGWWDGVAGPSAPIDTTRWCAVATNVLGGCRGSTGPSSLARDGKPWGSRFPLISIRDQVQADVAALAALGITEVAAVVGGSMGGARALEWVVGYPDRVRAGLLLAVGARATADQIGTQTTQIAAIKADPDWQSGDYHETGRAPDAGLRLARRFAHLTYRGEIELDTRFANHNQGNEDPTAGGRYAVQSYLEHQGDKLLSRFDAGSYVILTEALNSHDVGRGRGGVSAALRACPVPVVVGGITSDRLYPLRLQQELADLLPGCAGLRVVESVYGHDGFLVETEAVGELIRQTLGLADREGACRR

SEQ ID NO: 20730 - protein, 379 aa, Mycobacterium tuberculosis H37Rv
MTISDVPTQTLPAEGEIGLIDVGSLQLESGAVIDDVCIAVQRWGKLSPARDNVVVVLHALTGDSHITGPAGPGHPTPGWWDGVAGPGAPIDTTRWCAVATNVLGGCRGSTGPSSLARDGKPWGSRFPLISIRDQVQADVAALAALGITEVAAVVGGSMGGARALEWVVGYPDRVRAGLLLAVGARATADQIGTQTTQIAAIKADPDWQSGDYHETGRAPDAGLRLARRFAHLTYRGEIELDTRFANHNQGNEDPTAGGRYAVQSYLEHQGDKLLSRFDAGSYVILTEALNSHDVGRGRGGVSAALRACPVPVVVGGITSDRLYPLRLQQELADLLPGCAGLRVVESVYGHDGFLVETEAVGELIRQTLGLADREGACRR

SEQ ID NO: 20731 - protein, 109 aa, Saccharomyces sp. IFO 1802
SNFPIAYKTWGTLNKAGDNVLVISHALTGSADVADWWGPLLGNDLAFDPSRFFIICLNSMGSPYGSFSPLTINEETGARYGPEFPLCTVRDDVRAHRIVLDSLGVKSIA

SEQ ID NO: 20732 - protein, 109 aa, Saccharomyces sp. CID1
SNFPIAYKTWGTLNEACDNVLVICHALTGSADVADWWGPLLGNDLAFDPSRFFIICLNSMGSPYGSFSPLTINEQTGTRYGPEFPLCTVRDDVRAHRIVLDSLGVKSIA

SEQ ID NO: 20733 - protein, 109 aa, Saccharomyces sp. CID1
NNFPIAYKTWGTLNEAGDNVLVICHALTGSADVADWWGPLLGNDLAFDPSRFFIICLNSMGSPYGSFSPLTINEETGVRYGPEFPLCTVRDDVRAHRIVLDSLGVKSIA

SEQ ID NO: 20734 - protein, 377 aa, Nitrosomonas europaea
MSTQDSDSIGIVSARRAHFDTPLSLKSGAVLDSYELVYETYGELNADRSNAVLICHALSGNHHVAGVYADNPKNTGWWNNMIGPGKPVDTRKFFVIGINNLGGCHGSTGPISINDKTGKRFGPDFPLVTTADWAKTYVRFADQFSIDCFAAVIGGSLGGMSAMQLALDAPERVRHAIVVAASARLTAQNIAFNDVARQAILTDPDFHDGDYYSHGTHPRRGLRLARMLGHITYLSDDSMASKFGRELRNGSLAFNYDVEFQIESYLHHQGDKFADLFDANTYLLMTKALDYFDPAQDYDGNLSAAFARAQADFLVLSFTSDWRFSPERSRDIVKALLDNKLNVSYAEIPSSYGHDSFLMQDDYYHQLIRAYMNNIAL

SEQ ID NO: 20735 - protein, 338 aa, Cytophaga hutchinsonii
MEYHIYTHKSPVTLESGAVLPEVRIQYSTSGIRNADEDNIIWVCHALTANSDVESWWPGLVGTDYLYNPQEHFIVCANILSSCYGTTGPTETNPETNKPYFLSFPVVTIRDMVTIHDILREHLEIKKIHTLIGGSLGGQQAMEWAIQQPHLFQHLILLSTNAFHSPWGIAFNESQRMAIDMDPTWKNPSLDAGREGLKTARSIAMLSYRSYETYVETQREEDSSKTDDYRAITYQHYQGDKLVKRFNCHSYWYLSKAMDSHHVGRNRESAAAALASIRSKTLVIGISSDILFPVCEQEYVAKHISGAQYVCIDSLYGHDGFLTETDKLDVVIRNFYLE

SEQ ID NO: 20736 - protein, 193 aa, Streptomyces coelicolor A3(2)
MQPLIDNARMFGQRPEEFTGHAEGQSPEVLFITCSDSRVVPALITGARPGQLFELRTAGNIVPPHGTGHPSGEAATVEYAVQVLGVADIVVCGHSHCGAVGALVRGDDLTAVPAVRDWLAHAADEPKPCDPADPTVAGAVQHHVLAQLLRLRSYPCVERRLADGRLRLHGWYYEVHTGLVRAHRADTDAFETL

SEQ ID NO: 20737 - protein, 222 aa, Rhodobacter sphaeroides
MDLTEDDAMHNARPLPNYLVQRFHGWRATTFADNKSWYRRLSESGQHPRAMVISCCDSRVHVTSIFGADEGEFFIHRNIANLVPPYSPDGKQHGTSAAVEYAVTALGVAHIVVLGHSNCGGVKGCHDMCSGKAPQLEETSSFVGRWMDILRPGYERVKDLPEEERVTALEKEAVLVSIGNLMTFPFVREAVEREVLTLHALWTHIGEGSLEQYTPGQGFVPV

SEQ ID NO: 20738 - protein, 235 aa, Rhodopseudomonas palustris
MTAVSFADVPHPRTPKEGTAPMTSFPKSLIDGYEAFRTQRLPTEQSRFRELSERGQSPEVMVIGCCDSRVSPEVIFDAGPGEIFVVRNVANLVPVYEPDGGAHGVSAALEFAVQVLRVKHIVVLGHALCGGIKAFTDKTPPLTESDFIGRWMQMFTKPGEVVEKRDHETVQDFRTRIEKAAVFRSIENLMTFPCIKILVERGKLQLHGAYFGVADGDLFVLDQENKQFVPAAEVV

SEQ ID NO: 20739 - protein, 217 aa, Rhodospirillum rubrum
MIRTVDIQDLITNNRKWAEERESALPGYFHILSEVQSPKFLWIGCSDSRVPANEIVGMQPGELFVHRNIANVVPHADANCHAVLEYAIDVLKVEHIMVVGHYGCGGVRAALNRLAMGPIDNWLSHIKDIARIFAAELEDLPDEESRVDRLCELNAMAQVMNVARTSMVQAAWRRGQPLAIHAWCYGLKTGLVNDLGRTLTRIADLPEPYRLIFPDQV

SEQ ID NO: 20740 - protein, 272 aa, Synechococcus sp. PCC 7942
MRKLIEGLRHFRTSYYPSHRDLFEQFAKGQHPRVLFITCSDSRIDPNLITQSGMGELFVIRNAGNLIPPFGAANGGEGASIEYAIAALNIEHVVVCGHSHCGAMKGLLKLNQLQEDMPLVYDWLQHAQATRRLVLDNYSGYETDDLVEILVAENVLTQIENLKTYPIVRSRLFQGKLQIFGWIYEVESGEVLQISRTSSDDTGIDECPVRLPGSQEKAILGRCVVPLTEEVAVAPPEPEPVIAAVAAPPANYSSRGWLAPEQQQRIYRGNAS

SEQ ID NO: 20741 - protein, 228 aa, Ralstonia metallidurans
MLEPSNDDGGVGVKDLIQGILKFQREEFPKRSALFKHLATQQNPKTLFIACSDSRVVPALLTQCEPGELFVIRNAGNIVPAYAVQPGGVSASVEYAVAGLKVRDIVICGHSDCGAMTAVATCQCLDHMPAVEEWLEHASGARRISLTRPHASDRARVDDMVRENVIEQLDHLRTHPSVAQALAEGRVDLHGWVYDIETGEIDALEGRTGKFVPLREQPDVTATLERVA

SEQ ID NO: 20742 - protein, 225 aa, Ralstonia metallidurans
MRKLIMGIVEFREKMLPRYAEQFSKLALAQTPDALFITCSDSRVVPDLLASTHPGDLFTMRNVGNLIPPATAEGVSTGDLSEASAIEYAVLVLKVANIVVCGHSECGAMKAVYSRNPKLKAPNLDKWLYHASNAAFRLEHEGALDESLKPHDQLSQLNVLVQIEHLMTYPIVRRQVMAGALVLSGWWFDIATGDMYAYERASRSFEVIDRALAERLASRLASRAR

SEQ ID NO: 20743 - protein, 244 aa, Ralstonia metallidurans
MHEIERLLKGFERFQRRYFEARPELFDALRTGQKPQTLLIGCSDSRVDPGLLLDCDPGELFTVRNVANLVPPCGDGASGRLHGVSAAIQFAVEQLHVVRIIVMGHAGCGGIRALLAHPQNDDTNAPQDFIGPWVRIAGPARRMVEQTLPNASPAERQRACEQAAILVSLRNLESFPFVREACERGALTLHGWYFDLQAGALLAYSERADDFLPLVCPLTPEARPHRQPSNRPSIDSGQAEMLGS

SEQ ID NO: 20744 - protein, 223 aa, Ralstonia metallidurans
MSDAIAQLFRNNREWVDRVNAEDPTFFTRLANQQAPEYLWIGCSDSRVPANQILGLAPGEVFVHRNIANVISHSDLNALSVLQFAVDVLKVRHVTVVGHYGCGGVKVALKRERVGLADNWLRHVQDVADKHAGYLGTVLREDDAHTRLCELNVIEQVNNVCQTTVLQDAWARGQAVTVHGWVYGVSDGLLRDLGMAASNNDELHAQIAAALRQYGDPPQASIR

SEQ ID NO: 20745 - protein, 211 aa, Burkholderia fungorum
MQEIIEGFIRFQREVFPQQSGLFKRLSTAQSPSTLFVTCSDSRVVPELLTQTEPGSLFVIRNAGNIVPSYGPEPGGVSATVEYAVAVLRVRDIVICGHSNCGAMTAISTCMNLDHLPAVAGWLRHADAAKAINASRTYHSDAECLEALVKDNVIAQLANIRTHPSVAVGLANKTLQLHGWIFDIESGVMLALDGRTGKFLPLVDNPDIYAV

SEQ ID NO: 20746 - protein, 234 aa, Burkholderia fungorum
MRPRERSREFGAESMRLAYGALSMNRPKRLLVANVAWAHETAVRNPAFFRDLVRGQNPHVLWIGCSDSRVPAETITHCEPGDLFVHRNIANLFQAGDDNSASVLEYAVKVLKVGHVIVCGHYGCGGVRAALLPPEPGLPHVNRRIAPLCALARAHHEELDGHANERQRIDRLAELNVLEQVRGLRAHPVVRDADPAPLVHGWIFALEDGRIKVLSSGYEADDAMTCTTAAHSAA

SEQ ID NO: 20747 - protein, 219 aa, Escherichia coli O157:H7 EDL933
MKEIIDGFLKFQREAFPKREALFKQLATQQSPRTLFISCSDSRLVPELVTQREPGDLFVIRNAGNIVPSYGPEPGGVSASVEYAVAALRVSDIVICGHSNCGAMTAIASCQCMDHMPAVSHWLRYADSARVVNEARPHSDLPSKAAAMVRENVIAQLANLQTHPSVRLALEEGRIALHGWVYDIESGSIAAFDGATRQFVPLAANPRVCAIPLRQPTAA

SEQ ID NO: 20748 - protein, 220 aa, Escherichia coli O157:H7 EDL933
MKDIDTLISNNALWSKMLVEEDPGFFEKLAQAQKPRFLWIGCSDSRVPAERLTGLEPGELFVHRNVANLVIHTDLNCLSVVQYAVDVLEVEHIIICGHYGCGGVQAAVENPELGLINNWLLHIRDIWFKHSSLLDEMPQERRLDTLCELNVMEQVYNLGHSTIMQSAWKRGQKVTIHGWAYGIHDGLLRDLDVTATNRETLEQRYRHGISNLKLKHANHK

SEQ ID NO: 20749 - protein, 218 aa, Magnetococcus sp. MC-1
MCKTPISNFLTQLKQGHQQFLRDELPNHLALFQRLSAEGQNPRAAVVACSDSRIHPNMITQSSPGELFIIRNVANLVPPHDPDGGYHGTSAALEYAVRVLNVEAIIILGHSCCGGVRALSQDCCEKVGADGSDFIGKWMEIAWNDAHVQQLALTAAKTGQHRPLEERMVTLSIHNLRGFPFIHQRETAGTLELIGLYFNIAEGRLYRYEPSIDAFEPL

SEQ ID NO: 20750 - protein, 328 aa, Vigna radiata
MSSSSINGWCLSSISPAKTSLKKATLRPSVFATLTTPSSPSSSSSFPSLIQDKPVFAAPSHIITPTVREDMAKDYEQAIEELQKLLREKTELKATAAEKVEQITASLGTSSSDSIPSSEASDRIKSGFLYFKKEKYDKNPALYGELAKGQSPKFMVFACSDSRVCPSHVLDFQPGEAFVVRNVANIVAPYDQSKYSGTGAAIEYAVLHLKVSNIVVIGHSACGGIKGLLSFPFDGTYSTDFIEEWVKIGLPAKAKVKTQHGDAPFAELCTHCEKEAVNVSLGNLLTYPFVRDGLVNKTLALKGGYYDFVKGTFELWSLNFGLASSFSV

SEQ ID NO: 20751 - protein, 239 aa, Pseudomonas putida KT2440
MPVKDPSKVVPQVPAESADAALKHIVDGFLRFHHDVFPDQQELFKKLATAQTPRAMFITCADSRIVPELITQSSPGDLFVTRNVGNVVPPYGQMNGGVSSAIEYAVMALKVHHIIICGHSDCGAMRAVLNPQSLTKMPTVGAWLRHAEVARTVVENNCSCGSEHETMQVLTKENVIAQLHHLRTHPSVASRLAAGELFIHGWVYDIETSKIEAYDAASDSFLPLAAGEPVPCATPRGRY

SEQ ID NO: 20752 - protein, 256 aa, Anopheles gambiae str. PEST
VMERILRGVMRYRHTTREQMVQEFRKVRDNPQPKAVFFTCMDSRMIPTRFTETHVGDMFVVRNAGNLVPHAEHFQDEYFSCEPAALELGCVVNNIKHIIVCGHSDCKAMNLLYKLKDPEFASLDNRRISPLRAWLCEHANTSLAKFQNLKEIGLDKPLIFSSETPLRKFVAYIDPENNFAIEDKLSQVNTLQQIENVASYGFLKRRLESHDLHIHALWFDIYTGDIYFFSRNSKRFIAIDESSIDRLLDEVRRYYS

SEQ ID NO: 20753 - protein, 213 aa, Agrobacterium tumefaciens str. C58 (Cereon)
MKDFPETLLNGYKNFMSGRYVDERERYRVLADTGQKPQTLFIACCDSRSAPETIFDCGPGELFVVRNVANMVPPFEPDGQYHATSAAIEYAVQVLKVKDIVVMGHGRCGGIQAALDPNLEPLSPGDFIGKWMNMVKSAAEQIQSNDVMTASERQTALERVSIRNSIANLRGFPFVKAQETAGKVKLHGAWFDISTGELWVMDSKTGDFRRPDL

SEQ ID NO: 20754 - protein, 310 aa, Yersinia pestis KIM
MVNCVISSAYVISKKEPYSMGLLVVLRTHEVFNPPHMRDVTGNIKNQTGTEKILRRQYRVITETTVPISKSESLPYIILSQPEHYRLFTLMKEIEKLIANNRTWSNTICKDDPGFFEHLAQSQKPRFLWIGCSDSRVPAEQLTGLKSGELFVHRNVANLVIHTDLNCLSVVQYAIDVLQVEHIIICGHLGCGGVEAAIKGEEMGLIDNWLLHIRDLWYKHSSLLGELPQEERSNVLCQINVVEQVYNLGHSTIVRSAWKRGQKAMIHGWVYGIENGLLRDLEVSATSLGSLEMVYRKAMAELLQNNKEDH

SEQ ID NO: 20755 - protein, 219 aa, Magnetospirillum magnetotacticum
MSKVPGIDRLLANNKVWAEETERTKPGFFAHLAEQQTPGYLWIGCADSRVPANEIVGLEPGEVFVHRNVANQVHHADMNCLSVLQYAIDVLKVEHIIVCGHYGCGGVRAALQDSRLGVTEYWIRPVRDICECHRHELDMLPNEAAQVDRLCELNVMAQVRNLCRSPVIQDAWQRGQQLEVHSWVYGLTDGMVRTLGPVVTGLKSLDELGASYLMRGAAF

SEQ ID NO: 20756 - protein, 226 aa, Xanthomonas campestris pv. campestris str. ATCC 33913
MESLLEGFRHFRKEVYPRQSARFHELAAGQKPHTLFITCADSRVMPELIFSAQPGELFVYRNIGNVVPPYSQHVSGVVAAIEYAIAVLGVRHIVVCGHTDCGAMKAVLKPESLEDVPSVAAWLKHTDAARHVTAHHGHDPASQEALSCMTEENVVSQLDHLRTQPVVAARLAAGTLRIHGWIYDIAHGEIRAFDAEKGGFRPLLGETTPEATPRPRLQQAVRAELV

SEQ ID NO: 20757 - protein, 220 aa, Xanthomonas campestris pv. campestris str. ATCC 33913
MNELNHLLENNRAWADRINREDPEFFAKLSTQQSPEYLWIGCSDSRVPANQIIDMAPGEVFVHRNIANVVVHTDLNCLSVIQFAVDVLKVKHILVVGHYGCGGVFASLTQKRMGLVDNWIRHVTDVADKHEACLHQAGDLSVQHARLCELNVLEQVVNVCRTTIVRDAWDRGQDLRVHGWVYSLRDGRAHDLRMSVDRADILQERYDAALAQIQADHSER

SEQ ID NO: 20758 - protein, 226 aa, Xanthomonas axonopodis pv. citri str. 306
MESLLEGFRHFRKEVYPRQSARFQELAGGQSPHTLFITCADSRVMPELIFSAQPGELFVYRNIGNVVPPYSQHVSGVVAAIEYAIAVLGVRHIVICGHTDCGAMKAVLKPESLEDVPSVAAWLKHTDAARHVTAHHGHDPQSPDALNCMTEENVVSQLDHLRTQPVVAARLAAGTLRIHGWIYDIAHGEIRAFDAEKGGFRPLLAESTPEATPRPRLQQVVRAELA

SEQ ID NO: 20759 - protein, 220 aa, Xanthomonas axonopodis pv. citri str. 306
MNELNHLLENNRAWSERIRREDPEFFSKLSTQQTPEYLWIGCSDSRVPANQIIDMAPGEVFVHRNIANVVVHTDLNCLSVIQFAVDVLKVKHVLVVGHYGCGGVFASLTQKRMGLVDNWIRHVTDVADKHEACLHNAGELSVQHARLCELNVLEQVVNVCRTTIVHDAWERGQQLSVHGWVYSLRDGRAHDLGMSIDRPELLQERYDAALAQIQADQTER

SEQ ID NO: 20760 - protein, 222 aa, Caulobacter crescentus CB15
MLEDLKAKNAAWSKSKTAEDPDFFTRLAKQQSPEYLWIGCSDSRVPANEIVGLDPGELFVHRNVANLAPPQDANYLSVLQFAVDVLKVKHIMVVGHYGCGGVAAAIDGKRRGLVDHWLHPIREVYAEHRPELEAIPEKREMIDRLTELNVARQVRNVAADVFVQDAWARGQSLAVHGWVYSLANGLVNDLNVGIASLEDYERTVAETVVPDRPFWKRGQAEG

SEQ ID NO: 20761 - protein, 211 aa, Campylobacter jejuni subsp. jejuni NCTC 11168
MENLISGAIKFMQEDFKEHEELFESLKNKQNPHTLFIGCSDSRVIPNLITNTGPGELFVIRNIANIVPPYRVGEDYLATTSAIEYALNSLHIKNIVVCGHSNCGGCNALYYSDEELNKIPNVKKWLTMLDPIKKDVMIFARDDLAMRSWLTEKLNLVNSLQNILTYPGVQEALDEGKIEVHAWYYIIETGEIYEYDFKAKIFTLIQDRKVQ

SEQ ID NO: 20762 - protein, 220 aa, Escherichia coli CFT073
MKDIDTLISNNALWSKMLVEEDPGFFEKLAQAQKPRFLWIGCSDSRVPAERLTGLEPGELFVHRNVANLVIHTDLNCLSVVQYAVDVLEVEHIIICGHYGCGGVQAAVENPELGLINNWLLHIRDIWFKHSSLLGEMPQERRLDTLCELNVMEQVYNLGHSTIMQSAWKRGQKVTIHGWAYGIHDGLLRDLDVTATNRETLEQRYRHGISNLKLKHINHK

SEQ ID NO: 20763 - protein, 209 aa, Microbulbifer degradans 2-40
MNDLDNLFQSNKDWAEAIKAEDPHFFEKLSAQQFPEYLWIGCSDSRVPANQIVGLMPGEMFVHRNIANCVVHTDLNCLSVIHYAVSVLKVKHIIVTGHYGCGGVAAALTNQQFGLVDHWIRNIRDVYQKQKAELENITDEKERLNRLCELNVKQQALNVTALPAVQNAWKEGRELTVHGWIYSLEDGLLKKLTDSIGSIEQVAEQFRVI

SEQ ID NO: 20764 - protein, 213 aa, Brucella suis 1330
MADLPDSLLAGYKTFMSEHFAHETARYRDLAEKGQSPETLVVACCDSRAAPETIFNAAPGEIFVLRNVANLIPPYEPDGEYHAASAALEFAVQSLKVKHIVVMGHGRCGGIKAALDTESAPLSPSDFIGKWMSLISPAAEAISGNALMTQSERHTALERISIRYSLANLRTFPCVDILEKKGKLTLHGAWFDISTGELWVMDHRTGDFKRPEL

SEQ ID NO: 20765 - protein, 219 aa, Brucella suis 1330
MPMKNDHSPDQRTLSELFEHNRQWAAEKQEKDPEYFSRLLSSQRPEFLWIGCSDSRVPANVVTGLQPGEVFVHRNVANLVHRADLNLLSVLEFAVGVLEIKHIIVCGHYGCGGVRAAMDGYGHGIIDNWLQPIRDIAQANQAELDTIENTQDRLDRLCELSVSSQVESLSRTPVLQSAWKDGKDIIVHGWMYNLKDGLLRDIGCDCTRNALQFACQPAE

SEQ ID NO: 20766 - protein, 230 aa, Haemophilus somnus 129PT
MKKIEQLFANNFSWANRMKEENAEYFKALAENQTPSYLWIGCSDSRVPAENLTNLKPGELFVHRNVANQVIHTDLNCLSVVQYAVDVLNIEHIIICGHTNCGGIKAAMVDQDLGLINNWLLHIRDIWFKHGHLLGKLSPEKRADMLTRINVAEQVYNLGSSSIVKSAWKSGKKLSLHGWIYDVNDGFLIDQGVTATSRETLEISYRDTIAKLFKLNEDELLLKPHQVKSE

SEQ ID NO: 20767 - protein, 286 aa, Pseudomonas syringae pv. syringae B728a
MSSAIALKGFVRDALQRGITSGSGQTGMKNPHQFVREDEDMTDIGKQHSATSSSTSSHSDSADVALKHIVDGFVHFRKEVFPQQEELFKKLATAQSPRAMFITCADSRIVPELITQSSPGDLFVTRNVGNVVPPYGQMNGGVSTALEYAVVALGVQHIIVCGHSDCGAMRAVLNPDSLDKMPTVKAWLRHAEVARTVVEQNCSCSGELETMQVLTQENVISQLQHLRTHPSVAAKMASGQLFIHGWVYSIETSEILAYDAELDRFIPLDGTGPTPMASPKARFSAD

SEQ ID NO: 20768 - protein, 260 aa, Pseudomonas syringae pv. syringae B728a
MNHSWEILISGGRKKWTGHDFEDSFFVDRDLKDLTPVQGWASLSRRQSMNELQDLIDNNARWADAIKQEDPEFFAKLARQQTPEFLWIGCSDARVPANEIVGMLPGDLFVHRNVANVVLHTDLNCLSVIQYAVDVLKVKHILVTGHYGCGGVRASMQDRQFGLIDGWLRTIRDLYYENRELLAKLPTEEERVDRLCELNVIQQVANVGHTSIVQNAWHRGQSLSVHGCIYGIKDGRWKSLDVTISGFEQLPPQYRLRPQD

SEQ ID NO: 20769 - protein, 243 aa, Pseudomonas fluorescens PfO-1
MSDKDKQPLAASAQAAPVAESADAALKRIVDGFLHFHHEVFPQQEELFKKLATAQSPRAMFITCADSRIVPELITQSSPGDLFVTRNVGNVVPPYGQMNGGVSTAIEYAVLALGVQHIIICGHSDCGAMRAVLNPDSLEKMPTVKAWLRHAEVAKTMVHDNCNCTDEKESMPILTEENVIAQLQHLRTHPSVASRMANGHLFIHGWVYNIETSEIKAYDADQGCFLPLDGSHPIPVATPKARF

SEQ ID NO: 20770 - protein, 219 aa, Pseudomonas fluorescens PfO-1
MKNLIEGFLKFQNEAFPQRTELFKHLATTQTPGTLFITCSDSRVVPELLTQQEPGELFVIRNAGNIVPSYSPHPGGVSATVEYAVAVLGVTDIVICGHSDCGAMTAIAQCKCMDHLPAVSGWLQHAESAKVVNESRPHANDAAKLSSMVRENVIAQLANIQTHPSVRLAQEKGLLNLHGWVYDIETGSIDALSADRRTFVSLAEQPSTCAVYGQTVDAA

SEQ ID NO: 20771 - protein, 214 aa, Pseudomonas fluorescens PfO-1
MHDLQDLIDNNERWADAITKEDPDFFAKLARQQTPEYLWIGCSDARVPANEIVGMLPGDLFVHRNVANVVLHTDLNCLSVIQYAVDVLKVKHILVTGHYGCGGVRASMQDRQFGLIDGWLRSIRDLYYEKREELARLPTEEEQVDRLCELNVIQQVANVAHTSIIQNAWHRGQSLSIHGCIYGIKDGRWKSLNTTISGFEQLPPQYRLRPVGAP

SEQ ID NO: 20772 - protein, 242 aa, Pseudomonas aeruginosa PAO1
MPDRMRGVKSDSPEQESADDALKRIVDGFQHFRREVFPEQQALFKKLANSQRPRAMFITCADSRIVPELITQSSPGDLFVTRNVGNVVPPYGQMNGGVSTAIEYAVLALGVHHIIVCGHSDCGAMRAVLDPQTLERMPTVKAWLRHAEVARTVVADNCDCGASHDTLGVLTEENVVAQLDHLRTHPSVASRLASGQLFIHGWVYDIESAQIRAYDAKQGRFLPLDGEHPVPMATPAPRYLSS

SEQ ID NO: 20773 - protein, 220 aa, Pseudomonas aeruginosa PAO1
MRDIIDGFLRFQRDAYPARSQLFKSLATRQAPKALFIACSDSRVVPELLTQREPGELFVIRNAGNIVPGYGPQPGGVSASVEYAVAVLGVGDIVVCGHSDCGAMGAIASCACLDQLPAVAGWLHHAEAARAMNSAHEHASEAARLDALVRHNVIAQLANLRTHPCVARALEQGRLNLHGWVYDIESGRIDALDGASRRFVSLAEHPEVRAVGGEPGQAVA

SEQ ID NO: 20774 - protein, 215 aa, Pseudomonas aeruginosa PAO1
MSDLQQLFENNVRWAEAIKQEDPDFFAKLARQQTPEYLWIGCSDARVPANEIVGMLPGDLFVHRNVANVVLHTDLNCLSVIQFAVDVLKVKHILVTGHYGCGGVRASLHNDQLGLIDGWLRSIRDLAYEYREHLEQLPTEEERVDRLCELNVIQQVANVSHTSIVQNAWHRGQSLSVHGCIYGIKDGLWKNLNVTVSGLDQLPPQYRLSPLGGCC

SEQ ID NO: 20775 - protein, 201 aa, Shewanella oneidensis MR-1
MKLLKPLFDNNLRWAGRISQEHPDFFEQLAKQQNPEYLWIGCSDSRVPSNQIIDLMPGEVFVHRNIANMVIHTDLNCLSVLQYAIDVLKVKHIMVVGHYGCGGVRAAMGNQRLGLIDNWLGHLRDVYRLHHDELMQMDEAKRFDRLCELNVIEQVSNVTSSTIVQEAWARGQELAVHGWIYGIDNGLLTDLDVTVDRAQVV

SEQ ID NO: 20776 - protein, 220 aa, Yersinia pestis CO92
MKEIEKLIANNRTWSNTICKDDPGFFEHLAQSQKPRFLWIGCSDSRVPAEQLTGLKSGELFVHRNVANLVIHTDLNCLSVVQYAIDVLQVEHIIICGHLGCGGVEAAIKGEEMGLIDNWLLHIRDLWYKHSSLLGELPQEERSNVLCQINVVEQVYNLGHSTIVRSAWKRGQKAMIHGWVYGIENGLLRDLEVSATSLGSLEMVYRKAMAELLQNNKEDH

SEQ ID NO: 20777 - protein, 222 aa, Vibrio vulnificus CMCP6
MPEIKQLFENNSKWSEEIKSHQPEYFSKLEEGQNPGFLWIGCSDSRVPAERLTGLYSGELFVHRNVANQVIHTDLNCLSVVQYAVDVLKVKHIIICGHYGCGGVNAAIENPRLGLINNWLLHIRDLYLKHRNWLGELPKEKWGDKLCEINVAEQVYNLGNSTIMESAWERGQDVEIHGVVYGIGDGLLQDIGVRCYSRESLEVNYQAAMAKILNSDVMKFHE

SEQ ID NO: 20778 - protein, 221 aa, Pseudomonas syringae pv. tomato str. DC3000
MKHIVDGFVHFRKEVFPQQEELFKKLATAQSPRAMFITCADSRIVPELITQSSPGDLFVTRNVGNVVPPYGQMNGGVSTALEYAVVALGVQHIIVCGHSDCGAMRAVLNPSSLDKMPTVKAWLRHAEVARTVVEQNCNCSGELETMQVLTQENVISQLHHLRTHPSVAAKMASGQLFIHGWVYSIETSEILAYDAERDTFVPLDGTGPTPMASPKARFSAD

SEQ ID NO: 20779 - protein, 212 aa, Pseudomonas syringae pv. tomato str. DC3000
MNELQDLIDNNARWADAINQEDPEFFAKLARQQTPEFLWIGCSDARVPANEIVGMLPGDLFVHRNVANVVLHTDLNCLSVIQYAVDVLKVKHILVTGHYGCGGVRASMQDRQFGLIDGWLRTIRDLYYENRDVLAKLPTEEERVDRLCELNVIQQVANVGHTSIVQNAWHRGQSLSVHGCIYGIKDGRWKSLDVTISGFEQLPPQYRLRPQD

SEQ ID NO: 20780 - protein, 222 aa, Vibrio parahaemolyticus RIMD 2210633
MPEIKQLFENNSKWSEEIKSDRPEYFAKLAEGQKPDFLWIGCSDSRVPAERLTGLYSGELFVHRNVANQVIHTDLNCLSVVQYAVDVLKVKHIIVCGHYGCGGVNAAIDNPQLGLINNWLLHIRDLYFKHRSYLDQMPVEDRADKLGEINVAEQVYNLGNSTIMQNAWERGQDVEIHGVVYGIEDGRLEYLGIRSNSKETVEASYQKALSTILNPDNKLLCR

SEQ ID NO: 20781 - protein, 214 aa, Bradyrhizobium japonicum USDA 110
MVTFPKHLLEGYQAFATQRLPTEQTRYRELSVKGQFPEVMVIGCCDSRVSPEVIFDVGPGELFVVRNIANLVPVYQPDGNAHGVSAALEYAVTVLKVKHIVVLGHAQCGGIRAFVDKIEPLTPGDFIGKWMQMFIKPGEVVEQRDHESMAQFVERIEKAAVFRSLENLMTFPFVQKAVDAGQMQTHGAYFGVAEGSLFVLDKVAKEFRSVKDAA

SEQ ID NO: 20782 - protein, 213 aa, Brucella melitensis 16M
MADLPDSLLAGYKTFMSEHFAHETARYRDLAEKGQSPETLVVACCDSRAAPETIFNAAPGEIFVLRNVANLIPPYEPDGEYHAASAALEFAVQSLKVKHIVVMGHGRCGGIKAALDTESAPLSPSDFIGKWMSLISPAAEAISGNALMTQSERHTALERISIRYSLANLRTFPCVDILEKKGKLTLHGAWFDISTGELWVMDHQTGDFKRPEL

SEQ ID NO: 20783 - protein, 211 aa, Brucella melitensis 16M
MPMKNDHSPDQRTLSELFEHNRQWAAEKQEKDPEYFSRLSSSQRPEFLWIGCSDSRVPANVVTGLQPGEVFVHRADLNLLSVLEFAVGVLEIKHIIVCGHYGCGGVRAAMDGYGHGIIDNWLQPIRDIAQANQAELDTIENTQDRLDRLCELSVSSQVESLSRTPVLQSAWKDGKDIIVHGWMYNLKDGLLRDIGCDCTRNALQFACQPAE

SEQ ID NO: 20784 - protein, 206 aa, Coxiella burnetii RSA 493
MEKSFEKIIRGYHDFRKKYATGNNSSMQSLAYHGQQPEIMIVACCDSRVDPALILQCDPGDLFVVRNVANIVPPYEADESHHGTSAALEFGICYLNVKHLIILGHSQCGGINALLNSENLKQNDFITRWVSLIKTNSSMIQDANQFSKEALTHSYQNCLTFPWIKERIQQKKLSIHLWFFDIKEGEIFAYSFENKKYQQLISNAQN

SEQ ID NO: 20785 - protein, 193 aa, Streptomyces avermitilis MA-4680
MQPLIDHARAHGQRPEEFAQLAEGQSPQALFITCSDSRVVPALITGARPGELFELRTAGNIVPPYAASQHPTSEAATIEYAVEVLKVTDVVVCGHSHCGAVGALVRGDDLTAVPAVRDWLAHAAPRPAGAVEDPAVTEAVQSHVLTQLLRLRSYPCVSAKLTSGQLRLHAWFYEVHTGSVLAHRPQTDTFTAL

SEQ ID NO: 20786 - protein, 201 aa, Streptomyces avermitilis MA-4680
MKELLDHARSFKRQVDFESGEYRKLAEGQYPEALFITCSDSRVIPALITGARPGEIFELRNAGNIVPPHGQHGASGEAATIEYALEVLGVQNVVVCGHSHCGAMGALKSGDDLSMLPGVDAWLELARPDLAPMLGTACDDPSLPDVAQCNIVNQLSTLRSYPVVRQRLETGLLRLHGWYYEVDTGQVYELDDDGRFRVHAG

SEQ ID NO: 20787 - protein, 211 aa, Geobacter metallireducens
MITTLLEGNRRFVAETFEKEKELFVELTRGQKPTVLWIGCSDSRVPVNTITQTKAGEVFVHRNVGNIVAANDWNLSAVLEFSINHLKIPDIVICGHYGCGGIQALDEENSDDKYIPIWLINAYKAKERVDEKLRALHIDIPHEQRMKLIVEENVRLQLEHLREYPFVRRAVEEGKLTLNGWVYDMGNGEIRIVATESAPRIGKGTCSIKIK

SEQ ID NO: 20788 - protein, 214 aa, Ralstonia solanacearum
MYRPKRMLVGNVAWAHEIAERDPRFFSRLAQGQKPQVLWIGCADSRVPAETITHSNPGDLFVHRNIANLVCPADDNTMSVLEYAVRVLKVGHIIVCGHDGCGGVRASLLPQSDALPHVNRRIGPLCALAVRHRAELDAVPDMDDRVNRLAELNVLEQVRWLRESSIVREAEPAPRVHGWIFGLADGRIRVLGSGEPGEAPPVRGDILEPAEAEA

SEQ ID NO: 20789 - protein, 226 aa, Ralstonia solanacearum
MPHRIKELFENNRKWVERVNAEDPAFFSGLANQQNPEYLWIGCSDSRVPANQIIGLPPGEVFVHRNIANVVVHSDLNCLSVLQFAVEVLKIRHITVVGHYGCSGVKAALTNQRFGLADNWIRHVRDVAEQHDTYLGTVIREQDRHDRLCELNVIHQVNNVCLTTVVQDAWERGQPLTVHGWIYGVKDGLLRNLGMAVNSNEELHGQLASAWLNYGKKGSVPTPVGY

SEQ ID NO: 20790 - protein, 330 aa, Flaveria brownii
MSTASAFATNVPSFVNASSLKKSSTSSARSGVLSAKFTCNSSSSSSSATPPSLIRNEPVFAAPAPIITPNWTEDGNESYEEAIDALKKMLIEKGELEPVAAARIDQITAQAAAPDTKAPFDPVERIKSGFVKFKTEKFVTNPALYDELAKGQSPKFMVFACSDSRVCPSHVLDFQPGEAFVVRNVANMVPPFDKTKYSGVGAAVEYAVLHLKVQEIFVIGHSRCGGIKGLMTFPDEGPHSTDFIEDWVKVCLPAKSKVVAEHNGTHLDDQCVLCEKEAVNVSLGNLLTYPFVRDGLRNNTLALKGGHYDFVNGTFELWALDFGLSSPTSV

SEQ ID NO: 20791 - protein, 263 aa, Lotus japonicus
MAKHSPDQLAIEELKKLIREKEELNESADTKIEDVIAELQLQGCHPTPETAEQRIIDGFTYFKIHNFDKNPDLYKELAKGQSPKFLIFACSDSRVSPTTILNFQPGEAFMVRNIANMVPPFNQLRYSGVGAAIEYAILELKVPNILIIGHSRCGGIARLMSHPEDDSPSFEFIDDWVKIGLPAKIKVLKEHASCDSLEQRTLCEKESVNNSLVNLHTYPFVDEQIRSKGLGLFGVYYDFVNGEFKLWKYESHVTKHISIPHCH

SEQ ID NO: 20792 - protein, 343 aa, Azotobacter vinelandii
MALRHRCRRVPAGTIGRDELRCIRFHLSCVAGYSVSLKLWAPRIQLYLSWLTQADFHRGHPSAPRPPVPKSSSRLVINGDDHRALPLSATQGGYAMNNVISKQGPSQGTTEARTESENAEVALKNIVDGFHRFRTEVFPQQKEFYRSLASAQRPRAMFITCADSRIVPELITQSAPGDLFVSRNVGNVVPPYGQINGGVSTAIEYAVAALGVHHIVVCGHSDCGAMKAVLDPPTLESMPTVKAWLRHAEVAKTVVLENRCSCNGRDTLEVLTEENVVAQLDHLRTHPSVAARLASGQLFIHGWVYSIETAEIKAYDAEQGCFRPLDSEGSIPVATPRPRFHQG

SEQ ID NO: 20793 - protein, 254 aa, Spinacia oleracea
MAYEEAIAALKKLLSEKGELENEAASKVAQITSELADGGTPSASYPVQRIKEGFIKFKKEKYEKNPALYGELSKGQAPKFMVFACSDSRVCPSHVLDFQPGEAFMVRNIANMVPVFDKDKYAGVGAAIEYAVLHLKVENIVVIGHSACGGIKGLMSFPDAGPTTTDFIEDWVKICLPAKHKVLAEHGNATFAEQCTHCEKEAVNVSLGNLLTYPFVRDGLVKKTLALQGGYYDFVNGSFELWGLEFGLSPSQSV

SEQ ID NO: 20794 - protein, 319 aa, Spinacia oleracea
MSTINGCLTSISPSRTQLKNTSTLRPTFIANSRVNPSSSVPPSLIRNQPVFAAPAPIITPTLKEDMAYEEAIAALKKLLSEKGELENEAASKVAQITSELADGGTPSASYPVQRIKEGFIKFKKEKYEKNPALYGELSKGQAPKFMVFACSDSRVCPSHVLDFQPGEAFMVRNIANMVPVFDKDKYAGVGAAIEYAVLHLKVENIVVIGHSACGGIKGLMSFPDAGPTTTDFIEDWVKICLPAKHKVLAEHGNATFAEQCTHCEKEAVNVSLGNLLTYPFVRDGLVKKTLALQGGYYDFVNGSFELWGLEYGLSPSQSV

SEQ ID NO: 20795 - protein, 254 aa, Spinacia oleracea
MAYEEAIAALKKLLSEKGELENEAASKVAQITSELADGGTPSASYPVQRIKEGFIKFKKEKYEKNPALYGELSKGQAPKFMVFACSDSRVCPSHVLDFQPGEAFMVRNIANMVPVFDKDKYAGVGAAIEYAVLHLKVENIVVIGHSACGGIKGLMSSPDAGPTTTDFIEDWVKICLPAKHKVLAEHGNATFAEQCTHCEKEAVNVSLGNLLTYPFVRDGLVKKTLALQGGYYDFVNGSFELWGLEFGLSPSQSV

SEQ ID NO: 20796 - protein, 571 aa, Porphyridium purpureum
MVQIYNGGAGFERALSRGKSKDGKPKATAAATAAPAASSSAAPARAAPARAAPAAAAPVSKPTAEKPAVAQDATLVKLAAGMGVMSDLEKKFIELEAKLVAQPAGQAMPGKSNIFANNEAWRQEMLKQDPEFFNRLANGQSPEYLWIGCADSRVPANQLLDLPAGEVFVHRNIANQCIHSDISFLSVLQYAVQYLKVKHILVCGHYGCGGAKAALGDSRLGLIDNWLRHIRDVRRMNAKYLDKCKDGDEELNRLIELNVLEQVHNVCATSIVQDAWDAGQELTVQGVVYGVGDGKLRDLGVVVNSSDDISKFYRTKSDSGALKAGNPNAPLVQVTKGGESELDSTMEKLTAELVQQTPGKLKEGANRVFVNNENWRQKMLKQDPQFFSNLAHTQTPEILWIGCADSRVPANQIINLPAGEVFVHRNIANQCIHSDMSFLSVLQYAVQYLKVKRVVVCGHYACGGCAAALGDSRLGLIDNWLRHIRDVRRHNQAELSRITDPKDSLNRLIEINVLEQMHNVCATSIVQDAWDAGQELEVQGVVYGVGDGKLRDMGVVAKANDDIGQIFRTKQ

SEQ ID NO: 20797 - protein, 571 aa, Porphyridium purpureum
MVQIYNGGAGFERALSRGKSKDGKPKATATATAAPAASSSAAPARAAPAKAAPAAAAPVSKPTAEKPAVAQDATLVKLAAGMGVMSDLEKKFIELEAKLVAQPAGQAVPGKSNIFANNEAWRQEMLKQDPEFFNRLANGQSPEYLWIGCADSRVPANQLLDLPAGEVFVHRNIANQCIHSDISFLSVLQYAVQYLKVKHILVCGHYGCGGAKAALGDSRLGLIDNWLRHIRDVRRMNAKYLDKCKDGDEELNRLIELNVLEQVHNVCATSIVQDAWDAGQELTVQGVVYGVGDGKLRDLGVVVNSSDDISKFYRTKSDSGALKAGNPNAPLVQVTKGGESELDSTMEKLTAELVQQTPGKLKEGANRVFVNNENWRQKMLKQDPQFFSKLAHTQTPEILWIGCADSRVPANQIINLPAGEVFVHRNIANQCIHSDMSFLSVLQYAVQYLKVKRVVVCGHYACGGCAAALGDSRLGLIDNWLRHIRDVRRHNQAELSRITDPKDSLNRLIEINVLEQMHNVCATSIVQDAWDAGQELEVQGVVYGVGDGKLRDMGVVAKANDDIGQIFRTKQ

SEQ ID NO: 20798 - protein, 496 aa, Porphyridium purpureum
VKLAAGMGVMSDLEKKFIELEAKLVAQPAGQAMPGKSNIFANNEAWRQEMLKQDPEFFNRLANGQSPEYLWIGCADSRVPANQLLDLPAGEVFVHRNIANQCIHSDISFLSVLQYAVQYLKVKHILVCGHYGCGGAKAALGDSRLGLIDNWLRHIRDVRRMNAKYLDKCKDGDEELNRLIELNVLEQVHNVCATSIVQDAWDAGQELTVQGVVYGVGDGKLRDLGVVVNSSDDISKFYRTKSDSGALKAGNPNAPLVQVTKGGESELDSTMEKLTAELVQQTPGKLKEGANRVFVNNENWRQKMLKQDPQFFSNLAHTQTPEILWIGCADSRVPANQIINLPAGEVFVHRNIANQCIHSDMSFLSVLQYAVQYLKVKRVVVCGHYACGGCAAALGDSRLGLIDNWLRHIRDVRRHNQAELSRITDPKDSLNRLIEINVLEQMHNVCATSIVQDAWDAGQELEVQGVVYGVGDGKLRDMGVVAKANDDIGQIFRTKQ

SEQ ID NO: 20799 - protein, 322 aa, Gossypium hirsutum
SINGWCLTSSSSSTTTSSFSARRRPTLRPSVVASLNSSPSPPTLIQDRPVFAAPVPLLTPREEMGNKSYDEAIEALKKLLSEKGELKAEAAARVDQITAELNTTSADGKPSDSSVERLKEGFVYFKKEKYEKNPALYGELAKGQSPKYMIVACSDSRVCPSHVLDMQPGEAFVVRNVANMVPPYDQIKYAGIGSAIEYAVLHLKVQEIVVIGHSACGGIKGLMSFPLDGNNSTDFIEDWVKIGIPAKAKVLAEHGGEPLGVQCTHCEKEAVNVSLGNLLSYPFVRDGLVKKTLGIKGGYYDFVKGSFELWSLQFQLSSSLSV

SEQ ID NO: 20800 - protein, 326 aa, Gossypium hirsutum
MSTASINGWCLTSSSSTTTTSSFSARRRPTLRPSVVASLNSSPSPPTLIQDRPVFAAPIPLLTPREEMGNKSYDEAIEALKKLLSEKGELKAEAAARVDQITAELNTASADGKPSDSSVERLKEGFVYFKKEKYEKNPALYGELAKGQSPKYMIVACSDSRVCPSHVLDMQPGEAFVVRNVANMVPPYDQIKYAGIGSAIEYAVLHLKVQEIVVIGHSACGGIKGLMSFPFDGNNSTDFIEDWVKIGIPAKTKVLAEHGGEPLGVQCTHCEKEAVNVSLGNLLSYPFVRDGLVKKTLGIKGGYYDFVKGSFELWSLQFQLSSSLSV

SEQ ID NO: 20801 - protein, 319 aa, Gossypium hirsutum
GWCLTSSSSTTTTSSFSARRRPTLRPSVVASLNSSPSPPTLIQDRPVFAAPIPLLTPREEMGNKSYDEAIEALKKLLSEKGELKAEAAARVDQITAELNTASADGKPSDSSVERLKEGFVYFKKEKYEKNPALYGELAKGQSPKYMIVACSDSRVCPSHVLDMQPGEAFVVRNVANMVPPYDQIKYAGIGSAIEYAVLHLKVQEIVVIGHSACGGIKGLMSFPFDGNNSTDFIEDWVKIGIPAKTKVLAEHGGEPLGVQCTHCEKEAVNVSLGNLLSYPFVRDGLVKKTLGIKGGYYDFVKGSFELWSLQFQLSSSLSV

SEQ ID NO: 20802 - protein, 336 aa, Arabidopsis thaliana
MSTAPLSGFFLTSLSPSQSSLQKLSLRTSSTVACLPPASSSSSSSSSSSSRSVPTLIRNEPVFAAPAPIIAPYWSEEMGTEAYDEAIEALKKLLIEKEELKTVAAAKVEQITAALQTGTSSDKKAFDPVETIKQGFIKFKKEKYETNPALYGELAKGQSPKYMVFACSDSRVCPSHVLDFQPGDAFVVRNIANMVPPFDKVKYGGVGAAIEYAVLHLKVENIVVIGHSACGGIKGLMSFPLDGNNSTDFIEDWVKICLPAKSKVISELGDSAFEDQCGRCEREAVNVSLANLLTYPFVREGLVKGTLALKGGYYDFVKGAFELWGLEFGLSETSSV

SEQ ID NO: 20803 - protein, 270 aa, Arabidopsis thaliana
MGTEAYDEAIEALKKLLIEKEELKTVAAAKVEQITAALQTGTSSDKKAFDPVETIKQGFIKFKKEKYETNPALYGELAKGQSPKYMVFACSDSRVCPSHVLDFQPGDAFVVRNIANMVPPFDKVKYGGVGAAIEYAVLHLKVENIVVIGHSACGGIKGLMSFPLDGNNSTDFIEDWVKICLPAKSKVISELGDSAFEDQCGRCEREAVNVSLANLLTYPFVREGLVKGTLALKGGYYDFVKGAFELWGLEFGLSETSSVKDVATILHWKL

SEQ ID NO: 20804 - protein, 347 aa, Arabidopsis thaliana
MSTAPLSGFFLTSLSPSQSSLQKLSLRTSSTVACLPPASSSSSSSSSSSSRSVPTLIRNEPVFAAPAPIIAPYWSEEMGTEAYDEAIEALKKLLIEKEELKTVAAAKVEQITAALQTGTSSDKKAFDPVETIKQGFIKFKKEKYETNPALYGELAKGQSPKYMVFACSDSRVCPSHVLDFQPGDAFVVRNIANMVPPFDKVKYGGVGAAIEYAVLHLKVENIVVIGHSACGGIKGLMSFPLDGNNSTDFIEDWVKICLPAKSKVISELGDSAFEDQCGRCEREAVNVSLANLLTYPFVREGLVKGTLALKGGYYDFVKGAFELWGLEFGLSETSSVKDVATILHWKL

SEQ ID NO: 20805 - protein, 280 aa, Arabidopsis thaliana
MAPAFGKCFMFCCAKTSPEKDEMATESYEAAIKGLNDLLSTKADLGNVAAAKIKALTAELKELDSSNSDAIERIKTGFTQFKTEKYLKNSTLFNHLAKTQTPKFLVFACSDSRVCPSHILNFQPGEAFVVRNIANMVPPFDQKRHSGVGAAVEYAVVHLKVENILVIGHSCCGGIKGLMSIEDDAAPTQSDFIENWVKIGASARNKIKEEHKDLSYDDQCNKCEKEAVNVSLGNLLSYPFVRAEVVKNTLAIRGGHYNFVKGTFDLWELDFKTTPAFAFS

SEQ ID NO: 20806 - protein, 258 aa, Arabidopsis thaliana
MATESYEAAIKGLNDLLSTKADLGNVAAAKIKALTAELKELDSSNSDAIERIKTGFTQFKTEKYLKNSTLFNHLAKTQTPKFLVFACSDSRVCPSHILNFQPGEAFVVRNIANMVPPFDQKRHSGVGAAVEYAVVHLKVENILVIGHSCCGGIKGLMSIEDDAAPTQSDFIENWVKIGASARNKIKEEHKDLSYDDQCNKCEKEAVNVSLGNLLSYPFVRAEVVKNTLAIRGGHYNFVKGTFDLWELDFKTTPAFAFS

SEQ ID NO: 20807 - protein, 258 aa, Arabidopsis thaliana
MSTESYEDAIKRLGELLSKKSDLGNVAAAKIKKLTDELEELDSNKLDAVERIKSGFLHFKTNNYEKNPTLYNSLAKSQTPKFLVFACADSRVSPSHILNFQLGEAFIVRNIANMVPPYDKTKHSNVGAALEYPITVLNVENILVIGHSCCGGIKGLMAIEDNTAPTKTEFIENWIQICAPAKNRIKQDCKDLSFEDQCTNCEKEAVNVSLGNLLSYPFVRERVVKNKLAIRGAHYDFVKGTFDLWELDFKTTPAFALS

SEQ ID NO: 20808 - protein, 259 aa, Arabidopsis thaliana
MGNESYEDAIEALKKLLIEKDDLKDVAAAKVKKITAELQAASSSDSKSFDPVERIKEGFVTFKKEKYETNPALYGELAKGQSPKYMVFACSDSRVCPSHVLDFHPGDAFVVRNIANMVPPFDKVKYAGVGAAIEYAVLHLKVENIVVIGHSACGGIKGLMSFPLDGNNSTDFIEDWVKICLPAKSKVLAESESSAFEDQCGRCEREAVNVSLANLLTYPFVREGVVKGTLALKGGYYDFVNGSFELWELQFGISPVHSI

SEQ ID NO: 20809 - protein, 331 aa, Arabidopsis thaliana
MVPFWTTVSRNGSSDSETTLQSASKATKQYKYPSLRPSHRLSLLFLFPFHLSANGACFRCTCFSHFKLELRRMGNESYEDAIEALKKLLIEKDDLKDVAAAKVKKITAELQAASSSDSKSFDPVERIKEGFVTFKKEKYETNPALYGELAKGQSPKYMVFACSDSRVCPSHVLDFHPGDAFVVRNIANMVPPFDKVKYAGVGAAIEYAVLHLKVENIVVIGHSACGGIKGLMSFPLDGNNSTDFIEDWVKICLPAKSKVLAESESSAFEDQCGRCEREAVNVSLANLLTYPFVREGVVKGTLALKGGYYDFVNGSFELWELQFGISPVHSI

SEQ ID NO: 20810 - protein, 301 aa, Arabidopsis thaliana
MAATPTHFSVSHDPFSSTSLLNLQTQAIFGPNHSLKTTQLRIPASFRRKATNLQVMASGKTPGLTQEANGVAIDRQNNTDVFDDMKQRFLAFKKLKYMDDFEHYKNLADAQAPKFLVIACADSRVCPSAVLGFQPGDAFTVRNIANLVPPYESGPTETKAALEFSVNTLNVENILVIGHSRCGGIQALMKMEDEGDSRSFIHNWVVVGKKAKESTKAVASNLHFDHQCQHCEKASINHSLERLLGYPWIEEKVRQGSLSLHGGYYNFVDCTFEKWTVDYAASRGKKKEGSGIAVKDRSVWS

SEQ ID NO: 20811 - protein, 259 aa, Arabidopsis thaliana
MGNESYEDAIEALKKLLIEKDDLKDVAAAKVKKITADVQAASSSDSKSFDPVERIKEGFVTFKKEKYETNPALYGELAKGQSPKYMVFACSDSRVCPSHVLDFHPGDAFVVRNIANMVPPFDKVKYAGVGAAIEYAVLHLKVENIVVIGHSACGGIKGLMSFPLDGNNSTDFIEDWVKICLPAKSKVLAESESSAFEDQCGRCEREAVNVSLANRCTYPFVREGVVKGTLALKGGYYAFVNGSFELWELQFGISPVHSI

SEQ ID NO: 20812 - protein, 290 aa, Arabidopsis thaliana
MAFTLGGRARRLVSATSVHQNGCLHKLQQIGSDRFQLGEAKAIRLLPRRTNMVQELGIREEFMDLNRETETSYDFLDEMRHRFLKFKRQKYLPEIEKFKALAIAQSPKVMVIGCADSRVCPSYVLGFQPGEAFTIRNVANLVTPVQNGPTETNSALEFAVTTLQVENIIVMGHSNCGGIAALMSHQNHQGQHSSLVERWVMNGKAAKLRTQLASSHLSFDEQCRNCEKESIKDSVMNLITYSWIRDRVKRGEVKIHGCYYNLSDCSLEKWRLSSDKTNYGFYISDREIWS

SEQ ID NO: 20813 - protein, 286 aa, Arabidopsis thaliana
MAFTLGGRARRLVSATSVHQNGCLHKLQQIGSDRFQLGEAKAIRLLPRRTNMVQELGIREEFMDLNRETETSYDFLDEMRHRFLKFKRQKYLPEIEKFKALAIAQSPKVMVIGCADSRVCPSYVLGFQPGEAFTIRNVANLVTPVQNGPTETNSALEFAVTTLQVENIIVMGHSNCGGIAALMSHQNHQGQHSRWVMNGKAAKLRTQLASSHLSFDEQCRNCEKESIKDSVMNLITYSWIRDRVKRGEVKIHGCYYNLSDCSLEKWRLSSDKTNYGFYISDREIWS

SEQ ID NO: 20814 - protein, 255 aa, Arabidopsis thaliana
MAFTLGGRARRLVSATSVHQNGCLHKLQQIGSDRFQLEAKAIRLLPRRTNMVQELGIREEFMDLNRETETSYDFLDEMRHRFLKFKRQKYLPEIEKFKALAIAQSPKVMVIGCADSRVCPSYVLGFQPGEAFTIRNVANLVTPVQNGPTETNSALEFAVTTLQVENIIVMGHSNCGGIAALMSHQNHQGQHSSLVERWVMNGKAAKLRTQLASSHLSFDEQCRNCEKESIKDSVMNLITYSWIRDRVKRDREIWS

SEQ ID NO: 20815 - protein, 215 aa, Urochloa panicoides
MSGCLCLPGYKKKTMDPVERLQSGFKQFKSEVYDKKPELFEPLKEGQAPTYMVFACSDSRCCPSVTLGLKPGEAFTVRNIAAMVPPYDKNRYTGIGSAIEYAVCALKVKVLTVIGHSRCGGIKALLSMQDGAADNFHFVEDWVRIGFLAKKKVLTDHPMAPFDDQCSILEKEAVNVSLYNLLTYPWVKEGVSNGSLKLVGGHYDFVKGAFVTWEK

SEQ ID NO: 20816 - protein, 240 aa, Urochloa panicoides
MSALAIRSAPSSIIASVRTPAHRRPGLVRNAAATTAELTMDPVERLQSGFKQFKSEVYDKKPELFEPLKEGQAPTYMVFACSDSRCCPSVTLGLKPGEAFTVRNIAAMVPPYDKNRYTGIGSAIEYAVCALKVKVLTVIGHSRCGGIKALLSMQDGAADNFHFVEDWVRIGFLAKKKVLTDHPMAPFDDQCSILEKEAVNVSLYNLLTYPWVKEGVSNGSLKLVGGHYDFVKGAFVTWEK

SEQ ID NO: 20817 - protein, 214 aa, Mesorhizobium loti
MPHLPDHLLAGYRNFMNGRYLTESGRYRELAREGQAPETMIVACCDSRAAPEAIFDAGPGELFVLRNVGNLVPPYEPDGEFHSTSAALEFAVQSLKVKNIVVMGHGRCGGIRAALDPNAAPLSPGDFIGKWMSLIAPAAETVSSSTFMTAAERQTALERISIRYSIANLRTFPCVSILEGKGRLSLHGAWFDISTGELWVMNKETGDFERPVLE

SEQ ID NO: 20818 - protein, 227 aa, Sinorhizobium meliloti
MPQERVDETGLPMDIQGFPEHLLTGYRNFMSGRFNEQQQRYKTLAESGQKPKTMVIACCDSRAAPETIFDSGPGELFVVRNVANMMPPYEPDGHYHSTSAALEFAVQSLRVTNIVVMGHGRCGGIKAALDPDAEPLSPGDFIGRWMNLLKPAAEQIQSNDVMTQAERQRALERVSIRNSIANLRTFPCVNILESKGKLRLHGAWFDISTGELWVMDAKTGDFSRPGM

SEQ ID NO: 20819 - protein, 330 aa, Glycine max
MSTSSINGWCLSSISPAKTSLKKATLGPSVFATVSTPSSPSSSSSSSFPSLIQDRPVFAAPAPIITPTVREDMAKEYEQAIEELQKLLREKSELKATAAEKVEQITASLGTSSSDGIPSSEASDRIKAGFIHFKKEKYDKNPALYGELAKGQSPKFMVFACSDSRVCPSHVLDFQPGEAFVVRNVANIVPPYDQSKYAGTGAAVEYAVLHLKVSEIVVIGHSACGGIKGLLSFPYDGTYSTDFIEEWVKIGLPAKAKVKTQHGDAPFAELCSHCEKEAVNVSLGNLLTYPFVRDGLVNKTLSLKGGYYDFVKGSFELWGLQFGLASSFSV

SEQ ID NO: 20820 - protein, 308 aa, Glycine max
  unsure (1)..(308): unsure at all Xaa locations
XLEDSKANKEANPTKNSNXLILGXSVKSNFHISEREDMAKEYEQAIEELQKLLREKSELKATAAEKVEQITXASLGTSSSDGXIPSSEASDRIKAGFIHFKKEKYDKNPALYGELAKGQSPKFMVFACSDSRVCPSHVLDFQPGEAFVVRNVANIVPPYDQSKYAGTGAAVEYAVLHLKVSEIVVIGHSACGGIKGLLSFPYDGTYSTDFIEEWVKIGLPAKAKVKTQHGDAPFAELCSHCEKEAVNVSLGNLLTYPFVRDGLVNKTLSLKGGYYDFVKGSFELWGLQFGLASSFSVKDVATILHWKL

SEQ ID NO: 20821 - protein, 331 aa, Glycine max
  unsure (1)..(331): unsure at all Xaa locations
MSTSSINGWCLSSISPAKTSLRKATLRPSVFATLNTPSSPSSSSSFPSLIQDRPVFAAPAPIITPTVREDMAKEYEKAIEELQKLLREKSELKATAAEKVEQITASLGTSSSDGIPSSEASDRIKAGFIHFKKEKYDKNPALYGELAKGQSPKFMVFACSDSRVCPSHVLDFQPGEAFVVRNVANIVPPYDQSKYAGTGAAVEYAVLHLKVSEIVVIGHSAXCGGIKGLLSFPYDGXTYSTDFIEEWVKIGLPAKAKVKTQHGDAPFAELCSHCEKESVNVSLGNLLTYPFVRDGLVNKTLSLKGGYYDFVKGSFEXLWGLQFGLASSFSV

SEQ ID NO: 20822 - protein, 261 aa, Glycine max
MAKSSELAIEELKKLLRDKEEFDAVAAAKVEELIAELQGCGPRPYEPAVQRIVDGFTHFKINNFDKNSDLYSQLANGQSPKYLVFSCSDSRVSATTILNFQPGEAFMVRNIANMVPPFNQLRYSGVGAAIEYAITALKVPNILVIGHSRCGGIQRLMSHPEDGSSPFDFIDDWVKIGLPAKLKVLKEYEGYDFKEQCKFCEKESVNNSLVNLKTYPYVEKGIRNKNIALLGGYYDFVIGEFKLWKYESHITEPISIPLCTH

SEQ ID NO: 20823 - protein, 182 aa, Glycine max
  unsure (1)..(182): unsure at all Xaa locations
XGQSPKFMVFACSDSRXVCPSHVLDFQPGEAFVVRNVANIVPPYDQSKYAGTGAAVEYAVLHLKVSEIVVIGHSACGGIKGLLSFPYDGTYSTDFIEEWVKIGLPAKAKVKTQHGDAPFAELCSHCEKESVNVSLGNLLTYPFVRDGLVNKTLSLKGGYYDFVKGSFELWGLQFGLASSFSV

SEQ ID NO: 20824 - protein, 261 aa, Glycine max
MAKSSELAIEELKKLLRDKEEFDAVAAAKVEELIAELQGCGPRPYEPAVQRIVDGFTHFKINNFDKNSDLYSQLANGQRPKYLVFSCSDSRVSATTILNFQPGEAFMVRNIANMVPPFNQLRYSGVGAAIEYAITALKVPNILVIGHSRCGGIQRLMSHPEDGSAPFDFIDDWVKIGLPAKLKVLKEYEGYDFKEQCKFCEKESVNNSLVNLKTYPYVEKGIRNKNIALLGGYYDFVIGEFKLWKYESHITEPISIPLCTH

SEQ ID NO: 20825 - protein, 261 aa, Glycine max; identical to SEQ ID NO: 20824

SEQ ID NO: 20826 - protein, 324 aa, Glycine max
  unsure (1)..(324): unsure at all Xaa locations
FQKTKPCRFCARGRVRFSLSSPMAAPAPFSLSSDPFASKSATSTXPWSCRAENRELXANSFRIVHGIKEKSXGFTLKASMGPPGFTEKLNNNRLKTLADAEDGCDIFNDLKDRFLSFKKNKYMKNIEQFENLAKVQTPKFMVIACADSRVCPSNVLGFQPGEAFMIRNVANLVPTFESGPSETNAALEFAVNSLLVENILVIGHSCCGGIRALMGMQDDDVEKSFIKSWVIAGKNARKKAKAAASNLSFDEQCKHCEKESINHSLLNLLTYPWIEEKVANGELSIHGGYYDFTDCSFEKWTLDYRGTKLEENGKIAAKNKIFWC

SEQ ID NO: 20827 - protein, 239 aa, Glycine max
  unsure (1)..(239): unsure at all Xaa locations
XSAARRRQNYQNLFGLMKQRFLSFKSQKYIQKXELEHFEALAEAQFPKVIANXFMVIACADSRVCPSNILGFQPGEVFMIRNIANLVPVMKNGPSECNAALEFAVTTLQVENILVIGHSSCAGIEALMNMQEDAESRNFIHKWVANGKLAKQRTKAATAHLSFDQQCKFCEKESINQSLLNLLSYPWIQDRVRKELLSLHGGYYNFSNCSFEKWTLDFXXQCNVEEGSSYVVKEQEFWC

SEQ ID NO: 20828 - protein, 325 aa, Glycine max
  unsure (1)..(325): unsure at all Xaa locations
FQKTKQCLFFSLHNFYFCLSSPMAAPAPFSLSSDPFASKSATSTIFGPAALKKGNFEQTHFGIFTALRRXXQGFTLKASMGPPGFTEKLNNNKLKTLADAEDGCDIFNDLKDRFXLSFKKNKYLKNIEHFENLAKVQTPKFMVIACADSRVCPSNVLGFQPGEAFMIRNVANLVPTFESGPTETNAALEFAVNSLLVENILVIGHSCCGGIRALMGMQDDDVEKSFIKSWVIAGKNARKKAKAAASNLSFDEQCKHCEKESINHSLLNLLTYPWIEEKVANGELSIHGGYYDFTDCSFEKWTLDYRGTKLEENGKIAAKNKIFWC

SEQ ID NO: 20829 - protein, 172 aa, Glycine max
  unsure (1)..(172): unsure at all Xaa locations
XCSDSXRVCPSHVLDFQPGEAFXVRNVANIVPPYDQSKYAGTGAAVEYAVLHLKVSEIVVIGHSACGGIKGLLSFPYDGTYSTDFIEEWVKIGLPAKAKVKTQHGDAPFAELCSHCEKEAVNVSLGNLLTYPFVRDGLVNKTLSLKGGYYDFVKGSFELWGLQFGLASSFSV

SEQ ID NO: 20830 - protein, 338 aa, Glycine max
  unsure (1)..(338): unsure at all Xaa locations
MSTSSINGWCLSSISPAKTSLKKATLXAPSVFATVSTPSSPSSSSSSSSFPSLIQDRPVFAAPSPIITPTVREDMAKEYEQAIEELQKLLREKSELKATAAEKVEQITASLGTSSSDGIPSSEASDRIKAXGFIHFKKEKYDKNPALYGELAKGQSPXKFMXEFACSDSRVCPSHVLEFQPGEAFVVRNVANIVPPYDQSKYAGTGXAAVEYAVLHLKVSEIVVIGHSACGGIKGLXCLFPYDGTYSTDFIEEWVKIGLAXAKAKVKTQHGDAPFAELCSHCEKEAVNVSLGNLLTYPFVRDGLVNKTLSLKGGYYDFVKGSFELWGLQFGLASSFSV

SEQ ID NO: 20831 - protein, 292 aa, Glycine max
YLLIISQTQTSLFSSKSHHPESTKATHISNLFLKEEMAGESYEEAITSLTKLLSEKAELGGVAAAKIKELTAELDAAGSKPFNPEERIRTGFIHFKNEKFEKNPYLYGELAKGQSPKFMVFACSDSRVCPSHILDFQPGEAFMVRNIANMVPPYDKTKYSGAGAAIEYAVLHLKVENIVVIGHSCCGGIKGLMSIPDDGTTASEFIEQWVQICTPAKSKVKAGKSDLSFSEQCTNCEKEAVNVSLGNLLTYPFVRDGVVNKTLALKGAHYDFVNGNFELWDLNFKLLPTISV

SEQ ID NO: 20832 - protein, 336 aa, Glycine max
  unsure (1)..(336): unsure at all Xaa locations
PRVRPRVRINGWCLSSISPAVTSRKKATLGPSFFATVSTPSSPSSSSSSSFPSLIQDRPVFAAPAPIITPTVREDMAKEYEQAIEELQKLLREKSELKATAAEKVEQITASLGTSSSDGIPSSEASDRIKAGFIHFKKEKYDKNPALYGELAKGQSPKFMVFACSDSRVCPSHVLDFQPGEAFVVRNVANIVPPYDQSKYAGTGAAVEYAVLHLKVSEIVVIGHSACGGIKGLLSFPYDGTYSTDFIEEWVKIGXLPAKAKVKTQHGDAPFAELCSHCEKKSVNVSLGNLLTYPFVRDXGLVNKTLSLKGGYYDFVKGSFELWXALQFGLASSVCV

SEQ ID NO: 20833 - protein, 275 aa, Glycine max
  unsure (1)..(275): unsure at all Xaa locations
YPESTKATHMGNLFFKEEMAGESYEEAITSLTKLLSEKAELGGVAAAXIKELTAELDAAGSKPFNPEERIRTGFIHFKNEKFEKNPDLYGELSKGQSPKFMVFACSDSRVCPSHILDFQPGEAFMVRNIANMVPPYDKTKYSGAGAAIEYAVXLNLKVENIVVIGHSCCGGIKGLMSIPDDGTTASEFIEQWVQICTPAKSKVKAGKSDLSFSEQCTNCEKEAVNVSLGNLLTYPFVRDGVVNKTLALKGAHYDFVNGNFELWDLNFKLLPTISV

SEQ ID NO: 20834 - protein, 290 aa, Glycine max
  unsure (1)..(290): unsure at all Xaa locations
GMHNASLIIETDPASVAHNTXVLVPLLQRNMAGGSYEEAIAALTKLLSEKADLGGVAAAKIKQLTAELDTATANGSTPFNPDERIRTGFAHFKNEKYQKNPELYGELAKGQSPKFMVFACSDSRVCPSHILDFNPGEAFVVRNIANMVPPYDKTKYSGTXGRPIEYAVLHLKVENIVVIGHSCCGGIKGLMSIPDDGTTASEFIEHWVQICTPAKSKVKTEANTLEFSEQCTSCEKEAVNVSLGNLLTYRFVRDAVVKKTLALKGAHYNFVKGTFELWDLDLKISNSVSV

SEQ ID NO: 20835 - protein, 164 aa, Glycine max
  unsure (1)..(164): unsure at all Xaa locations
XTRPPTRPAAAAATKPSIDSSSSPSLLTNNHPXXPSKMDAAVDRLKDGFAKFKTEFYDKKPELFEPLKAGQAPKYMVFSCADSRVCPSVTMGLEPGEAFTVRNIANMVPAYCKIKHAGVGSAIEYAVCALKVELIVVIGHSRCGGIKALLSLKDGAPDSFHFLX

SEQ ID NO: 20836 - protein, 266 aa, Medicago sativa
MANQSSELAIEQLKKLLREKEELNEVATTKIEELIVELQGCHPQPIDPAEQRIIDGFTYFKLNNFNKNPELYDRLAKGQSPKFMVFACSDSRVSPSIILNFQPGEAFKVRNIANMVPPFNQLRYSGVGATFEYAITALKVESILVIGHSRCGGISRLMSHPEDGSAPYDFIDDWVKIGLSSKVKVLKGHECNDFKEQCKFCEMDSVNNSLVNLKTYPYVDSEIRNENLALLGGYYDFVNGEFKLWKYKTHVTKSVTIPLNGFDMTK

SEQ ID NO: 20837 - protein, 328 aa, Pisum sativum
MSTSSINGFSLSSLSPAKTSTKRTTLRPFVSASLNTSSSSSSSTFPSLIQDKPVFASSSPIITPVLREEMGKGYDEAIEELQKLLREKTELKATAAEKVEQITAQLGTTSSSDGIPKSEASERIKTGFLHFKKEKYDKNPALYGELAKGQSPPFMVFACSDSRVCPSHVLDFQPGEAFVVRNVANLVPPYDQAKYAGTGAAIEYAVLHLKVSNIVVIGHSACGGIKGLLSFPFDGTYSTDFIEEWVKIGLPAKAKVKAQHGDAPFAELCTHCEKEAVNASLGNLLTYPFVREGLVNKTLALKGGYYDFVKGSFELWGLEFGLSSTFSV

SEQ ID NO: 20838 - protein, 221 aa, Pisum sativum
TTSSSDGIPKSEASERIKTGFLHFKKEKYDKNPALYGELAKGQSPPFMVFACSDSRVCPSHVLDFQPGEAFVVRNVANLVPPYDQAKYAGTGAAIEYAVLHLKVSNIVVIGHSACGGIKGLLSFPFDGTYSTDFIEEWVKIGLPAKAKVKAQHGDAPFAELCTHCEKEAVNASLGNLLTYPFVREGLVNKTLALKGGYYDFVKGSFELWGLEFGLSSTFSV

SEQ ID NO: 20839 - protein, 329 aa, Pisum sativum
MSTSSINGFSLSSLSPAKTSTKRTTLRPFVFASLNTSSSSSSSSTFPSLIQDKPVFASSSPIITPVLREEMGKGYDEAIEELQKLLREKTELKATAAEKVEQITAQLGTTSSSDGIPKSEASERIKTGFLHFKKEKYDKNPALYGELAKGQSPPFMVFACSDSRVCPSHVLDFQPGKAFVVRNVANLVPPYDQAKYAGTGAAIEYAVLHLKVSNIVVIGHSACGGIKGLLSFPFDGTYSTDFIEEWVKIGLPAKAKVKAQHGDAPFAELCTHCEKEAVNASLGNLLTYPFVREGLVNKTLALKGGYYDFVKGSFELWGLEFGLSSTFSV

SEQ ID NO: 20840 - protein, 264 aa, Nicotiana tabacum
NPILREEMAKESYEQAIAALEKLLSEKGELGPIAAARVDQITAELQSSDGSKPFDPVEHMKAGFIHFKTEKYEKNPALYGELSKGQSPKFMVFACSDSRVCPSHVLNFQPGEAFVVRNIANMIPAYDKTRYSGVGAAIEYAVLHLKVENIVVIGHSACGGIKGLMSLPADGSESTAFIEDWVKIGLPAKAKVQGEHVDKCFGDQCTACEKEAVNVSLGNLLTYPFVREGLVKKTLALKGGHYDFVNGGFELWGLEFGLSPSLSV

SEQ ID NO: 20841 - protein, 321 aa, Nicotiana tabacum
MSTASINSCLTISPAQASLKKPTRPVAFARLSNSSSSTSVPSLIRNEPVFAAPTPIINPILREEMAKESYEQAIAALEKLLSEKGELGPIAAARVDQITAELQSSDGSKPFDPVEHMKAGFIHFKTEKYEKNPALYGELSKGQSPKFMVFACSDSRVCPSHVLNFQPGEAFVVRNIANMVPAYDKTRYSGVGAAIEYAVLHLKVENIVVIGHSACGGIKGLMSLPADGSESTAFIEDWVKIGLPAKAKVQGEHVDKCFADQCTACEKEAVNVSLGNLLTYPFVREGLVKKTLALKGGHYDFVNGGFELWGLEFGLSPSLSV

SEQ ID NO: 20842 - protein, 321 aa, Nicotiana tabacum
MSTASINSCLTISPAQASLKKPTRPVAFARVSNSSSSPSVPSLIRNEPVFAAPTPIINPILREEMANESYEQAIAALEKLLSEKGELGPIAAARVDQITAELQSSDGSKPFDPVEHMKAGFIHFKTEKYEKNPALYGELSKGQSPKYMVFACSDSRVCPSHILNFQPGEAFVVRNIANMVPAYDKTRYSGVGAAIEYAVLHLKVENIVVIGHSACGGIKGLMSLPADGSESTAFIEDWVKIGLPAKAKVQGEHVDKCFADQCTACEKEAVNVSLGNLLTYPFGRDGLVKKTLALKGGHYDFVNGGFELWGLEFGLSPSLSV

SEQ ID NO: 20843 - protein, 227 aa, Coccomyxa sp. PA
MSAKDTADLSPLLEANRKWADECAAKDSTYFSKVAGSQAPEYLYIGCADSRVSPAQLFNMAPGEVFVQRNVGNLVSNKDLNCMSCLEYTVDHLKIKHILVCGHYNCGACKAGLVWHPKTAGVTNLWISDVREVRDKNAAKLHGLSADDAWDKMVELNVEAQVFNVCASPIVQAAWARGQPLSVHGIVYTPGTGLVKELIKPITGMEDAGALLRADLKQHCFFSESLA

SEQ ID NO: 20844 - protein, 279 aa, Flaveria bidentis
MFKNCIALCCAKRPSVAEDMEANGVPVYIDDVIDRLNKLLSEKNDLQIFAAEKIKQLTAELEVSDAGEFKAVERIRNGFARFKKEKYDTNPTLYGELAKGQSPKFLVFACSDSRVCPSHILNFQPGEAFVVRNIANMVPPYDTIKHSGAGAAIEYAVLHLKVENIVVIGHSCCGGIKGLMSIPDDGTTASDFIEQWVKIGLPAKSKVKADCSDLEYSDLCTKCEKEAVNVSLGNLLTYPFVREAALNKKLSLKGAHYDFVNGSFDLWNLNIGFSSSIIY

SEQ ID NO: 20845 - protein, 331 aa, Flaveria bidentis
MSAASAFAMNAPSFVNASSLKKASTSARSGVLSARFTCNSSSSSSSSSATPPSLIRNELVFAAPAPIITPNWTEDGNESYEEAIDALKKTLIEKGELEPVAATRIDQITAQAAAPDTKAPFDPVERIKSGFVKFKTEKFVTNPALYDELAKGQSPKFMVFACSDSRVCPSHVLDFQPGEAFVVRNVANMVPPFDKTKYSGVGAAVEYAVLHLKVQEIFVIGHSRCGGIKGLMTFPDEGPHSTDFIEDWVKVCLPAKSKVVAEHNGTHLDDQCVLCEKEAVNVSLGNLLTYPFVRDGLRNKTLALKGGHYDFVNGTFELWALDFGLSSPTSV

SEQ ID NO: 20846 - protein, 324 aa, Flaveria bidentis
AMNAPSFVNASSLKKASTSARSGVLSARFTCNSSSSSSSSSATPPSLIRNELVFAAPAPIITPNWTEDGNESYEEAIDALKKTLIEKGELEPVAATRIDQITAQAAAPDTKAPFDPVERIKSGFVKFKTEKFVTNPALYDELAKGQSPKFMVFACSDSRVCPSHVLDFQPGEAFVVRNVANMVPPFDKTKYSGVGAAVEYAVLHLKVQEIFVIGHSRCGGIKGLMTFPDEGPHSTDFIEDWVKVCLPAKSKVVAEHNGTHLDDQCVLCEKEAVNVSLGNLLTYPFVRDGLRNKTLALKGGHYDFVNGTFELWALDFGLSSPTSV

SEQ ID NO: 20847 - protein, 258 aa, Flaveria bidentis
MGSKSYDEAIAALKKLLSEKKELAPMAAAKIDQITAQLQTLDSTKPGFDPVERIKTGFAKFKTEKYLKNPALYGELSKGQSPKFMAFACSDSRVCPSHVLDFQPGEAFVVRNVANIVPPFDKLKYAGVGSAVEYAVLHLKVEQIVVIGHSKCGGIKGLMTFPDEGPTSTDFIEDWVKVGLPAKSKVKAEHGSASIDDQCVSCEKEAVNVSLANLLTYPFVRNGLINKTLAIKGAHYDFVNGTFELWALEFSLSPTTSA

SEQ ID NO: 20848 - protein, 190 aa, Flaveria linearis
NPTLYGELAKGQSPKFLVFACSDSRVCPSHILDFQPGEAFVVRNIANMVPPYDTIKHSGAGAAIEYAVLHLKVENIVVIGHSCCGGIKGLMSIPDDGTPASDFIEQWVKLGLPAKSKVKANCNNLEFADLCTKCEKEAVNVSLGNLLTYPFVRDALVNKKLSLKGAHYDFVNGAFDLWNLDFGISPSLLQ

SEQ ID NO: 20849 - protein, 330 aa, Flaveria linearis
MSTASAFAINAPSFVNASSLKKSSTSSARSGVLSARFTCNSSSSSSSATPPSLIRNEPVFAAPAPIITPNWTEDGNESYEEAIDALKKMLIEKGELEPVAAARIDQITAQAAAPDTKAPFDPVERIKSGFVKFKTEKFVTNPALYDELAKGQSPKFMVFACSDSRVCPSHVLDFQPGEAFVVRNVANMVPPFDKTKYSGVGAAVEYAVLHLKVQEIFVIGHSRCGGIKGLMTFPDEGPHSTDFIEDWVKVCLPAKSKVVAEHNGTHLDDQCVQCEKEAVNVSLGNLLTYPFVRDGLRNNTLALKGGHYDFVNGTFELWALDFGLSSPTSV

SEQ ID NO: 20850 - protein, 329 aa, Flaveria pringlei
MSTASAFAINAPSFVNASSLKKSSSSARSGVLSARFTCNSSSSSSSATPPSLIRNEPVFAAPAPIITPNWTEDGNESYEEAIDALKKMLIEKGELEPVAAARIDQITAQAAAPDTKAPFDPVERIKSGFVKFKTEKFVTNPVLYDELAKGQSPKFMVFACSDSRVCPSHVLDFQPGEAFVVRNVANMVPPFDKTKYSGVGAAVEYAVLHLKVQEIFVIGHSRCGGIKGLMTFPDEGPHSTDFIEDWVKVCLPAKSKVVAEHNGTHLDDQCVLCEKEAVNVSLGNLLTYPFVRDGLRNNTLALKGGHYDFVNGTFELWALDFGLSSPTSV

SEQ ID NO: 20851 - protein, 276 aa, Dictyostelium discoideum
MSSQNTPSATSPTIEPQNTNNNNNESQTTQVAAPANTCVPNCNSCTSPSVTNSIEIEQLIANNHAWSTRIKQEDPGFFAHLAQAQKPCFPWIGCSDSRVPAERLTGLESGQIFVHRNVANLVIHTDLNCLSVLQYAVEVLQVEHIIVCGHYGCGGVAASYDNPELGLINNWLLHIRDLTFKHAELIEMTKSNRKRLLSTLCELNVVEQCNNLGNTTIMQSAWKKGQNVKIHGWIYGIHDGYLRDLGVSASSRETLELNYKNAILKLKDNCSLGDSN

SEQ ID NO: 20852 - protein, 261 aa, Dictyostelium discoideum
MSAPNNNNNNNNTSPRQTTTSPTTTAAVTTKAPGPFHSHSTPQYLNCAPNCNTCTSPNVNSIEIDQLIANNHAWSTRIKQEDPGFFTHLAEAQKPRFLWIGCSDSRVPAERLTGLESGQLFVHRNVANLVIHTDLNCLSVVQYAVEVLQVEHIIICGHYGCDLTFKHATMISMLEGNRKRLLDTLCELNVVEQCFNLGNSTVMQSAWKRGQDVKIHGWIYGIQDGYLRDLGITASSRDTLESNYKNSIQKLKENISLSTSN

SEQ ID NO: 20853 - protein, 324 aa, Hordeum vulgare
MSLQIGRTERARSPVFVFAHKRQLLHGRCSTIDNANCSTCSMKINSTCTLTALPIAALPGPRTTSHYSTAAANWCYATVAPRARSSTIAASLGTPAPSSSASFRPKLIRTTPVQAAPVAPALMDAAVERLKTGFEKFKTEVYDKKPDFFEPLKAGQAPKYMVFACADSRVCPSVTLGLEPGEAFTIRNIANMVPAYCKNKYAGVGSAIEYAVCALKVEVIVVIGHSRCGGIKALLSLKDGADDSFHFVEDWVRIGFPAKKKVQTECASMPFDDQCTVLEKEAVNVSLQNLLTYPFVKEGVTNGTLKLVGGHYDFVSGKFETWEQ

SEQ ID NO: 20854 - protein, 358 aa, Oryza sativa
  unsure (1)..(358): unsure at all Xaa locations
FIIFLKKKIAASTSVSPSHRRRARCLALPRKIPPGRCRAKLFPPTNARDPAPTTTTRASTGTSSHGSXSAPXXASPCLNLAPPTADGPGRSRSAVSLRVGGSSRRDSTMASRDHSGLTRQLLDFQHGTVDEIDGEHDPFMELKARFMDFKHRNRVDNISNYQNLAQQQTPKFMVVACADSRVCPSSVLGFQPGEAFTVRNIANLVPPYQHGASETSAALEFAVNTLEVENVLVVGHSRCGGIQALMSMKSKQDDSQSRSFIRDWVSIAKSARLSTEAAAGNLNFELQCKHCEKESINSSLLNLLTYPWIEKRVNEGTLSLHGGYYNFIDCTFEKWKLVYRQGLEGGSKYAIKNRTTWS

SEQ ID NO: 20855 - protein, 302 aa, Oryza sativa
  unsure (1)..(302): unsure at all Xaa locations
ACCVLWSPGPCDQQLGAWLLPPPPHAQLQLRSLTRHHLRRCLLSHVHLKTQRSSTCGAPPDTTTASLPPASSRRLVVQSIGGTFRVPQWPQEIXSGLTRQLLDFQHGTVDEIDGEHDPFMELKARFMDFKHRNCVDNISNYQNLAQQQTPKFMVVACADSRVCPSSVLGFQPGEAFTVRNIANLVPPYQHGASETSAALEFAVNTLEVENVLVVGHSRCGGIQALMSMKSKQDDSQSRSFIRDWVSIAKSARLSTEAAAGNLNFELQCKHCEKESINSSLLNLLTYPXIEKRVNEGTLSLHX

SEQ ID NO: 20856 - protein, 273 aa, Oryza sativa
MSTAAAAAAAQSWCFATVTPRSRATVVASLASPSPSSSSSSSSNSSNLPAPFRPRLIRNTPVFAAPVAPAAMDAAVDRLKDGFAKFKTEFYDKKPELFEPLKAGQAPKYMVFSCADSRVCPSVTMGLEPGEAFTVRNIANMVPAYCKIKHAGVGSAIEYAVCALKVELIVVIGHSRCGGIKALLSLKDGAPDSFHFVEDWVRTGFPAKKKVQTEHASLPFDDQCAILEKEAVNQSLENLKTYPFVKEGIANGTLKLVGGHYDFVSGNLDLWEP

SEQ ID NO: 20857 - protein, 273 aa, Oryza sativa; identical to SEQ ID NO: 20856

SEQ ID NO: 20858 - protein, 272 aa, Oryza sativa
MSTAAAAAAAQSWCFATVTPRSRATVVASLASPSPSSSSSSSNSSNLPAPFRPRLIRNTPVFAAPVAPAAMDAAVDRLKDGFAKFKTEFYDKKPELFEPLKAGQAPKYMVFSCADSRVCPSVTMGLEPGEAFTVRNIANMVPAYCKIKHAGVGSAIEYAVCALKVELIVVIGHSRCGGIKALLSLKDGAPDSFHFVEDWVRTGFPAKKKVQTEHASLPFDDQCAILEKEAVNQSLENLKTYPFVKEGIANGTLKLVGGHYDFVSGNLDLWEP

SEQ ID NO: 20859 - protein, 273 aa, Oryza sativa; identical to SEQ ID NO: 20856

SEQ ID NO: 20860 - protein, 248 aa, Oryza sativa
  unsure (1)..(248): unsure at all Xaa locations
MSTAAAAAAAQSWCFATVTPRSRATVVASLASPSPPSPPSSSNSSNLPAPFRPRLIRNTPVFAAPVAPAAMDAAVDRLKDGFAKFKTEFYDKKPELFEPLKAGQAPKYMVFSCADSRVCPSVTMGLEPGEAFTVRNIANMVPAYCKIKHAGVGSAIEYAVCALKVELIVVIGHSRCGGIKALLSLKDGAPDSFHFVEDWVRTGFPAKKKVQTEHASLAFDDQCAILEKEAVNQSLENLKTYPFVRRGX

SEQ ID NO: 20861 - protein, 252 aa, Oryza sativa
  unsure (1)..(252): unsure at all Xaa locations
AGADRFCSYSDSRSRGRIEDGCLLLLLPGLQTREGEPDAVDQRVTHPAQXPRPTTPYHPPPPPFITYTDKGMNAVERFKTGFENFRNTIYDKRPELFERLKTGQSPKYMVFSCADSRVCPTLTFGLQPGEAFTVRNIASMVPAYDKVRQCSIGSAIEYAVVVLKVECIIVIGHSCCGGIKELLSLKEDRPNTFHFVDDWVKIGLAAKKKVERENMLLPFDDQCTVLEKSLVNIASLSSLWSPLMARGQGXGX

SEQ ID NO: 20862 - protein, 169 aa, Triticum aestivum
  unsure (1)..(169): unsure at all Xaa locations
XHPILVFACSDSRVCPSVTLGLHPGEAFAVRNIASMVPPYDKTKYAGVGSAIEYAVCALKVEVIVVIGHSRCGGIKALLSLEDGAPDKFHFVEEWVRIGGPAKTKVKTDHASVPFEDQCSILEKEAVNVSLENLKTYPFVKEGVEKGTLKLVGGHYDFVNGKFETWEPX

SEQ ID NO: 20863 - protein, 233 aa, Triticum aestivum
  unsure (1)..(233): unsure at all Xaa locations
XESHPTSSPTLQQASSFSLFLTSSPTLPARXMDPAVERLKTGFEKFKTEVYDQKPDLFEPLKAHQSPKYMVFACADSRVCPSVTLGLEPGEAFTVRNIAAMVPSYCKNKHTGVGSAIEYAVCALKVEFIVVIGHSRCGGIKALLNLKDGADDTFHFVEDWVRIGYPARKKVKDECSEMPFEEQCGVLEKEAVNVSLQNLSTYPFVKEAVANGTLKLVGGHYDFVSGKFDTWAL

SEQ ID NO: 20864 - protein, 227 aa, Triticum aestivum
  unsure (1)..(227): unsure at all Xaa locations
XPPPPSASSFSLFLXXSSPTLPARXMDPAVERLKTGFEKFKTEVYDQKPDLFEPLKAHQSPKYMVFACADSRVCPSVTLGLEPGEAFTVRNIAAMVPCYCKNKHTGVGSAIEYAVCALKVEVIVVIGHSRCGGIKALLNLKDGADDTFHFVEDWVRIGFPARKKVKDECSEMSPEEQCGVLEKEAVNVSLQNLNTYPFVKEAVANGTLKLVGGHYDFVSGKFDTWAL

SEQ ID NO: 20865 - protein, 240 aa, Triticum aestivum
  unsure (1)..(240): unsure at all Xaa locations
AGRVREKPTRHPPPPSSKQVPSLSSTPPPLPPLRPCSXMDPAVERLKTGFEKFKTEVYDQKPDLFEPLKAHQSPKYMVFACADSRVCPSVTLGLEPGEAFTVRNIAAMVPSYCKNKHTGVGSAIEYAVCALKVEFIVVIGHSRCGGIKALLNLKDGADDTFHFVEDWVRIGYPARKKVKDECSEMPFEEQCGVLEKEAVNVSLQNLSTYPFVKEGVANGTLKLVGGHYDFVSGKFDTWTL

SEQ ID NO: 20866 - protein, 267 aa, Triticum aestivum
  unsure (1)..(267): unsure at all Xaa locations
XPAGPGRMSTAXAANWCYATVVAPRARSSTIVASLGTPAPSNSSSFRPKLIRNTPVQAAPVAPALMDAAVERLKTGFEKFKTEVYDKKPDFFEPLKAGQAPKYMVFACADSRVCPSVTLGLEPGEAFTIRNIANMVPSYCKNKYAGVGSAIEYAVCALKVEVIVVIGHSRCGGIKALLSLKDGADDSFHFVEDWVRIGFPAKKKVQTECASMPFDDQCTVLEKEAVNVSLQNLLTYPFVKEGVSNGTLKLVGGHYDFVSGKFETWEQ

SEQ ID NO: 20867 - protein, 339 aa, Triticum aestivum
  unsure (1)..(339): unsure at all Xaa locations
RFKRVFILYIGYNTGVQVHIQQACIAPQLHTIIHGKKIKFHQRSSSXVVAHSSDXLLTPNVSLTWGRMPVAAWPGRPCRSTMSTAAANWCYATVAPRARSSTIVASLGTPAPSNSSSFRPKLIRNTPVQAAPVAPALMDAAVERLKTGFEKFKTEVYDKKPDFFEPLKAGQAPKYMVFACADSRVCPSVTLGLEPGEAFTIRNIANMVPSYCKNKYAGVGSAIEYAVCALKVEVIVVIGHSRCGGIKALLSLKDGADDSFHFVEDWVRIGFPAKKKVQTECASMPFDDQCTVLEKEAVNVSLQNLLTYPFVKEGVSNGTLKLVGGHYDFVSGKFETWEQ

SEQ ID NO: 20868 - protein, 265 aa, Triticum aestivum
  unsure (1)..(265): unsure at all Xaa locations
XPAGPGQMSTAAANWCYATVAPRARSSTIVASLGTPAPSNSSSFRPKLIRNTPVQAAPVAPALMDAAVERLKTGFEKFKTEVYDKKPDFFEPLKAGQAPKYMVFACADSRVCPSVTLGLEPGEAFTIRNIANMVPSYCKNKYAGVGSAIEYAVCALKVEVIVVIGHSRCGGIKALLSLKDGADDSFHFVEDWVRIGFPAKKKVQTECASMPFDDQCTVLEKEAVNVSLQNLLTYPFVKEGVSNGTLKLVGGHYDFVSGKFETWEQ

SEQ ID NO: 20869 - protein, 229 aa, Triticum aestivum
  unsure (1)..(229): unsure at all Xaa locations
XTSSPPSTSFVSLIHTSSSSSASSLLEMALERLKTGFEKFKTEVYDQRADLFEPLKAHQSPKYMVSACADSRVCPSVTLGLEPGXAFTVRNIARXMVPCYCKERTLGVGSAIEYAVCALKVEFIVVIGHSRCGGIKALLNLKXDGADDTFHFVEDWVRIGYPARKKVKDECSEMPFEEQCGVLEKEAVNVSLQNLSTYPFVKEGVANGTLKLVGGHYDFVSGKFDTWTL

SEQ ID NO: 20870 - protein, 227 aa, Triticum aestivum
  unsure (1)..(227): unsure at all Xaa locations
CRXFGTRILHKXPSLSSSSSSTLADRKMERLRTGFDKFKTEVYDKKPDLFEPLKDNQEPTYMLFACADSRVCPSVTLGLEPGEAFTVRNIGRXMVPCYCKERTPGVGSAIEYAVCALKVKVIVVIGHSRCGGIKALLSLKDGEDDSFHFVEDWVRIGFSAKKKVKDECCDLPFEDQCAVLXEKEAVNVSLQNLSTYPFVKEGVANGTLKLIGGHYDFVSGKFDTWEL

SEQ ID NO: 20871 - protein, 277 aa, Triticum aestivum
  unsure (1)..(277): unsure at all Xaa locations
PTRPGGRGHMENXARAAARWCYATVVVAPRARSSTIVASLGRPPXAPSNSSSFRPKLIRNTPVQAAPVAPALMDAAVERLKTGFEKFKTEVYDKKPDFFEPLKAGQAPKYMVFXACADSRXVCPLVTLGLEPGEAFTVRNIAAMVPCYCKNKHTGVGSAIEYAVCALKVEVIVVIGHSRCGGIKALLNLKDGADDTFHFVEDWVRIGYPARKKVKDECSEMPPEEQCXAVLDKEAVNVSLQNLSTYPFVKEAVANGTLKLVGGHYDFVSGKFDTWAL

SEQ ID NO: 20872 - protein, 153 aa, Triticum aestivum
  unsure (1)..(153): unsure at all Xaa locations
RTRGXRREPAEVLCSRDGGYDPFSQLKARFTDFKQRNYVENFTNYQKLAEQQTPEFMVVACADSRVCPTSILGLQPGDAFTVRNVANLVPPYEHGASETTAALEFAVNSLQVPNVLVVGHSRCGGIQALMSMKSKKDDRSSRTFIRDWVSLGX

SEQ ID NO: 20873 - protein, 223 aa, Triticum aestivum
  unsure (1)..(223): unsure at all Xaa locations
XIRHELFAAPLSIQFTACPFSFSFFLVKHLVIRSSPLLPLQMDAAVERLKTGFEKFKTEVYDKKPDFFEPLKAGQAPKYMVFACADSRVCPSVTLGLEPGEAFTIRNIANMVPSYCKNKYAGXVGSAIEYAVCALKXVEVIVVIGHSRCGGIKALLSLKDGADDSFHFVEDWVRIGFPAKKKVQTECAXLTYPFVKEGVSNGTLKLVGGHYDFVSGKFETWEQ

SEQ ID NO: 20874 - protein, 257 aa, Zea mays
  unsure (1)..(257): unsure at all Xaa locations
RLGSSRPAGRAKQSAETRKSERIPPVLXXNPPEPALSSSTRLXTVMXXVERLKTGFEQFKADVYDKKPELFEPLKAHQSPKYMVFACSDSRVCPSVTLGLHPGEAFAVRNIASMVPPYDKTKYAGVGSAIEYAVCALKVEVIVVIGHSRCGGIKALLSLEDGAPDKFHFVEEWVRVGAPAKSKVLADHASAPFEDQCSILEKEAVNVSLENLKSYPFVKEGLEKGTLKLVGGHYDFVNGKFETWEPPGGALXPRGGG

SEQ ID NO: 20875 - protein, 255 aa, Zea mays
  unsure (1)..(255): unsure at all Xaa locations
HSFGRLGSSRPATTTGKDMAVERLKTGFEQFKADVYDKKPELFEPLKAHQSPKYMVFACSDSRVCPSVTLGLHPGEAFAVRNIASMVPPYDKTKYAGVGSAIEYAVCALKVEVIVVIGHSRCGGIKALLSLEDGAPDKFHFVEEWVRVGAPAKSKVLADHASAPFEDQCSILEKEAVNVSLENLKSYPFVKEGLEKGTLKLVGGHYDFVNGKFETWEPXVAIYEKFVQIRPTGLISCVECLIICRYIYTYTGIYR

SEQ ID NO: 20876 - protein, 342 aa, Zea mays
  unsure (1)..(342): unsure at all Xaa locations
DMPRLKCVNLARTCTSPVPARKRDGGQLRSQTREXDRERKGGHPXPAGGDKRGGERGQRRGGGEEEEDEQLPLPSEKKGGASEGEAAHRYPHLVTPSEPEALXQPPPPPSKASSKSMDPTVERLKSGFQKFKTEVYDKKPELFEPLKSGQSPRYMVFACSDSRVCPSVTPGLQPGEAFTVRNIASMVPPYDKIKYAGTGSAIEYAVCALKVQVIVVIGHSCCGGIRALLSLQDGAPDTFHFVEDWVKIGFIAKMKVKKEHASVPFDDQCSILEKEAVNVSLENLKTYPFVKEGLANGTLKLIGGHYDFVSGEFLTWKPNVNVISNIIFYHFSFLKKKKKKRX

SEQ ID NO: 20877 - protein, 262 aa, Zea mays
  unsure (1)..(262): unsure at all Xaa locations
MYTLPVRPTTSSIVXPACHPRAVLLLRLRPPXGSSGTPXRLRRPXATVVGMDPTVERLKSGFQKFKTEVYDKKPELFEPLKSGQSPRYMVFACSDSRVCPSVTLGLQPGEAFTVRNIASMVPPYDKIKYAGTGSAIEYAVCALKVQVIVVIGHSCCGGIRALLSLKDGAPDNFHFVEDWVRIGSPAKNKVKKEHASVPFDDQCSILEKEGVNVSLQNLKSYPFVNEGLAGGTLKLVGAHYDFVKGQFVTWGAXPQDAIEALX

SEQ ID NO: 20878 - protein, 653 aa, Zea mays
MYTLPVRATTSSIVPACHPRAVLLLRLRPPGSGSSGTPRLRRPATVVGMDPTVERLKSGFQKFKTEVYDKKPELFEPLKSGQSPRYMVFACSDSRVCPSVTLGLQPGEAFTVRNIASMVPPYDKIKYAGTGSAIEYAVCALKVQVIVVIGHSCCGGIRALLSLKDGAPDNFTFVEDWVRIGSPAKNKVKKEHASVPFDDQCSILEKEAVNVSLQNLKSYPFVKEGLAGGTLKLVGAHYSFVKGQFVTWEPPQDAIERLTSGFQQFKVNVYDKKPELFGPLKSGQAPKYMVFACSDSRVCPSVTLGLQPAKAFTVRNIAAMVPGYDKTKYTGIGSAIEYAVCALKVEVLVVIGHSCCGGIRALLSLKDGAPDNFHFVEDWVRIGSPAKNKVKKEHASVPFDDQCSILEKEAVNVSLQNLKSYPLVKEGLAGGTSSGWPHYDFVKGQFVTWEPPQDAIERLTSGFQQFKVNVYDKKPELFGPLKSGQAPKYMVFACSDSRVSPSVTLGLQPGEAFTVRNIAAMVPGYDKTKYTGIGSAIEYAVCALKVEVLVVIGHSCCGGIRALLSLQDGAPDTFHFVEDWVKIAFIAKMKVKKEHASVPFDDQWSILEKEAVNVSLENLKTYPFVKEGLANGTLKLIGAHYDFVSGEFLTWKK

SEQ ID NO: 20879 - protein, 653 aa, Zea mays; identical to SEQ ID NO: 20878

SEQ ID NO: 20880 - protein, 205 aa, Zea mays
  unsure (1)..(205): unsure at all Xaa locations
XGRDRENFSNYQNLAEQQTPKFMVIACADSRVCPTAVLGFQPGEAFTVRNVANLVPPYEHEGSETSAALEFAINTLEVENVLVVGHSRCGGIQALMSMKDDSTSGSFIKNWVSIGKSARLSTRAAAGNLSFDMQCKHCEKESINSSLLNLLTYPWIEKRVNEGTLNLHGGYYNFVDCTFEKWTLLYREGLEGGSKYAIKNRSTWC

SEQ ID NO: 20881 - protein, 318 aa, Zea mays
MIGDSGTRGVALRMGGLEAGRVLSVTMASRDHTGLTRQLLDFQHDTIDEVGAEHRKQIKTGPFMDLKARFMDFKQRNYVENFSNFQNLAEQQTPKFMVIACADSRVCPTAVLGFQPGEAFTVRNVANLVPPYEHEGSETSAALEFAINTLEVENVLVVGHSRCGGIQALMSMKDDSTSGSFIKNWVSIGKSARLSTRAAAGNLSFDMQCKHCEKESINSSLLNLLTYPWIEKRVNEGTLNLHGGYYNFVDCTFEKWTLLYREGLEGGSKYAIKNRSTWSWPMKALFTWVNFTLSPAVQHGFALPLRCSFPLHLAPLWY

SEQ ID NO: 20882 - protein, 301 aa, Zea mays
MASGVLHRSASRCPAAPTPDSGRGHGAVMIGDSGTRGVALRLGGSSRRELLSVTMASRDHTGLTRQLLDFQHDTIDEVGAEHGPFMDLKARFMDFKQRNYVENFSNYQNLAEQQTPKFMVIACADSRVCPTAVLGFQPGEAFTVRNVANLVPPYEHEGSETSAALEFAINTLEVENVLVVGHSRCGGIQALMSMKDDSTSGSFIKNWVSIGKSARLSTRAAAGNLSFDMQCKHCEKESINSSLLNLLTYPWIEKRVNEGTLNLHGGYYNFVDCTFEKWTLLYREGLEGGSKYAIKNRSTWS

SEQ ID NO: 20883 - protein, 269 aa, Zea mays
  unsure (1)..(269): unsure at all Xaa locations
DSLGRLGSSRPAGTERNNPQRLGSRKESLLFFVNPPEPALSSSTRLRPXXKDMAVERLKTGFEQFKADVYDKKPELFEPLKAHQSPKYMVFACSDSRVCPSVTLGLHPGEXAFAVRNIASMVPPYDKTKYAGVGSAIEYAVCALKVEVIVVIGHSRCGGIKALLSLEDGAPDKFHFVEEWVRVGAPAKSKVLADHASVPFEDQCSILEKEAVNVSLENLKSYPFVKEGLEKGTLKLVGGHYDFVNGKFETWEPXKEYMCSLTSKKKKKK

SEQ ID NO: 20884 - protein, 257 aa, Zea mays
  unsure (1)..(257): unsure at all Xaa locations
XRGRPGIICPMASRDHTGLTRQPXGFSTXYXIDEVGAEHAFMDLKARFMDFKQRNYVENFSNYQNLAEQQTPKFMVIACADSRVCPTAVLGFQPGEAFTVRNVANLVPPYEHEGSETSAALEFAINTLEVENVLVVGHSRCGGIQALMSMKDDSTSGSFIKNWVSIGKSARLSTRAAAGNLSFDMQCKHCEKESINSSLLNLLTYPWIEKRVNEGTLNLHGGYYNFIDCTFEKWTLLYREGLEGGSKYAIKNRSTWS

SEQ ID NO: 20885 - protein, 452 aa, Zea mays
  unsure (1)..(452): unsure at all Xaa locations
PRGRPGRESDSPIXVHIARPPHHIQHXSPASPPPRRPPPPAPAAPGSGMDPTVERLKSGFQKFKTEVYDKKPELFEPLKSGQSPRYMVFACSDSRVCPSVTLGLQPGEAFTVRNIASMVPPYDKIKYAGTGSAIEYAVCALKVQVIVVIGHSCCGGIRALLSLKDGAPDNFHFVEDWVRIGSPAKNKVKKEHASVPFDDQCSILEKEAVNVSLQNLKSYPFVKEGLAGGTLKLVGAHYDFVKGQFVTWEPPQDAIERLTSGFQQFKVNVYDKKPELFGPLKSGQAPKYMVFACSDSRVCPSVTLGLQPGEXFTVRNIAAMVPGYDKTKYTGIGSAIEYAVCALKVEVLVVIGHSCCGGIRALLSLQDGAPDTFHFVEDWVKIGFIAKMKVKKEHASVPFDDQCSILEKEAVNVSLENLKTYPFVKEGLANGTLKLIGGHYDFVSGEFLTWKK

SEQ ID NO: 20886 - protein, 541 aa, Zea mays
  unsure (1)..(541): unsure at all Xaa locations
MYTLPVRATTSSIVASLATPAPSSSSGSGRPRLRLIRNAPVFAAPATVVXHGPHRRALEERVPEVQDRGLXQEAGAVRASQVRPEPQVHGVRLLRLPRVPVGDTGTAARRGIHRPQHRFRSSGTPPSSPPPPPSXXGMDPTVERLKSGFQKFKTEVYDKKPELFEPLKSGQSPRYMVFACSDSRVCPSVTLGLQPGEAFTVRNIASMVPPYDKIKYAGTGSAIEYAVCALKVQVIVVIGHSCCGGIRALLSLKDGAPDNFHFVEDWVRIGSPAKNKVKKEHASVPFDDQCSILEKEAVNVSLQNLKSYPFVKEGLAGGTLKLVGAHYDFVKGQFVTWEPPQDAIERLTSGFQQFKVNVYDKKPELFGPLKSGQAPKYMVFACSDSRVCPSVTLGLQPGEAFTVRNIAAMVPGYDKTKYTGIGSAIEYAVCALKVEVLVVIGHSCCGGIRALLSLQDGAPDTFHFVEDWVKIGFIAKMKVKKEHASVPFDDQCSILEKEAVNVSLENLKTYPFVKEGLANGTLKLIGGHYDFVSGEFLTWKK

SEQ ID NO: 20887 - protein, 549 aa, Zea mays
  unsure (1)..(549): unsure at all Xaa locations
MYTLPVRPTTSSIVASLATPAPSSSSGSGRPRLRLRLIRNAPVFAAPATVXCKRDGGQLRSQTREIERXRKGGHPPAAGDKRGGERGQRRGGEEEENEQLPLPSEKKGGASEGEAVHRYPHLVTPSEPEALXQPPPPPSKASSKGMDPTVERLKSGFQKFKTEVYDKKPELFEPLKSGQSPRYMVFACSDSRVCPSVTLGLQPGEAFTVRNIASMVPPYDKIKYAGTGSAIEYAVCALKVQVIVVIGHSCCGGIRALLSLKDGAPDNFHFVEDWVRIGSPAKNKVKKEHASVPFDDQCSILEKEAVNVSLQNLKSYPFVKEGLAGGTLKLVGAHYDFVKGQFVTWEPPQDAIERLTSGFQQFKVNVYDKKPELFGPLKSGQAPKYMVFACSDSRVCPSVTLGLQPGEAFTVRNIAAMVPGYDKTKYTGIGSAIEYAVCALKVEVLVVIGHSCCGGIRALLSLQDGAPDTFHFVEDWVKIGFIAKMKVKKEHASVPFDDQCSILEKEAVNVSLENLKTYPFVKEGLANGTLKLIGAHYDFVSGEFLTWKK

SEQ ID NO: 20888 - protein, 545 aa, Zea mays
MYTLPVRATTSSIVASLATPAPSSSSGSGRPRLRLIRNAPVFAAPATVCKRDGGQLRSQTREIERERKGGHPPAGGHKRGGERGQRRGGEEEEDEQLPLPSEKKGGASEGEAVHRYPHLVTPSEPEALQPPPPPSKASSKGMDPTVERLKSGFQKFKTEVYDKKPELFEPLKSGQSPRYMVFACSDSRVCPSVTLGLQPGEAFTVRNIASMVPPYDKIKYAGTGSAIEYAVCALKVQVIVVIGHSCCGGIRALLSLKDGAPDNFTFVEDWVRIGSPAKNKVKKEHASVPFDDQCSILEKEAVNVSLQNLKSYPFVKEGLAGGTLKLVGAHSHFVKGQFVTWEPPQDAIERLTSGFQQFKVNVYDKKPELFGPLKSGQAPKYMVFACSDSRVCPSVTLGLQPGEAFTVRNIAAMVPGYDKTKYTGIGSAIEYAVCALKVEVLVVIGHSCCGGIRALLSLQDGAAYTFHFVEDWVKIGFIAKMKVKKEHASVPFDDQCSILEKEAVNVSLENLKTYPFVKEGLANGTLKLIGAHYDFVSGEFLTWKK

SEQ ID NO: 20889 - protein, 263 aa, Zea mays
  unsure (1)..(263): unsure at all Xaa locations
ARDHYLEHPNRKTILHTLQSPSIPPFXLFSSVAISSVVACSSPTFSLRCTVLAGEGPXDDPVERLKDGFHKFKTEVYDKKPELFEPLKAGQAPKYVVFACSDSRVCPSVTLGLQPGEAFTVRNIAAMVPAYDKTKYTGIGSAIEYAVCALKVEVLVVIGHSCCGGIRALLSLQDGAPDNFHFVENWVKIGFPAKIKVKKDHASVPFDDQCSILEKEAVNLSLENLKTYPFVKEGLANGTLKLVGGHYNFVSGEFLTWDNKQPS

SEQ ID NO: 20890 - protein, 385 aa, Zea mays
MDLKPRGELITSSPAKSSLTFPEKKAPHRLDLDSSAPIAVVSSSASLSVRSAPPLKNPSGHCRTELPFLKCPRPGRLDAQLRARMASGVLHRSASLCPAGSSADSGRGHGAVMIGDSRTRVAALRLGGSSRRELLSVTMASRDHTGLTRQLLDFQHDTIDEVGAGHDPFMDLKARFMDFKQRNYVEKFSNYQTLAEQQTPKFMVVACADSRVCPTAVLGFQPGEAFTVRNVANLVPPYEHGGTETSAALEFAVNTLQVENVLVIGHSRCGGIQALMSMKDDSTSGSFIKNWVSIGKSARLSTKAAAGNMSFDIQCKHCEKESINSSLLNLLTYPWIEKRVNEGTLNLHGGYYNFVDCTFEKWTLLYREGLEGGSKYAIKNRSTWC

SEQ ID NO: 20891 - protein, 257 aa, Zea mays
  unsure (1)..(257): unsure at all Xaa locations
KKRGEGEQLPLPASHVVIKRSGAGVTEGVQFIHLXSLPENQKATHLPRQGPWXDPVERLKDGFHKFKTEVYDKKPELFEPLKAGQAPKYMVFACSDSRVCPSVTLGLQPGEAFTVRNIAAMVPAYDKTKYTGIGSAIEYAVCALKVEVLVVIGHSCCGGIRALLSLQDGAPDTFHFVENWVKIGFPAKIKVKKDHASVPFDDQCSILEKEAVNLSLENLKTYPFVKDGLANGTLKLVGGHYNFVSGEFLTWDNKQPS

SEQ ID NO: 20892 - protein, 259 aa, Zea mays
  unsure (1)..(259): unsure at all Xaa locations
MYTLPVRATTSSIVXPACHPRAVLLLRLRPPXGSGSSGTPXRLRRPXATVVGMDPTVERLKSGFQKFKTEVYDKKPELFEPLKSGQSPRYMVFACSDSRVCPSVTLGLQPGEAFTVRNIAAMVPAYDKTKYTGIGSAIEYAVCALKVEVLVVIGHSCCGGIRALLSLQDGAPDTFHFVENWVKIGFPAKIKVKKHHASVPFDDQCSILEKEAVNLSLENLKTYPFVKDGLANGTLKLVGGHYNFVSGEFLTWDNKQPSI

SEQ ID NO: 20893 - protein, 301 aa, Zea mays
MASGVLHRSASRCPAAPTPDSGRGHGAVMIGDSGTRGVALRLGGSSRRELLSVTMASRDHTGLTRQLLDFQHDTIDEVGAGHGPFMDLKARFMDFKQRNYVENFSNYQTLAEQQTPKFMVVACADSRVCPTAVLGFQPGEAFTVRNVANLVPPYEHGGTETSAALEFAVNTLQVENVLVIGHSRCGGIQALMSMKDDSTSGSFIKNWVSIGKSARLSTKAAAGNMSFDIQCKHCEKESINSSLLNLLTYPWIEKRVNEGTLNLHGGYYNFVDCTFEKWTLLYREGLEGGSKYAIKNRSTWC

SEQ ID NO: 20894 - protein, 217 aa, Zea mays
PAGVQFIHLVPPDDPVERLKDGFHKFKTEVYDKKPELFEPLKAGQAPKYMVFACSDSRVCPSVTLGLQPGEAFTVRNIAAMVPAYDKTKYTGIGSAIEYAVCALKVEVLVVIGHSCCGGIRALLSLQDGAPDTFHFVENWVKIGFPAKIKVKKDHASVPFDDQCSILEKEAVNLSLENLKTYPFVKDGLANGTLKLVGGHYNFVSGEFLTWDNKQPS

SEQ ID NO: 20895 - protein, 219 aa, Zea mays
  unsure (1)..(219): unsure at all Xaa locations
XHLVRPSLRTRRPPDDPVERLKDGFHKFKTEVYDKKPELFEPLKAGQAPKYVVFACSDSRVCPSVTLGLQPGEAFTVRNIAAMVPAYDKTKYTGIGSAIEYAVCALKVEVLVVIGHSCCGGIRALLSLQDGAPDTFHFVENWVKIGFPAKIKVKKEHASVPFDDQCSILEKEAVNVSLENLKTYPFVKDGLANGTLKLVGGHYNFVSGEFLTWDNKQPS

SEQ ID NO: 20896 - protein, 455 aa, Zea mays
  unsure (1)..(455): unsure at all Xaa locations
WVPRGRPGSGLARSXVHIARPCHHIQHRRQPRHPRAVXPPPAPAAPGSGGMDPTVERLKSGFQKFKTEVYDKKPELFEPLKSGQSPRYMVFACSDSRVCPSVTLGLQPGEAFTVRNIASMVPPYDKIKYAGTGSAIEYAVCALKVQVIVVIGHSCCGGIRALLSLKDGAPDNFHFVEDWVRIGXSPAKNKVKKEHASVPFDDQCSILEKEAVNVSLQNLKSYPFVKEGLAGGTLKLVGAHYDFVKGQFVTWEPPQDAIERLTSGFQQFKVNVYDKKPELFGPLKSGQAPKYMVFACSDSRVCPSVTLGLQPGEAFTVRNIAAMVPGYDKTKYTGIGSAIEYAVCALKVEVLVVIGHSCCGGIRALLSLQDGAPDTFHFVEDWVKIGFIAKMKVKKEHASVPFDDQCSILEKEAVNVSLENLKTYPFVKEGLANGTLKLIGAHYDFVSGEFLTWKK

SEQ ID NO: 20897 - protein, 643 aa, Zea mays
  unsure (1)..(643): unsure at all Xaa locations
MYTLPVRPTTSSIVASLATPAPSSSSGSGRPRLRLRLIRNAPVFAAPATVVKRDGGQLRSQTREIERXRKGGHPPAAGDKRGGERGQRRGGEEEENEQLPLPSEKKGGASEGEAVHRYPHLVTPSEPEALXQPPPPPSKASSKGMDPTVERLKSGFQKFKTEVYDKKPELFEPLKSGQSPRYMXVFACSDSRVCPSVTLGLQPGEAFTVRNIASMVPPYDKIKYAGTGSAIEYAVCALKVQVIVVIGHSCCGGIRALLSLKDGAPDNFTFVEDWVRIGSPAKNKVKKEHASVPFDDQCSILEKEXXXXXXXNLKSYPFVKEGLAGGTLKLVGAHSHFVKGQFVTWEPPQDAIERLTSGFQQFKVNVYDKKPELFGPLKSGQXXKYMVFACSDSRVCPSVTLGLQPGEAFTVRNIAAMVPGYDKTKYTGIGSAIEYAVCALKVEVLVVIGHSCCGGIRALLSLQDGAPDTFHFVEDWVKIGFIAKMKVKKEHASVPFDDQCSILEKEAVNVSLENLKTYPFVKEGLANGTLKLIGAHYDFVSGEFLTWXXXXXRATAILPARRLLHHHKYICYTILLRTYRYAPEQCECVEYYISVFCIYIYIPDQSPNVNVISNIIFYHFSFLTLSFLCTISHIIIHHIRYST

SEQ ID NO: 20898 - protein, 455 aa, Zea mays
  unsure (1)..(455): unsure at all Xaa locations
LGREAALARSXVHIARPPHHIQHXSPASPPPRRPPPPAPAAPGSGMDPTVERLKSGFQKFKTEVYDKKPELFEPLKSGQSPRYMVFACSDSRVCPSVTLGLQPGEAFTVRNIASMVPPYDKIKYAGTGSAIEYAVCALKVQVIVVIGHSCCGGXIRALLSLKDGAPDNFPXFVEDWVRIGSPAKNKVKKEHASVPFDDQCSILEKEAVNVSLQNLKSYPFVKEGXLAGGTLXKLVGAHYDFVKGQFVTWXEPPQDAIERXLTSGFQQFKVNVYDRSPELFGPLKSGQAPKYMVFACSDSRVCPSVTLGLQPGEAFTVRNIAAMVPGYDKTKYTGIGSAIEYAVCALKVEVLVVIGHSCCGGIRALLSLQDGAPDTFHFVEDWVKIGFIAKMKVKKEHASVPFDDQCSILEKEAVNVSLENLKTYPFVKEGLANGTLKLIGAHYDFVSGEFLTWKK

SEQ ID NO: 20899 - protein, 548 aa, Zea mays
  unsure (1)..(548): unsure at all Xaa locations
MYTLPVRATTSSIVASLATPAPSSSSGSGRPRLRLIRNAPVFAAPATVXCKRDGGQLRSQTREIERERKGGHPPAGGHKRGGERGQRRGGEEEEDEQLPLPSEKKGGASEGEAVHRYPHLVTPSEPEALXQPPPPPSKASSKGMDPTVERLKSGFQKFKTEVYDKKPELFEPLKSGQSPRYMVFACSDSRVCPXSVTLGLQPGEAFTVRNIASMVPPYDKIKYAGTGSAIEYAVCALKVQVIVVIGHSCCGGIRALLSLKDGAPDNFTFVEDWVRIGSPAKNKVKKEHASVPFDDQCSILEKEAVNVSLQNLKSYPFVKEGLAGGTLKLVGAHSHFVKGQFVTWEPPQDAIERLTSGFQQFKVNVYDKKPELFGPLKSGQAPKYMVFACSDSRVCPSVTLGLQPGEAFTVRNIAAMVPGYDKTKYTGIGSAIEYAVCALKVEVLVVIGHSCCGGIRALLSLQDGAAYTFHFVEDWVKIGFIAKMKVKKEHASVPFDDQCSILEKEAVNVSLENLKTYPFVKEGLANGTLKLIGAHYDFVSGEFLTWKK

SEQ ID NO: 20900 - protein, 288 aa, Zea mays
  unsure (1)..(288): unsure at all Xaa locations
XEGEQLPLPPLSLXKRIGAGVTEGVXXFIHLVPPGEPEGYPPSKAGEXAMDDPVERLKDGFHKFKTEVYDKKPELFEPLKAGQAPKYMVFACSDSRVCPSVTLGLQPGEAFTVRNIAAMVPAYDKTKYTGIGSAIEYAVCALKVEVLVVIGHSCCGGIRALLSLQDGAPDNFHFVENWVKIGFPAKIKVKKDHASVPFDDQCSILEKEAVNLSLENLKTYPFVKEGLANGTLKLVGGHYNFVSGEFLTWAPPTISSHRESIYIHYMMHVRIQHAATYIYIYRITQCNV

SEQ ID NO: 20901 - protein, 238 aa, Zea mays
  unsure (1)..(238): unsure at all Xaa locations
XRPGANGLXASAGPCKPXPPTAPGMDPTVERLKSGFQKFKTEVYDKKPELFEPLKSGQSPRYMVFACSDSRVCPSVTLGLQPGEAFTVRNIASMVPPYDKIKYAGTGSAIEYAVCALKVQVIVVIGHSCRGGIRALLSLKDGAPDNFHFVEDWVRIGSPAKNKVKKEHASVPFDDQCSILEKEAVNVSLQNLKSYPFVKEGLAGGTLKLVGAHYDFVKGQFVTWEPPQDAIERLTSGF

SEQ ID NO: 20902 - protein, 218 aa, Zea mays
  unsure (1)..(218): unsure at all Xaa locations
XEGEQLPWEGPXDDPVERLKDGFHKFKTEVYDKKPELFEPLKAGAAPKYMVFACSDSRVCPSVTLGLQPGEAFTVRNIAXAMVPAYDKTKYTGIGSAIEYAVCALKVEVLVVIGHSCCGGIRALLSLQDGAPDNFHFVENWVKIGFPAKIKVKKDHASVPFDDQCSILEKEAVNLSLENLKTYPFVKDGLANGTLKLVGGHYNFVSGEFLTWDNKQPS

SEQ ID NO: 20903 - protein, 251 aa, Zea mays
MPAFPVRASASSSVVGSLTGTRRPRLIKNTTVIFATAPSTLVAMGHWVPRGDAVEHLKSGFQKFKTEVYDKKPELFEPLKAGQAPKYMVFACSDSRVCPSVTLGLQPGEAFTVRNIAAMVPAYDKTKYTGIGSAIEYAVCALKVEVLVVIGHSCCGGIRALLSLQDGAPDNFHFVENWVKIGFPAKVKVKKEHASVPFDDQCSILEKEAVNVSLENLKTYPFVQEGLAKGTLKLVGAHYDFVSGKFLVWET

SEQ ID NO: 20904 - protein, 549 aa, Zea mays
  unsure (1)..(549): unsure at all Xaa locations
MYTLPVRATTSSIVASLATPAPSSSSGSGSGRPRPRLIRNAPVFAAPATVVKRDGGQLRSQTREXDRERKGGHPXPAGGDKRGGERGQRRGGGEEEEDEQLPLPSEKKGGASEGEAVHRYPHLVTPSEPEALXQPPPPPSKASSKGMDPTVERLKSGFQKFKTEVYDKKPELFEPLKSGQSPRYMVFACSDSRVCPSVTLGLQPGEAFTVRNIASMVPPYDKIKYAGTGSAIEYAVCALKVQVIVVIGHSCCGGIRALLSLKDGAPDNFHFVEDWVRIGSPAKNKVKKEHASVPFDDQCSILEKEAVNVSLQNLKSYPFVKEGLVGAHYDFVKGQFVTWEPPQDAIERLTSGFQQFKVNVYDKKPELFGPLKSGQAPXKYMVFACSDSRVCPSVTLGLQPGEAFTVRNIAXAMVPAYDKTKYTGIGSAIEYAVCALKVEVLVVIGHSCCGGIRALLSLQDGAPDTFHFVENWVKIGFPAKIKVKKDHASVPFDDQCSILEKEAVNLSLENLKTYPFVKDGLANGTLKLVGGHYNFVSGEFLTWDNKQPS

SEQ ID NO: 20905 - protein, 229 aa, Zea mays
  unsure (1)..(229): unsure at all Xaa locations
XVACSSPTFSLRCTVLAGEGPXDDPVERLKDGFHKFKTEVYDKKPELFEPLEAGQAPXKYMVFACSDSRVCPSVTLGLQPGEAFTVRNIAXAMVPAYDKTKYTGIGSAIEYAVCALKVEVLVVIGHSCCGGIRALLSLQDGAPDTFHFVENWVKIGFPAKIKVKKDHASVPFDDQCSILEKEAVNLSLENLKTYPFVKDGLANGTLKLVGGHYNFVSGEFLTWDNKQPS

SEQ ID NO: 20906 - protein, 679 aa, Zea mays
  unsure (1)..(679): unsure at all Xaa locations
GYLEAGREKKRHSHDQCTTLPVRATTSSIVXPACHPRAVLLLRLRPPXGSGSSGTPXRLRRPXATVVGMDPTVERLKSGFQKFKTEVYDKKPELFEPLKSGQSPRYMVFACSDSRVCPSVTLGLQPGEAFTVRNIASMVPPYDKIKYAGTGSAIEYAVCALKVQVIVVIGHSCCGGIRALLSLKDGAPDNFHFVEDWVRIGSPAKNKVKKEHASVPFDDQCSILEKEAVXNVSLQNLKSYPFVKEGXLAGGTLXKLVGAHYDFVKGQFVTWXEPPQDAIERLTSGFQQFKVNVYDKKPELFGPLKSGQAPKYMVFACSDSRVCPSVTLGLQPAKAFTVRNIAAMVPGYDKTKYAGIGSAIEYAVCALKVQVIVVIGHSCCGGIRALLSLKDGAPDNFHFVEDWVRIGSPAKNKVKKEHASVPFDDQCSILEKEAVNVSLQNLKSYPFVKEGLAGGTXQAGWPHYDFVKGQFVTWEPPQDAIERLTSGFQQFKVNVYDKKPELFGPLKSGQAPKYMVFACSDSRVCPSVTLGLQPGEAFTVRNIAXAMVPGYDKTKYTGIGSAIEYAVCALKVEVLVVIGHSCCGGIRALLSLQDGAPDTFHFVEDWVKIGFIAKMKVKKEHARVPFDDQCSILEKEAVNVSLENLKTYPFVKEGLANGTLKLIGAHYDFVSGEFLTWKK

SEQ ID NO: 20907 - protein, 231 aa, Zea mays
IHRSLTSLTLKNQRTHPPYLLHPHLSKKAMGDAVEHLKSGFQKFKTEVYDKKPELFEPLKAGQAPKYMVFACSDSRVCPSVTLGLQPGEAFTVRNIAAMVPAYDKTKYTGIGSAIEYAVCALKVEVLVVIGHSCCGGIRALLSLQDGAPDNFHFVENWVKIGFPAKVKVKKEHASVPFDDQCSILEKEAVNVSLENLKTYPFVQEGLAKGTLKLVGAHYDFVSGMFLVWET

SEQ ID NO: 20908 - protein, 230 aa, Zea mays
  unsure (1)..(230): unsure at all Xaa locations
XGRAGVQFIHLVRPSLRTRRPPDDPVERLKDGFHKFKTEVYDKKPELFEPLKAGXQAPKYVAXFACSDSRVCPSVTLGLQPGXEAFTVRNIAAMVPAYDKTKYTGIGSAIEYAVCALKVEVLVVIGHSCCGGIRALLSLQDGAPDNFHFVENWVKIGFPAKIKVKKDHASVPFDDQCSILEKEAVNLSLENLKTYPFVKEGLANGTLKLVGGHYNFVSGEFLTWDNKQPS

SEQ ID NO: 20909 - protein, 209 aa, Zea mays
  unsure (1)..(209): unsure at all Xaa locations
QKLHHAPPQDAIERLTSGFQQFKVNVYDKKPELFGPLKSGQAPKYMVFACSDSRVCPSVTLGLQPGEAFTVRNIAAMVPGYDKTKYTGIGSAIEYAVCALKVEVLVVIGHSCCGGIRALLSLQDGAPDTFHFVEDWVKIGFIAKMKVKKEHASVPFDDQCSILEKEAVNVSLQNLKSYPFVKEGLAGGTLKLVGAHYDFVSGEFLTXKK

SEQ ID NO: 20910 - protein, 234 aa, Zea mays
  unsure (1)..(234): unsure at all Xaa locations
XAREGFEETVGSNFYXPILLFLASQFVLHKLPQDAIERLTSGFQQFKVNVYDKKPELFGPLKSGQAPKYMVFACSDSRVCPSVTLGLQPGEAFTVRNIAAMVPGYDKTKYTGIGSAIEYAVCALKVEVLVVIGHSCCGGIRALLSLQDGAPDTFHFVEDWVKIGFIAKMKVKKEHASVPFDDQCSILEKEAVNVSLENLKTYPFVKEGXLANGTLKLIGAHYDFVSGEFLTWKK

SEQ ID NO: 20911 - protein, 202 aa, Zea mays
  unsure (1)..(202): unsure at all Xaa locations
XPTSSPTLQXASSISLFLTSSPTLPARXMDPAVERLKTGFEKFKTEVYDQKPDLFEPLKAHQSPKYMVFACADSRVCPSVTLGLEPGEAFTVRNIAAMVPSYCKNKHTGVGSAIEYAVCALKVEFIVVIGHSRCGGIKALLNLKDGTDDTFHFVEDWVRIGYPARKKVKDECSEMPFEEQCGVLEKEAVNVSLQNLSTYPFX

SEQ ID NO: 20912 - protein, 515 aa, Zea mays
  unsure (1)..(515): unsure at all Xaa locations
DMPRLKCVNLARTCTSPVPARKRDGGQLRSQTREXDRERKGGHPXPAGGDKRGGERGQRRGGGEEEEDEQLPLPSEKKGGASEGEAAHRYPHLVTPSEPEALXQPPPPPSKASSKSMDPTVERLKSGFQKFKTEVYDKKPELFEPLKSGQSPRYMXVFACSDSRVCPSVTPGLQPGEAFTVRNIASMVPPYDKIKYAGTGSAIEYAVCALKVQVIVVIGHSCCGGIRALLSLKDGAPDNFHFVEDWVRIGSPAKNKVKKEHASVPFDDQCSILEKEAVNVSLQNLKSYPFVKEGLVGAHYDFVKGQFVTWEPPQDAIERLTSGFQQFKVNVYDKKPELFGPLKSGQAPKYMVFACSDSRVCPSVTLGLQPGXEAFTVRNIAAMVPGYDKTKYTGIGSAIEYAVCALKVEVLVVIGHSCCGGIRALLSLQDGAPDTFHFVEDWVKIGFIAKMKVKKEHASVPFDDQCSILEKEAVNVSLENLKTYPFVKEGLANGTLKLIGAHYDFVSGEFLTWKK

SEQ ID NO: 20913 - protein, 252 aa, Zea mays
  unsure (1)..(252): unsure at all Xaa locations
MPAFPVRASASSSVVGSLTGTRRPRLIKNTTVIFATAPSTLVAMGHWVPRGDAVEHLKSGFQKFKTEVYDKKPELFEPLKAGQAPKYMVFACSDSRVCPSVTLGLQPGEAFTVRNIAAMVPAYDKTKYTGIGSAIEYAVCALKVEVLVVIGHSCCGGIRALLSLQDGAPDNFHFVENWVKIGFPAKXVKVKKEHASVPFDDQCSILEKEAVNVSLENLKTYPFVQEGLAKGTLKLVGAHYDFVSGMFLVWET

SEQ ID NO: 20914 - protein, 209 aa, Zea mays
  unsure (1)..(209): unsure at all Xaa locations
MGHWVPRGDAVEHLKSGFQKFKTEVYDKKPELFEPLKAGQAPKYMVFACSDSRVCPSVTLGLQPGEAFTVRNIAAMVPAYDKTKYTGIGSAIEYAVCALKVEVLVVIGHSCCGGIRALLSLQDGAPDNFHFVENWVKIGFPAKVKVKKEHASVPFDDQCSILEKEAVNXVSLENLKTYPFVQEGLAKGTLKLVGAHYDFVSGNFLVWET

SEQ ID NO: 20915 - protein, 261 aa, Zea mays
  unsure (1)..(261): unsure at all Xaa locations
XWVPRGRPGIICQMGSRDHSGLTRQPLDFXNMIQXMRQAQNTVXFMDLKARFMDFKQRNYVENSSNFHNLAEQQTPKFMEIACADSTVCPTAVLRFQPAEAFTGHNVANLVPPYEHEGSETSAALEIAINTLEVENVLVVSHSRCGGIQALMSMKDDSTSGSFIKNWVTIEKSARLSTRAAAGNLSFDMQCKHCEKESINSSLLNLLTYPWIEKRVNEGTLNLHGGYYNFVDCTFEKWTLLYREGLEGGSKYAIKNRSTWC

SEQ ID NO: 20916 - protein, 208 aa, Zea mays
  unsure (1)..(208): unsure at all Xaa locations
MYTLPVRATTSSIVXPACHPRAVLLLRLRPPGPGSSGTPXRLRRPXATVVGMDPTVXERLKSGFQKFKTEVYDKKPELFEPLKSGQSPRXYMVFACSDSRVCPSVTLGLQPGEAFTVRNIASMVPPYDKIKYAGTGAAIEYAACALKVQVIAVIGHSCCGGIRALLSLEDGAPDNFHFVEDWVRIGSPAKNEVKKEHASVPVDDQCSX

SEQ ID NO: 20917 - protein, 119 aa, Zea mays
  unsure (1)..(119): unsure at all Xaa locations
XAIEYAVCALKVEVIVVIGHSRCGGIKALLSLEDGAPDKFHFVEEWVRIGGPAKTKVKTDHASVPFEDQCSILEKEAVNVSLENLKTYPFVKEGVEKGTLKLVGGHYDFVNGKFETWEP

SEQ ID NO: 20918 - protein, 257 aa, Zea mays
  unsure (1)..(257): unsure at all Xaa locations
LLRAIGYLEAGRDPFPSIHRSLTSLTREEPENPPTLLHLLHPHLSKKEPWGDAVEHLKSGFQKFKTEVYDKKPELFEPLKAGQAPKYMVFACSDSRVCPSVTLGLQPGEAFTVRNIAAMVPAYDKTKYTGIGSAIXEYAVCALKVEVLVVIGHSCCGGIRXALLSLQDGAPDNFHFVENWVKIGFPAKXVKVKKEHASVPFDDQCSILXRRRAVNVSLENLKTYPFVQEGLAKGTXLKLVGAHYDFVSXGNLLVWET

SEQ ID NO: 20919 - protein, 240 aa, Zea mays
  unsure (1)..(240): unsure at all Xaa locations
GTSRPAGILVPSPHSLVKSQRTHPPSFISYIRIYPRWRPWATPSQDLKSGFQKFKTDVYDKKPELFEPFKAVQVPEYMVFACSDSRVCPSETLGLPPGEAFTVRNIAAMVPAYDXTKYTGIGSAIXEYTVCALTVEVLVVIGHMCCGVIRALLSLHDGAPDYFHFXXCWGKIRFPAEVEVKKEYASVPFYDQCSILEKEAENVSLENLETYPFIQEGLDKGTLKLVRAHYDFWSRNFLVX

SEQ ID NO: 20920 - protein, 320 aa, Populus tremula x Populus tremuloides
MSTASINSWCLTSVSPSKKSLPALRPSVFASLNSSVSPPTLIRNQPVFAAPAPILYPRRGEEMGNDYNEAIESLKKLLSDKEELKTVAAAKVEQITAELQTVSSSDPKAFDPVEKIKSGFIHFKKEKYDKNPGLYSELAKGQSPKFMVFACSDSRVCPSHVLDFQPGEAFVVRNVANMVPPYDKTKYAGVGAAIEYAVLHLKVEYIVVIGHSACGGIKGLMSFPYDGTTSTDFIEDWVKVCYNAKTKILAEHANSPFPDMCTQCEKEAVNVSLGHLLTYPFVRDGLVNKTLGLKGGYYDFVKGSFELWGLEYSLSPSLSV

SEQ ID NO: 20921 - protein, 320 aa, Populus tremula x Populus tremuloides
MSTASINSWCLTSVSASKKSLPALRPSVFASLNSSVSPPTLIRNQPVFAAPAPILYPRRGEEMGNDYNEAIESLKKLLSDKEELKTVAAAKVEQITAELQTVSSSDPKAFDPVEKIKSGFIHFKKEKYDKNPGLYSELAKGQSPKFMVFACSDSRVCPSHVLDFQPGEAFVVRNVANMVPPYDKTKYAGVGAAIEYAVLHLKVEYIVVIGHSACGGIKGLMSFPYDGTTSTDFIEDWVKVCYNAKTKILAEHANSPFPDMCTQCEKEAVNVSIGHLLTYPFVRDGLVNKTLGLKGGYYDFVKGSFELWGLEYSLSPSLSV

SEQ ID NO: 20922 - protein, 233 aa, Novosphingobium aromaticivorans
MTIVNELIGRVFSFEKTVFPDSRELFGKLSTQGQSPKALMISCADSRIVPEQIMQAEPGELFVCRNAGNMVPPFATMNGGVSSTVEYAVVALGVRDIIVCGHSDCGAMKALAAPELPQGMPNVVAWLRHGSAAEHVVSSCSPHLHGNERVRAVSLQNIIAQIAHLRTHPSVAAAIARGEMALHGWFVDISAGMVLGLDGDTGQFVPLREDRSLPVALPAQPRAASEPLVEAAE

SEQ ID NO: 20923 - protein, 224 aa, Novosphingobium aromaticivorans
MGPLARPMTQDASPELDRLIAGYRRFREQGWTPKLERWRELRDGQEPQVMIIACSDSRVDPAQIFDVDPGEIFVVRNVAAMVPPFETNPGHHGVSAALEFAVQVLKVKEVVVMGHGMCGGCKAALTQDLKGTEPGEGGFIADWIALLDGVRDEVVDKHGTTGRPAERAMEEAGVRASLANLRTFPCIRRKEATGELKLRGTFFAISDGVLHVLDETTGDFSPVN

SEQ ID NO: 20924 - protein, 244 aa, Schizosaccharomyces pombe
MPDRLKRRIEEIDHQDEIIDREASTASPVSGAGKIDQNGEIKDLLERNLTWSQQTSRKYPSFFTATKDIQTPQVLWIGCSDSRVPETTILNLLPGEVFVHRNIANVVPRSDINALAVMEYSVTVLKVKHIIVCGHYGCGGVAAALGPNLNNLLDHWLRHIRDVIEDNREELDAIEDPQLRRLKLAELNTRAQAISVTRVGFVREAMEKRGLQVHGWIYDLSNGQIKKLDITDAIKKAKYGTYDS

SEQ ID NO: 20925 - protein, 221 aa, Saccharomyces cerevisiae
MSATESSSIFTLSHNSNLQDILAANAKWASQMNNIQPTWFPDHNAKGQSPHTLFIGCSDSRYNENCLGVLPGEVFTWKNVANICHSEDLTLKATLEFAIICLKVNKVIICGHTDCGGIKTCLTNQREALPKVNCSHLYKYLDDIDTMYHEESQNLIHLKTQREKSHYLSHCNVKRQFNRIIENPTVQTAVQNGELQVYGLLYNVEDGLLQTVSTYTKVTPK

SEQ ID NO: 20926 - protein, 221 aa, Saccharomyces cerevisiae
MSATESSSIFTLSHNSNLQDILAANAKWASQMNNIQPTLFPDHNAKGQSPHTLFIGCSDSRYNENCLGVLPGEVFTWKNVANICHSEDLTLKATLEFAIICLKVNKVIICGHTDCGGIKTCLTNQREALPKVNCSHLYKYLDDIDTMYHEESQNLIHLKTQREKSHYLSHCNVKRQFNRIIENPTVQTAVQNGELQVYGLLYNVEDGLLQTVSTYTKVTPK

SEQ ID NO: 20927 - protein, 223 aa, Ralstonia eutropha
MTDAIAQLFRNNREWVDRVNAEDPTFFMRLANQQAPEYLWIGCSDSRVPANQILGLAPGEVFVHRNIANVIAHSDLNALAVIQFAVEVLKVRHITVVGHYGCGGVKVALKRERIGLADNWLRHVRDVADKHEAYLGTLLREDDAHTRLCELNVIEQVNNVCQTTVLQDAWSRGQAVTVHGWVYGVSDGLLRDLGMAASSNDELREQLAAAYRQYGDPPQASIR

SEQ ID NO: 20928 - protein, 283 aa, Neurospora crassa
MLSTRLGLSPLLHSSKQASSALSRLAVPRTTSTPLPRRRLTIVPSATPRRSFCSSHTADDKDRSKKDITMYLQETHDKVFENNKSWAAEQVAKDPDFFKKLAAGQNPEYLWIGCSDSRIPAEQITGLQPGDAFVHRNIANLVCNTDLNVMSVIEYAVKHLQVKHIVVCGHYGCGGVKAAMTPKDLGLMNPWLRNIRDVYRLHEKELDAIADEEARYERLVELNVYEQCRNVVKTAALQQSYAENGFPIIHGWVFNFRDGMLKDLNVDFKTILKDIQKIYNLTN

SEQ ID NO: 20929 - protein, 230 aa, Neurospora crassa
MSADNTFHYALSSNNAWAGYKAHQNPQFFPKLAGGQSPEILWIGCSDSRCPETTILGMQPGDVFVHRNIANIISPTDINTTAVIEYAVANLKVKHVVLCGHSACGGAAAALSDARVGGVLDTWLLPLKTVRFNHAEELEAITDEKERIMRIAQLNVEAGIKVLMNNATIREAIAERGLEVHGVFFDISCGRIKELGCGTAHAGKGDHVVRGKHGQLVFGQDGEAAIAAAQ

SEQ ID NO: 20930 - protein, 218 aa, Escherichia coli
MKEIIDGFLKFQREAFPKREALFKQLATQQSPRTLFISCSDSRLVPELVTQREPGDLFVIRNAGNIVPSYGPEPGGVSASVEYAVAALRVSDIVICGHSNCGAMTAIASCQCMDHMPAVSHWLRYADSARVVNEARPHSDLPSKAAAMVRENVIAQLANLQTHPSVRLALEEGGSLHGWVYDIESGSIAAFDGATRQFVPLAANPRVCAIRLRQPTAA

SEQ ID NO: 20931 - protein, 220 aa, Escherichia coli
  unsure (1)..(220): unsure at all Xaa locations
XKDIDTLISNNALWSKXLVEEDPGFFEKLAQAQKPRFLWIGCSDSRVPAERLTGLEPGELFVHRNVANLVIHTDLNCLSVVQYAVDVLEVEHIIICGHYGCGGVQAAVENPELGLINNWLLHIRDIWFKHSSLLGEXPQERRLDTLCELNVXEQVYNLGHSTIXQSAWKRGQKVTIHGWAYGIHDGLLRDLDVTATNRETLEQRYRHGISNLKLKHANHK

SEQ ID NO: 20932 - protein, 213 aa, Escherichia coli
MKDIDTLISNNALWSKMLVEEDPGFFEKLAQAQKPRFLWIGCSDSRVPAERLTGLEPGELFVHRNVANLVIHTDLNCLSVVQYAVDVLEVEHIIICGHYGCGGVQAAVENPELGLINNWLLHIRDIWFKHSSLLGEMPQERRLDTLCELNVMEQVYNLGHSTIMQSAWKRGQKVTIHGWATAFTTACCVIWMLPPPTAKPLSNVTVTGFPTSS

SEQ ID NO: 20933 - protein, 322 aa, Nicotiana paniculata
MSTASINSCLTISPAQASLKKPIRPVAFARLSNTSSSSSSVPSLIRNEPVFAAPTPIINPILREEMAKESYEQAIAALEKLLSEKGELGPIAAARVDQITAELQSSDGSKPFDPVEHMKAGFIHFKTEKYEKNPALYGELSKGQSPKFMVFACSDSRVCPSHVLNFQPGEAFVVRNIANMVPAYDKTRYSGVGAAIEYAVLHLKVENIVVIGHSACGGIKGLMSLSADGSESTAFIEDWVKIGLPAKAKVEGEHADKCFADQCTACEKEAVNVSLGNLLTYPFVREGLVKKTLALKGGHYDFVNGGFELWGLEFGLSPSLSV

SEQ ID NO: 20934 - protein, 270 aa, Caenorhabditis elegans
MNKILRGVIQFRNTIRKDLVKQFEEIKNNPSPTAVMFTCMDSRMLPTRFTQSQVGDMFVVRNAGNMIPDAPNYGAFSEVSVNTEPAALELAVKRGGIRHIVVCGHSDCKAINTLYGLHQCPKNFDVTSPMDHWVRRNGFASVKRLNERLHRGPSSMKFESEVAPSQSFDAIIDPMDTLAMEDKLSQINVLQQLINICSHEFLKEYLESGRLHIHGMWFDIYKGEDYLFSKDKKRFVVIDEKTVTDLLAELNARYPVPEDQDGPVAFAKSN

SEQ ID NO: 20935 - protein, 429 aa, Caenorhabditis elegans
MTPVEEIIKKDIFRETPLRYLGYANEVGEAFRSLVKPVVVKFSYVVAFGYVAADSIDKGLQEYIKTHSTSTEKTKKVAIAAVDTVLWQTFASVLIPGFTINRFCFFSNLLLQKSTKLPTNMRKWTVTCLGLATIPFIVHPIDSFVEEAMDKTARKIYNKMNKILRGVIQFRNTIRKDLVKQFEEIKNNPSPTAVMFTCMDSRMLPTRFTQSQVGDMFVVRNAGNMIPDAPNYGAFSEVSVNTEPAALELAVKRGGIRHIVVCGHSDCKAINTLYGLHQCPKNFDVTSPMDHWVRRNGFASVKRLNERLHRGPSSMKFESEVAPSQSFDAIIDPMDTLAMEDKLSQINVLQQLINICSHEFLKEYLESGRLHIHGMWFDIYKGEDYLFSKDKKRFVVIDEKTVTDLLAELNARYPVPEDQDGPVAFAKSN

SEQ ID NO: 20936 - protein, 272 aa, Nostoc punctiforme
MKKLIKGLREFKSSYFSANEELFEQLSHGQKPRVLFITCSDSRIDPNLITQAGLGELFVIRNAGNIIPPFGATNGGEGATIEYAIQALDIQQIIVCGHSHCGAMKGLMKLDSLRVEMPLVHDWLKYAEATRRLVKDNYSHYEGEELLEIIIAENVLTQIENLRTYPVIRSKLHQGQLSIYAWIYQIETGEILAYDPQKHAYVLPQNQLLSSEIDETLLSPPLNSNVEIHFTKTQQRPFQSSGELPIPTHEWFPMTVLSPEQMERIYRGSATK

SEQ ID NO: 20937 - protein, 222 aa, Nostoc punctiforme
MKYNSIDELFRNNQAWVAEKLAIDPTYFQELSKGQTPPFLYIGCSDSRLPLTNLTRTEPGELFVHRNIANQVSLTDINFLAVLEYAILHLKVEHIIVCGHYDCGGIKAALEGRTIGILDNWVNPIRELYLHKQEEIDALPTREERLNRLAEINVVAQVKNLYQTSIMRQALYERKAPMVHGWVLDIRTGLIKDLNVSTVQWQLHICPLLLEFRLYAMLKNES

SEQ ID NO: 20938 - protein, 222 aa, Vibrio cholerae
MPEIKQLFENNSKWSESIKAETPEYFAKLAKGQNPDFLWIGCADSRVPAERLTGLYSGELFVHRNVANQVIHTDLNCLSVVQYAVDVLQVKHIIVCGHYGCGGVTAAIDNPQLGLINNWLLHIRDYYLKHREYLDQMPAEDRSDKLAEINVAEQVYNLANSTVLQNAWERGQAVEVHGFVYGIEDGRLEYLGVRCASRSAVEDNYHKALEKILNPNHRLLCR

SEQ ID NO: 20939 - protein, 229 aa, Haemophilus influenzae Rd
MDKIKQLFANNYSWAQRMKEENSTYFKELADHQTPHYLWIGCSDSRVPAEKLTNLEPGELFVHRNVANQVIHTDFNCLSVVQYAVDVLKIEHIIICGHTNCGGIHAAMADKDLGLINNWLLHIRDIWFKHGHLLGKLSPEKRADMLTKINVAEQVYNLGRTSIVKSAWERGQKLSLHGWVYDVNDGFLVDQGVMATSRETLEISYRNAIARLSILDEENILKKDHLENT

SEQ ID NO: 20940 - protein, 255 aa, Drosophila melanogaster
MERILRGIMRYRNTTREQMVKEFQKVRDNPEPKAVFFTCMDSRMIPTRYTDTHVGDMFVVRNAGNLIPHAQHFQDEYFSCEPAALELGCVVNDIRHIIVCGHSDCKAMNLLYQLRDPDFASKLNRRLSPLRSWLCTHANTSLERFQEWRDAGMKDPLIFSSETPLRRFVAYIDEEQKFALEDKLSQINTLQQMSNIASYGFLKARLESHDLHIHALWFDIYTGDIYYFSRGAKRFLPVDEDTVDRLSEEVRRFYS

SEQ ID NO: 20941 - protein, 229 aa, Pasteurella multocida
MKKIEQLFANNYSWALRMKEENSSYFKELADHQTPSYLWIGCSDSRVPAEKLTNLGPGELFVHRNVANQVIHTDLNCLSVVQYAVEVLNIEHIIICGHTNCGGIKAAMADQDLGLINNWLLHLRDIWYKHSHLLGNLPPEKRADMLTKINVAEQVYNLGRSSIIKSAWKNGKKLSLHGWVYDVNDGFLIDQGVIATSRESLEISYRNAIARLLKLNEDEILKKDQDEEA

SEQ ID NO: 20942 - protein, 220 aa, Escherichia coli K12
MKDIDTLISNNALWSKMLVEEDPGFFEKLAQAQKPRFLWIGCSDSRVPAERLTGLEPGELFVHRNVANLVIHTDLNCLSVVQYAVDVLEVEHIIICGHYGCGGVQAAVENPELGLINNWLLHIRDIWFKHSSLLGEMPQERRLDTLCELNVMEQVYNLGHSTIMQSAWKRGQKVTIHGWAYGIHDGLLRDLDVTATNRETLEQRYRHGISNLKLKHANHK

SEQ ID NO: 20943 - protein, 219 aa, Escherichia coli O157:H7
MKEIIDGFLKFQREAFPKREALFKQLATQQSPRTLFISCSDSRLVPELVTQREPGDLFGIRNAGNIVPSYGPEPGGVSASVEYAVAALRVSDIVICGHSNCGAMTAIASCQCMDHMPAVSHWLRYADSARVVNEARPHSDLPSKAAAMVRENVIAQLANLQTHPSVRLALEEGRIALHGWVYDIESGSIAAFDGATRQFVPLAANPRVCAIPLRQPTAA

SEQ ID NO: 20944 - protein, 221 aa, Helicobacter pylori 26695
MKAFLGALEFQENEYEELKELYESLKTKQKPHTLFISCVDSRVVPNLITGTKPGELYVICNMGNVNPPKTSYKESLSTIASIEYAIAHVGVQNLIICGHSDCGACGSVHLIHDETTKAKTPYIANWIQFLEPVKEELKNHPQFSNHFAKRSWLTERLNARLQLNNLLSYDFIQEKASKNELKIFGWHYIIETGRIYNYNFESHFFEPIGETIKQRKSHENF

SEQ ID NO: 20945 - protein, 221 aa, Helicobacter pylori J99
MEAFLGALEFQENEYEEFKELYESLKTKQKPHTLFISCVDSRVVPNLITGTQPGELYVIRNMGNVIPPKTSYKESLSTIASVEYAIAHVGVQNLIICGHSDCGACGSIHLIHDETTKAKTPYIANWIQFLEPIKEELKNHPQFSNHFAKRSWLTERLNARLQLNNLLSYDFIQERVINNELKIFGWHYIIETGRIYNYNFESHFFEPIEETIKQRISHENF

SEQ ID NO: 20946 - protein, 220 aa, Salmonella enterica subsp. enterica serovar Typhi
MKDIDTLISNNALWSKMLVEEDPGFFEKLAQAQKPRFLWIGCSDSRVPAERLTGLEPGELFVHRNVANLVIHTDLNCLSVVQYAVDALEVEHIIICGHSGCGGIKAAVENPELGLINNWLLHIRDIWLKHSSLLGKMPEEQRLDALYELNVMEQVYNLGHSTIMQSAWKRGQNVTIHGWAYSINDGLLRDLDVTATNRETLENGYHKGISALSLKYIPHQ

SEQ ID NO: 20947 - protein, 216 aa, Cytophaga hutchinsonii
MLEYNQIFENNRKWLAEKNRTNSEFFDQLSEGQNPDYLFIGCSDSRVTAEAIMGAKPGEVFVHRNIANLVPNNDNSSASVIEYAVKHLGVKHIVVCGHYLCGGVKAAMQSVDLGILNPWLRNIRDVYRLHKNELNAIADETARYNRLVELNVQEQCINIIKMAVWQKRYLNEGFPEVHGWVFDIHTGKLIDLEIDFNNALKSIREIYDLGTSTENL

SEQ ID NO: 20948 - protein, 212 aa, Cytophaga hutchinsonii
MKESYQKLLNNNKIWALGKIQDDADYFKRMKLAQTPEYLWIGCSDSRVPETEVTGTLQGQLFVHRNIANMVVHTDLNLLSVVEYAVEVLKVKHIIVCGHYGCGGVAAATKNNSFGYVDNWLRNIKEIYNKNTVELLAIENEEERINRLVELNVVEQVRNLAKTKPVQRAWKNRALEIHGWVYGLDTGIIKDLHSLYDEAEDLEPIFRYTFED

SEQ ID NO: 20949 - protein, 220 aa, Salmonella typhimurium LT2
MKDIDTLISNNALWSKMLVEEDPGFFEKLAQAQKPRFLWIGCSDSRVPAERLTGLEPGELFVHRNVANLVIHTDLNCLSVVQYAVDVLEVEHIIICGHSGCGGIKAAVENPELGLINNWLLHIRDIWLKHSSLLGKMPEEQRLDALYELNVMEQVYNLGHSTIMQSAWKRGQNVTIHGWAYSINDGLLRDLDVTATNRETLENGYHKGISALSLKYIPHQ

SEQ ID NO: 20950 - protein, 184 aa, Streptomyces coelicolor A3(2)
MLTVGDKFPEFDLTACVSLEKGKEFQQINHKTYEGQWKVVFAWPKDFTFVCPTEIAAFGKLNDEFADRDAQILGFSGDSEFVHHAWRKDHPDLTDLPFPMLADSKHELMRDLGIEGEDGFAQRAVFIVDQNNEIQFTMVTAGSVGRNPKEVLRVLDALQTDELCPCNWSKGDETLDPVALLSGE

SEQ ID NO: 20951 - protein, 184 aa, Streptomyces coelicolor A3(2)
MLTVGDKFPEFDLTACVSLEKGKDFQQINHKTYEGQWKVVFAWPKDFTFVCPTEIAAFGKLNDEFADRDAQILGFSGDSEFVHHAWRKDHPDLTDLPFPMLADSKHELMRDLGIEGEDGFAQRAVFIVDQNNEIQFTMVTAGSVGRNPKEVLRVLDALQTDELCPCNWSKGDETLDPVALLSGE

SEQ ID NO: 20952 - protein, 152 aa, Streptomyces coelicolor A3(2)
MAIQVGDKAPDFELKDNHGATVRLSEFRGRKNVVLLFYPFAFTGVCTGELCEVRDNLPQFSDRDTEVLAVSNDSIHTLRVFAEQEGLEYPLLSDFWPHGNVSRAYGVFDEDKGCAVRGTFVIDQEGVVRWTVVNALPDARDLAEYVKALDAL

SEQ ID NO: 20953 - protein, 198 aa, Cricetulus griseus
MASGNAHIGKPAPDFTATAVVDGAFKEVKLSDYRGKYVVLFFYPLDFTFVCPTEIIAFSNHAEDFRKLGCEVLGVSVDSQFTHLAWINTPRKEGGLGPLNIPLLADVTRSLSENYGVLKTDEGIAYRGLFIIDAKGILRQITVNDLPVGRSVDEALRLVQAFQYTDEHGEVCPAGWKPGSDTIKPNVDDSKEYFSKHN

SEQ ID NO: 20954 - protein, 199 aa, Cricetulus griseus
MSSGNAKIGYPAPNFKATAVMPDGQFRDICLSEYRGKYVVFFFYPLDFTFVCPTEIIAFSDRAEEFKKLNCQVIGASVDSHFCHLAWINTPKKQGGLGPMNIPLVSDPKRTIAQDYGVLKADEGISFRGLFIIDDKGILRQITINDLPVGRSVDEILRLVQAFQFTDKHGEVCPAGWKPGSDTIKPDVQKSKEYFSKQK

SEQ ID NO: 20955 - protein, 198 aa, Mus musculus
MASGNAQIGKSAPDFTATAVVDGAFKEIKLSDYRGKYMVLFFYPLDFTFVCPTEIIAFSDHAEDFRKLGCEVLGVSVDSQFTHLAWINTPRKEGGLGPLNIPLLADVTKSLSQNYGVLKNDEGIAYRGLFIIDAKGVLRQITVNDLPVGRSVDEALRLVQAFQYTDEHGEVCPAGWKPGSDTIKPNVDDSKEYFSKHN

SEQ ID NO: 20956 - protein, 198 aa, Mus musculus
MASGNAQIGKSAPDFTATAVVDGAFKEIKLSDYRGKYVVLFFYPLDFTFVCPTEIIAFSDHAEDFRKLGCEVLGVSVDSQFTHLAWINTPRKEGGLGPLNIPLLADVTKSLSQNYGVLKNDEGIAYRGLFIIDAKGVLRQITVNDLPVGRSVDEALRLVQAFQYTDEHGEVCPAGWKPGSDTIKPNVDDSKEYFSKHN

SEQ ID NO: 20957 - protein, 198 aa, Mus musculus
MASGNAQIGKSAPDFTATAVVDGAFKEIKLSDYRGKYVVLFFYPLDFTFVCPTEIIAFSDHAEDFRKLGCEVLGVSVDSQFTHLAWINTPRKEGGLGPLNIPLLADVTKSLSQNYGVLKNDEGIAYRGLFIIDAKGVLRQITVNDLPVGRSVDEALRLVQAFQYTDEHGEVCPAGWKPGSDNIKPNVDDSKEYFSKHN

SEQ ID NO: 20958 - protein, 198 aa, Mus musculus
MASGNAQIGKSAPDFTATAVVDGAFKEIKLSDYRGKYVVLFFYPLDFTFVCPTEIIAFSDHAEDFRKLGCEVLGVSVDSQFTHLAWINTPRKEGGLAPLNIPLLADVTKSLSQNYGVLKNDEGIAYRGLFIIDAKGVLRQITVNDLPVGRSVDEALRLVQAFQYTDEHGEVCPAGWKPGSDNIKPNVDDSKEYFSKHN

SEQ ID NO: 20959 - protein, 198 aa, Mus musculus
MASGNAQIGKSAPDFTATAVVDGAFKEIKLSDYRGKYVDLFFYPLDFTFVCPTEIIAFSDHAEDFRKLRCEVLGVSVDSQFTHLAWINTPRKEGGLGPLNIPLLADVTKSLSHNYGVLKNDEGVAYRGLFIIDASGVLRQITVNDLPVGRSVDEALRLVQAFQYTDEHGEVCPAGWKPGSDTIKPNVDDSKEYFSKHN

SEQ ID NO: 20960 - protein, 199 aa, Mus musculus
MSSGNAKIGYPAPNFKATAVMPDGQFKDISLSEYKGKYVVFFFYPLDFTFVCPTEIIAFSDRADEFKKLNCQVIGASVDSHFCHLAWINTPKKQGGLGPMNIPLISDPKRTIAQDYGVLKADEGISFRGLFIIDDKGILRQITINDLPVGRSVDEIIRLVQAFQFTDKHGEVCPAGWKPGSDTIKPDVNKSKEYFSKQK

SEQ ID NO: 20961 - protein, 199 aa, Mus musculus
MSSGNAKIGYPAPNFKATAVMPDGQFKDISLSEYKGKYVVFFFYPLDFTFVCPTEIIAFSDRADEFKKLNCQVIGASVDSHFCHLAWINTPKKQGGLGPMNIPLISDPKRTIAQDYGVLKADEGISFRGLFIIDDKGILRQITINDLPVGRSVDEIIRLVQAFQFTDKHGEVCPAGWKPGSDTIKPDVNKSKEYFFKQK

SEQ ID NO: 20962 - protein, 274 aa, Mus musculus
MEARSKLLDGTTASRRWTRKLVLLLPPLLLFLLRTESLQGLESDERFRTRENECHFYAGGQVYPGEASRVSVADHSLHLSKAKISKPAPYWEGTAVINGEFKELKLTDYRGKYLVFFFYPLDFTFVCPTEIIAFGDRIEEFKSINTEVVACSVDSQFTHLAWINTPRRQGGLGPIRIPLLSDLNHQISKDYGVYLEDSGHTLRGLFIIDDKGVLRQITLNDLPVGRSVDETLRLVQAFQYTDKHGEVCPAGWKPGSETIIPDPAGKLKYFDKLN

SEQ ID NO: 20963 - protein, 257 aa, Mus musculus
MAAAAGRLLWSSVARHASAISRSISASTVLRPVASRRTCLTDILWSASAQGKSAFSTSSSFHTPAVTQHAPYFKGTAVVNGEFKELSLDDFKGKYLVLFFYPLDFTFVCPTEIVAFSDKANEFHDVNCEVVAVSVDSHFSHLAWINTPRKNGGLGHMNITLLSDITKQISRDYGVLLESAGIALRGLFIIDPNGVVKHLSVNDLPVGRSVEETLRLVKAFQFVETHGEVCPANWTPESPTIKPSPTASKEYFEKVHQ

SEQ ID NO: 20964 - protein, 254 aa, Mus musculus
MAAAAGRLLWSSVARHASAISRSISASTVLRPVASRRTCLTDILWSASAQGKSAFSTSSSFHTPAVTQHAPYFKGTAVVNGEFKELSLDDFKGKYLVLFFYPLDFTFVCPTEIVAFSDKANEFHDVNCEVVAVSVDSHFSHLAWINTPNGGLGHMNITLLSDITKQISRDYGVLLESAGIALGLFIIDPNGVVKHLSVNDLPVGRSVEETLRLVKAFQFVETHGEVCPANWTPESPTIKPSPTASKEYFEKVHQ

SEQ ID NO: 20965 - protein, 154 aa, Mus musculus
MSSGNAKIGYPAPNFKATGVMPDGQFKDTSLSEYKGKYVVFFFYPLDFTFVCPTEIIAFRDRADEFKKLTCQVIGVSVDSHFCHLPWINTPKKQGGLGPMNIPLISDPKRTIAQDYGVLKADEGISFRGLFIIDDKGILQQITINDLPVGRLCG

SEQ ID NO: 20966 - protein, 145 aa, Mus musculus
MSSGNAKIGYPAPNFIATAVMPDGQFKDISLREYKGKYVVFFFYPLDFTFVCPTEIIAFSDRADEFKKLNCQVIGASVDSHFCHLAWINTPKKQGGLGPMNIPLISDPKCTIAQNYGVLKADEGISFRGLFIIDDKGILSTDNNK

SEQ ID NO: 20967 - protein, 168 aa, Mus musculus
MASNKAHIRKPAPDFTALILDYRGKYLVLFFYPLDITFVCPTEIIAFNNHAEDFRKLGWECLTPWKEGGLGPLNIPLPADVTKSLSQNYSMLKNDEGIASLSAMQGCPSPMTVNDLPVGRSVDEALCLVQAFQYTDEHGEVSPAVWKPGSGTIKPIVDDSKEYFSKHN

SEQ ID NO: 20968 - protein, 162 aa, Mus musculus
MSSGNTNTGHPAPKTSKQQLLSLLSVIEQKNLRTQLPSDWSSYGFSLLPWINTPNKQGALGPMSILLISDPKCTIAQDYGVFEADEGISLRGLFVIGDKNILQQMTINYLPSGRSVDVILRPVQTFQFTDEHGEVCLAGWKPGSGTTKPDVNKSKGYFSKQK

SEQ ID NO: 20969 - protein, 198 aa, Rattus norvegicus
MASGNAHIGKPAPDFTGTAVVDGAFKEIKLSDYRGKYVVLFFYPLDFTFVCPTEIIAFSDHAEDFRKLGCEVLGVSVDSQFTHLAWINTPRKEGGLGPLNIPLLADVTKSLSQNYGVLKNDEGIAYRGLFIIDAKGVLRQITVNDLPVGRSVDEALRLVQAFQYTDEHGEVCPAGWKPGSDTIKPNVDDSKEYFSKHN

SEQ ID NO: 20970 - protein, 199 aa, Rattus norvegicus
MSSGNAKIGHPAPSFKATAVMPDGQFKDISLSDYKGKYVVFFFYPLDFTFVCPTEIIAFSDRAEEFKKLNCQVIGASVDSHFSHLAWINTPKKQGGLGPMNIPLVSDPKRTIAQDYGVLKADEGISFRGLFIIDDKGILRQITINDLPVGRSVDEILRLVQAFQFTDKHGEVCPAGWKPGSDTIKPDVNKSKEYFSKQK

SEQ ID NO: 20971 - protein, 199 aa, Rattus norvegicus
MSSGNAKIGHPAPSFKATAVMPDGQFKDISLSDYKGKYVVFFFYPLDFTFVCPTEIIAFSDRAEEFKKLNCQVIGASVDSHFCHLAWINTPKKQGGLGPMNIPLVSDPKRTIAQDYGVLKADEGISFRGLFIIDDKGILRQITINDLPVGRSVDEILRLVQAFQFTDKHGEVCPAGWKPGSDTIKPDVNKSKEYFSKQK

SEQ ID NO: 20972 - protein, 273 aa, Rattus norvegicus
METWSKLLDGTTPSRRWRKLVLLLPPLLLFLLQTEALQGLESDDRFRTRENECHFYAGGQVYPGEVSRVSVADHSLHLSKAKISKPAPYWEGTAVINGEFKELKLTDYRGKYLVFFFYPLDFTFVCPTEIIAFGDRIEEFKSINTEVVACSVDSQFTHLAWINTPRRQGGLGPIRIPLLSDLNHQISKDYGVYLEDSGHTLRGLFIIDDKGVLRQITLNDLPVGRSVDETLRLVQAFQYTDKHGEVCPAGWKPGSETIIPDPAGKLKYFDKLN

SEQ ID NO: 20973 - protein, 257 aa, Rattus norvegicus
MAAAAGRLLWSSVARPASTIFRSISASTVLRPVASRRTCLTDMLWSACPQAKFAFSTSSSFHTPAVTQHAPHFKGTAVVNGEFKELSLDDFKGKYLVLFFYPLDFTFVCPTEIVAFSDKANEFHDVNCEVVAVSVDSHFSHLAWINTPRKNGGLGHMNITLLSDLTKQISRDYGVLLESAGIALRGLFIIDPNGVIKHLSVNDLPVGRSVEEPLRLVKAFQFVETHGEVCPPNWTPESPTIKPSPTASKEYFEKVHQ

SEQ ID NO: 20974 - protein, 199 aa, Rattus norvegicus
MSSGNAKTGHPAPNFKATAVMPDGQFKNISLSDYKGKYVVFFFYPLDFTFVCPTEIIAFSDRAEEFKKLNCQVIGASVNSHFCHLAWINTPKKQGGSGPMSIPLVSDPKPTIAQDDGVLKADEGFSFRGLFLIDEKGSLRQMTINDLPVGRSVDEILRLVQAFQFTDKHGEVCPAGWKPGSDTIKPDVNKSKEYFSKQK

SEQ ID NO: 20975 - protein, 263 aa, Rattus norvegicus
MRQDTGATHKRQGLEISKGVLSSPGCVTPFESTLGPLRALLCALVPKHRATTAEPNSEPCKDMHPTTEPYTPISCAIFLDSFASVLTVMASSNAHSRKPAPDFIATLVVDGAFKEIKLSDYRGNNHAEDFRKLDCEVPGASVDSQFTHLAWINTPRKEGDVGPLNIPLLADVTKSLSQNYGVLKNDEGIADRGLFIINAKGVLRQITVNSLSVGRSVDEALHLVQAFQYTDEHGEVCPAGWKPGSDTIKPNVDDSKEYFSEHS

SEQ ID NO: 20976 - protein, 246 aa, Rattus norvegicus
MLEWFADSRKQMGAAWNHLDKLALVPMVRQSESQPARVLVGTGSAAPSLSGVNHWSLLWTVMASSNAHSRKPAPDFIATLVVDGAFKEIKLSDYRGNNHAEDFRKLDCEVPGASVDSQFTHLAWINTPRKEGDVGPLNIPLLADVTKSLSQNYGVLKNDEGIADRGLFIINAKGVLRQITVNSLSVGRSVDEALHLVQAFQYTDEHGEVCPAGWKPGSYLNCRDVSQAHCSHTYRKAPVVFLSNLY

SEQ ID NO: 20977 - protein, 203 aa, Nostoc sp. PCC 7120
MSITYGTQESLRVGQQAPDFTATAVVDQEFKTIKLSDYRGKYVVLFFYPLDFTFVCPTEITAFSDRYEEFKKLNTEILGVSVDSEFSHLAWIQTDRKSGGVGDLNYPLVSDIKKEVSDAYNVLDPAAGIALRGLFIIDKDGIIQHATINNLAFGRSVDETLRTLQAIQYVQSHPDEVCPAGWQPGEKTMTPDPVKSKVYFAAV

SEQ ID NO: 20978 - protein, 229 aa, Rhodopseudomonas palustris
MHDLVRRVTQHSTNVQETVPMSLHIGDIAPDFTADTTKGKISFHDFIGNSWVFFFSHPADFTPVCTTEMGKTAKLAQPFASRNVKPIGLSTDTVDEHLKWIADVNDTQQTDLQFPIIADPELKVAKLYDMIHPNQSDTAAVRSVFIIDPNKKIRLTMTYPMNVGRNFDEILRVIDALQFADKHTVAAPADWRPGDKVIIPLSVKGEAATKAFPQGWEEPRPYLRLTTIK

SEQ ID NO: 20979 - protein, 197 aa, Buchnera aphidicola str. APS (Acyrthosiphon pisum)
MVLVTQNAPNFIAPAILKNNQIVEQFDLKKYSNGQSTVLFFWPMDFTFVCPSEIIEFNKLHSEFKKRNVKIVGVSIDSVYVHQAWQNTLPKNGGIGKINFPMVSDVKHDIQKSYGIQHPNLGIALRASFLIDSNWIIRHQVVNDLPFGRNITDMIRMVDALDFHNKFGEVCPANWKKGEEGITASSEGVSQYLSKYS

SEQ ID NO: 20980 - protein, 339 aa, Rhodospirillum rubrum
MNPASSSARTRRKHGGAEMPARLARSTLVIRPSLWRSLRILRSMRSSLTRCVAMKTLPSSYRCRSIRERKLHVITRTAQREYPLPHGRDHPPCGLRSATRHTKRAARVEAPVGGGGSYRGAFYGAPSPKSRDLSAMTESVGTLTGRPVPDFTAPAVLADNSIVEDFCLKDYLAGFYGLIFFYPLDFTFVCPSEILAHDHRLPAFAAKEAKVVAISVDSQYSHLAWKKTPIAEGGLGPIGFPMVADISKAIARSFGVLLETGVALRASFLVDRGGIVRHQTVNDLPLGRNVDETLRMIDALRFHDAHGQVCPAGWKTGDPGMTASPEGVAAYLSANAERL

SEQ ID NO: 20981 - protein, 207 aa, Rhodospirillum rubrum
MVIPVLGCALFRSHNAAEKTMSLIGSEVKPFKADAFKAGKFVTVTDDTLKGKWSVVFFYPADFTFVCPTELEDLAENYAEFQRLGVEIFSVSTDTHFAHKAWHDTSEAIKKIEYTMVGDPTGTISRNFDVLIEDAGLADRGTFVIDPEGRIQIVEITAGGIGRDALELLRKVKAAQYVASHPGEVCPAKWKEGEKTLAPSLDLVGRI

SEQ ID NO: 20982 - protein, 167 aa, Rhodospirillum rubrum
ADAFKAGKFVTVTDDTLKGKWSVVFFYPADFTFVCPTELEDLAENYAEFQRLGVEIFSVSTDTHFAHKAWHDTSEAIKKIEYTMVGDPTGTISRNFDVLIEDAGLADRGTFVIDPEGRIQIVEITAGGIGRDALELLRKVKAAQYVASHPGEVCPAKWKEGEKTLAP

SEQ ID NO: 20983 - protein, 155 aa, Chloroflexus aurantiacus
MATPPQVGEMAPDFTLPNEAGEPVSLSQFRGKRVILYFYPKDDTPGCTSQACGFRDSYPVIEEKNAVVIGISPDGTKSHAKFKTKHNLPFILLADEQHSVAEAYGVWGEKSMMGKKYMGIIRSHFVIDEEGRIVQAEIKVSPADSVKRALAALGL

SEQ ID NO: 20984 - protein, 176 aa, Candidatus Carsonella ruddii
MLNTRIKPFKNISYYKKKFYEIKEIDLKSNWNVFFFYPYSYSFICPLELKNISNKIKEFKNLNTKIYAISNDSHFVQKNWIENELKFINFPFISDFNHKISNNFNILNKKDGNCLRSTIIIDKNLIIKYINIVDDSIGRSIDEILKNIKMLQFINTNENKLCPYSWNNDSKSIEIN

SEQ ID NO: 20985 - protein, 177 aa, Candidatus Carsonella ruddii
MLNTKIKPFNTISYFNKKFFNINLNDLKNKWNIFFFFPYSFTFICPTELKDISNYTFKFKEKNCNIFAISTDSHYTQKKWVETELNFVNFPLISDFNKNISKNFNIYNKKDGNCERSTFILDRNLNIKYIEILDINIGRSINDIYQKLSMIQFTNKNINKLCPFSWIKDGKHIDLNL

SEQ ID NO: 20986 - protein, 177 aa, Candidatus Carsonella ruddii
MLNTKIKPFNAISYFNKKFYNINLNDLKNKWNIFFFFPFSFTFVCPTELKDISNYNLKFKEKNCNIFAISTDSHYTHKKWIDEELTFVNFPLISDFNKLISKNFNIYNKKDGNCERSTFILDKNLNIKYIEILDTNIGRSILNIYQKLLMMQFTYKNINKLCPFSWNNDNKYIEINL

SEQ ID NO: 20987 - protein, 177 aa, Candidatus Carsonella ruddii
MLNTKIKPFNTISYFNKKFYNINLNDLKNKWNIFFFFPYSFTFICPTELKDISNYNLKFKEKNCNLFAISTDSHYTHKKWIESELTFINFPFISDFNKLISKNFNIYNKKDGNCERSTFILDKNLNIKYIEILDNNIGRSIHNIYQKLIMMQFTYKNINKLCPFSWNNDNKAIGINL

SEQ ID NO: 20988 - protein, 177 aa, Candidatus Carsonella ruddii
MLNTKINSFKSIAYFKKKFFEITDKELKNFWNVLFFFSFSYTYICPTELLELSKNINLFKNLKCNIYAISTDSHYTHKNWIENEINFINFPFISDFNHKTSKNYKILNKNDGNCYRSTFIIDPNLIIKSIEIIDISISRSIQEILNKIKMLIFTFKNKNKLCPYNWLKDNNSIDINL

SEQ ID NO: 20989 - protein, 186 aa, Sedum lineare
QTLQTSSQSQFHGLKFSHASSFKSPSAPLRKNSIFAKVTKGSTPPPFTLKDQEGRPVSLSKFKGKPVVVYFYPADETPGCTKQACAFRDSYEKFKKAGAEVVGISGDSSESHKAFAKKYKLPFTLLSDEGNKVRKEWGVPSDLFGTLPGRETYVLDKNGVVQLVYNNQFQPEKHIDETLKLLQSLK

SEQ ID NO: 20990 - protein, 208 aa, Chlamydophila pneumoniae AR39
MRNNKRVEEEVFMTLSLVGKEAPDFVAQAVVNGETCTVSLKDYLGKYVVLFFYPKDFTYVCPTELHAFQDALGEFHTRGAEVIGCSVDDIATHQQWLATKKKQGGIEGITYPLLSDEDKVISRSYHVLKPEEELSFRGVFLIDKGGIIRHLVVNDLPLGRSIEEELRTLDALIFFETNGLVCPANWHEGERAMAPNEEGLQNYFGTID

SEQ ID NO: 20991 - protein, 196 aa, Chlamydophila pneumoniae CWL029
MTLSLVGKEAPDFVAQAVVNGETCTVSLKDYLGKYVVLFFYPKDFTYVCPTELHAFQDALGEFHTRGAEVIGCSVDDIATHQQWLATKKKQGGIEGITYPLLSDEDKVISRSYHVLKPEEELSFRGVFLIDKGGIIRHLVVNDLPLGRSIEEELRTLDALIFFETNGLVCPANWHEGERAMAPNEEGLQNYFGTID

SEQ ID NO: 20992 - protein, 182 aa, Ralstonia metallidurans
MKTVGDKLEAFHVVGVKPGFNNHEENGQSAFEDITEKSFEGKWKVIYFYPKDFTFVCPTEIVAFAKLNGDFADRDAIVLGGSTDNEFVKLAWRREHKDLNKLNQWQFADVTGSLVDQLGVRDQAAGVALRATFIVDPDNTIQHVSVNNLNVGRNPEEVLRILDGLQTDELCPCNRAVGGATL

SEQ ID NO: 20993 - protein, 179 aa, Staphylococcus aureus
FTAQAFDPKKDQFKEVTQEDLKGSWSVVCFYPADFSFVCPTELEDLQNQYEELQKLGVNVFSVSTDTHFVHKAWHDHSDAISKITYTMIGDPSQTITRNFDVLDEATGLAQRGTFIIDPDGVVQASEINADGIGRDASTLAHKIKAAQYVRKNPGEVCPAKWEEGAKTLQPGLDLVGKI

SEQ ID NO: 20994 - protein, 151 aa, Deinococcus radiodurans
MTLVGQPAPDFTLPASTGQDITLSSYRGQSHVVLVFYPLDFSPVCSMQLPEYSGSQDDFTEAGAVVLGINRDSVYAHRAWAAEYGIEVPLLADMQLEVARQYGVAIDERGISGRAVFVIDREGVVRYQHVEEQTGQYTVRPGAVLEQLRGL

SEQ ID NO: 20995 - protein, 173 aa, Burkholderia fungorum
SVLSNGNRDVTEESLMGKWSVFVFYPADFTFVCPTELGDLADRYAEFQKLGVEIYSVSTDTHFTHKAWHDTSDTIQKIKYPMVADPTLAISRNFDVLIEEEGLALRGTFVINPEGEIKVAEIHDNGIGRDAGELLRKVQAAQYIAAHPGEVCPAKWTPGAETLTPSLDLIGKI

SEQ ID NO: 20996 - protein, 163 aa, Enterococcus faecium
MKKILWGTGVFFACYPADFTFVCPTELEDLQEQYSTLKSLGVEVFSCSTDTHFTHKAWHDTSDAIGKIEYVMIGDPSHQISRIFDVLDEEQGLAQRGTFIIDPDGIVQAMEINADGIGRDASALIDKIRAAQYVRTHPGEVCPAKWKESGETLKPSFDLVGKI

SEQ ID NO: 20997 - protein, 187 aa, Lactococcus lactis subsp. lactis
MSLVGKKIEEFSTDAYLGGKFIKVSDKDFYGKWSVLCFYPADFSFVCPTELEDLEETYPTLKSLGVEVYSASTDTHFVHAAWHEHSDAISKITYPMLADPSQKISRAFDVLDEEAGLAQRGTFIIDPDGVIQALEITADGIGRDASQLVDKIKAAQYVRNHPGEVCPAKWKEDGASLHVGIDLVGKI

SEQ ID NO: 20998 - protein, 188 aa, Amphibacillus xylanus
MSLIGTEVQPFRAQAFQSGKDFFEVTEADLKGKWSIVVFYPADFSFVCPTELEDVQKEYAELKKLGVEVYSVSTDTHFVHKAWHENSPAVGSIEYIMIGDPSQTISRQFDVLNEETGLADRGTFIIDPDGVIQAIEINADGIGRDASTLINKVKAAQYVRENPGEVCPAKWEEGGETLKPSLDIVGKI

SEQ ID NO: 20999 - protein, 209 aa, Methanothermobacter thermautotrophicus
MPLIGDKFPEMEVQTTHGPMELPDEFEGKWFILFSHPADFTPVCTTEFVAFQEVYPELRELDCELVGLSVDQVFSHIKWIEWIAENLDTEIEFPVIADTGRVADTLGLIHPARPTNTVRAVFVVDPEGIIRAILYYPQELGRNIPEIVRMIRAFRVIDAEGVAAPANWPDNQLIGDHVIVPPASDIETARKRKDEYECYDWWLCTQSRG

SEQ ID NO: 21000 - protein, 178 aa, Clostridium pasteurianum
MERLVGKPAPEFEMKAVKGDGRGFTEVKLGDYKGKWLVMFFYPLDFTFVCPTEITGFSKRAEEFRDLKAELLAVSCDSQYSHETWINQDIKQGGLGKINFPIASDKTTEVSTKYGIQIEEEGISLRGLFIIDPEGIVRYSVVHDLNVGRSVDETLRVLKAFQTGGMCALDWHEGDDNL

SEQ ID NO: 21001 - protein, 187 aa, Escherichia coli O157:H7 EDL933
MSLINTKIKPFKNQAFKNGEFIEITEKDTEGRWSVFFFYPADFTFVCPTELGDVADHYEELQKLGVDVYAVSTDTHFTHKAWHSSSETIAKIKYAMIGDPTGALTRNFDNMREDEGLADRATFVVDPQGIIQAIEVTAEGIGRDASDLLRKIKAAQYVASHPGEVCPAKWKEGEATLAPSLDLVGKI

SEQ ID NO: 21002 - protein, 206 aa, Xylella fastidiosa Dixon
MLKLYIILSSTLSATNRKYSMSVLNTEILSFKAIAYKNGQFVEVSEAVLKGKWAVFVFYPADFTFVCPTELEDLADHYEEFQKYGVEIYSVSTDTHFSHKAWHDISPAIGKIKYAMIGDPTHEISRNFNVLRPSGLADRGTFIIDPQGVIQSVEITAEGIGRDAKELLRKVKAAIYVANHPGEVCPAKWEEGGKTLAPSLDLVGKI

SEQ ID NO: 21003 - protein, 186 aa, Xylella fastidiosa Ann-1
MSVLNTEILSFKATAYKNGQFVEVSEAVLKGKWAVFVFYPADFTFVCPTELEDLADHYEEFQKYGVEIYSVSTDTHFSHKAWHDISPAIGKIKYAMIGDPTHEISRNFNVLRPSGLADRGTFIIDPQGVIQSVEITAEGIGRDAKELLRKVKAAIYVANHPGEVCPAKWEEGGKTLAPSLDLVGKI

SEQ ID NO: 21004 - protein, 198 aa, Magnetococcus sp. MC-1
MSVLVTKQAPDFNATAVMADNSFQEISMSDYKGQYVVLFFYPLDFTFVCPSELIAFDHRLGEFEKRNVQVLGCSIDSHFSHLAWKNTEINNGGIGQVKYPLIADLNKQIARDYDVLFNDAIALRGSFLIDKEGKVRHQVVNDLPLGRNIDEMLRMIDALQFTEAHGEVCPAGWKSGDAGMQGSTEGVAKYLAANADKL

SEQ ID NO: 21005 - protein, 189 aa, Staphylococcus aureus subsp. aureus Mu50
MSLINKEILPFTAQAFDPKKDQFKEVTQEDLKGSWSVVCFYPADFSFVCPTELEDLQNQYEELQKLGVNVFSVSTDTHFVHKAWHDHSDAISKITYTMIGDPSQTITRNFDVLDEATGLAQRGTFIIDPDGVVQASEINADGIGRDASTLAHKIKAAQYVRKNPGEVCPAKWEEGAKTLQPGLDLVGKI

SEQ ID NO: 21006 - protein, 188 aa, Treponema pallidum
MESLIGKRVIDFKLPAYVGGKFTEVSNASIKGSWAVFMFYPADFTFVCPTELADLARVYPSFVEIGCKVYSVSTDSEYVHKAWADATDTIKNLPYEMISDKAGKLAGFFGVLLPDTWHALRGTFVVDPEGLVKAFEVHDMGIGRDADELLRKVQSAQFVAKHGDQVCPARWKPGAKTLKPGIDLIGKI

SEQ ID NO: 21007 - protein, 200 aa, Pseudomonas putida KT2440
MSVLVGKKAPDFTVPAVLGNGEIVDSFNLASAIKGKYGLVFFYPLDFTFVCPSELIALDNRIPDFQARNVEVIGVSIDSHFTHNAWRNTPVNNGGIGQVKYTLAADMTHEICKAYDVESEGGVAFRGAFLIDTNGVVRSQIVNDLPLGRNMDELLRLVDALQFHEEHGEVCPANWKKGDKGMNASPEGVAAYLSENAGKL

SEQ ID NO: 21008 - protein, 187 aa, Pseudomonas putida KT2440
MPIINSQVKPFNATAYHKGEFVQVSEADLKGKWSVVFFYPADFTFVCPTELGDLADNYAEFQKLGVEIYGVSTDTHFTHKAWHDTSDTIGKIEYPLIGDPTHVISRNFDVLIEEAGLADRGTFVINPEGQIKIVELNDGGVGRDAAELLRKVKAAQYVAAHPGEVCPAKWKEGEATLAPSLDLVGKI

SEQ ID NO: 21009 - protein, 186 aa, Streptococcus pyogenes M1 GAS
MSLIGKEIAEFSAQAYHDGKFITVTNEDVKGKWAVFCFYPADFSFVCPTELGDLQEQYETLKSLGVEVYSVSTDTHFVHKAWHDDSDVVGTITYPMIGDPSHLISQAFEVLGEDGLAQRGTFIVDPDGIIQMMEINADGIGRDASTLIDKIHAAQYVRKHPGEVCPAKWKEGAETLTPSLDLVGKI

SEQ ID NO: 21010 - protein, 206 aa, Xylella fastidiosa 9a5c
MLKLYIILSSTLSATNRKYSMSVLNTEILSFKATAYKNGQFVEVSEAVLKGKWAVFVFYPADFTFVCPTELEDLADHYEEFQKYGVEIYSVSTDTHFSHKAWHDISPAIGKIKYAMIGDPTHEISRNFNVLRPSGLADRGTFIIDPQGVIQSVEITAEGIGRDAKELLRKVKAAIYVANHPGEVCPAKWEEGGKTLAPSLDLVGKI

SEQ ID NO: 21011 - protein, 181 aa, Listeria innocua
MAERLVGTQAPRFEMEAVMPNQTFGKVSLEKNIEDDKWTVLFFYPMDFTFVCPTEIVAISARSDEFDALNARIIGASTDTIHSHLAWTNTPIKEGGIGKLTYPLAADTNHQVASDYGVLIEEEGVALRGLFIINPKGEIQYEVVHHNNIGREVDEVLRVLQALQTGGLCPINWQPGEKTIV

SEQ ID NO: 21012 - protein, 181 aa, Listeria monocytogenes EGD-e
MAERLVGTQAPRFEMEAVMPNQTFGKVSLEKNIEDDKWTILFFYPMDFTFVCPTEIVAISARSDEFDALNARIIGASTDTIHSHLAWTNTPIKEGGIGKLNYPLAADTNHQVASDYGVLIEEEGVALRGLFIINPKGEIQYEVVHHNNIGREVDEVLRVLQALQTGGLCPINWQPGEKTIV

SEQ ID NO: 21013 - protein, 198 aa, Corynebacterium diphtheriae
MSILTVGEKFPEFNLTALKGGDLHDVNASQPEDYFETVSLDKYEGKWKVVFFYPKDFTFVCPTEIAAFGKLDEEFQDRDTQILGGSIDNEFSHFNWRATHPELKTVPFPLFSDIKHDLIKALGVENEEGVADRATFIIDPDGIIQFVSVTPDAVGCNVDEVLRVLDALQSEEVCACNWQKNDPTKNIDKFAELEKGLN

SEQ ID NO: 21014 - protein, 203 aa, Eubacterium acidaminophilum
  unsure (1)..(203): unsure at all Xaa locations
MVSVGKKAPDFEMAGFYKGEFKTFRLSEYLGKWVVLCFYPGDFTFVXATEVSAVAEKYPEFQKLGVEVLSVSVDSVFVHKMWNDNELSKMVEGGIPFPMLSDGGGNVGTLYGVYDPEAGVENRGRFLIDPDGIIQGYEVLILPVGRNVSETLRQIQAFQLVRETKGAEVAPSGWKPGKKTLKPGPGLVGNVYKEWSVKEAFED

SEQ ID NO: 21015 - protein, 189 aa, Staphylococcus epidermidis ATCC 12228
MSLINKEILPFTAQAYDPKKDEFKEVTQEDFKGSWNVVCFYPADFSFVCPTELEDLQNQYAKLQELGVNVYSVSTDTHFVHKAWHDHSDAISKLEYSMIGDPSQTITRNFDVLDEESGLAQRGTFIIDPDGVVQAAEINADGIGRDASTLVNKIKAAQYVRQHPGEVCPAKWEEGSESLQPGLDLVGKI

SEQ ID NO: 21016 - protein, 195 aa, Mycobacterium avium
MPLLTIGDQFPAYELTALIAGDLSKVDAKQPGDYFTTITSEDHAGKWRVVFFWPKDFTFVCPTEIATFGKLNDEFEDRDAQVLGVSIDSEFVHFNWRAQHEDLKNLPFPMLSDIKRELSLATGVLNADGVADRATFIVDPNNEIQFVSVTAGSVGRNVEEVLRVLDALQSDELCACNWRKGDPTLNATELLKASA

SEQ ID NO: 21017 - protein, 195 aa, Mycobacterium leprae
MSLLSIGQQFPAYQLTALIGGDLSKVDAQQPGDYFTTVSSDSHPGKWRVVFFWPKDFTFICPTEIAAFGKLNEEFEGRGAQILGVSIDSEFVHFQWRAQHEDLKRLPFPMLSDIKRELSAASGALNADGVADRVTFIVDPDNDIQFVSVTAGSVGRNVEEVLRVLDALQSDQLCACNWRKGDPTLNATELLKTSA

SEQ ID NO: 21018 - protein, 195 aa, Mycobacterium avium subsp. paratuberculosis
MPLLTIGDQFPAYELDRVIAGDLSKVDAKQPGDYFTTVTSEDHAGKWRVVFFWPKDFTFVCPTEIATFGKLNDEFEDRDAQVLGVSIDSEFVHFNWRAQHEDLKNLPFPMLSDIKRELSLATGVLNADGVADRATFIVDPNNEIQFVSVTAGSVGRNVEEVLRVLDALQSDELCACNWRKGDPTLNATELLKASA

SEQ ID NO: 21019 - protein, 195 aa, Mycobacterium smegmatis
MALLTIGDQFPEYDLTAVVGGDLSKVDAKQPDDYFTRVTSKDYEGKWRIIFFWPKDFTFVCPTEIAAFGKLNEDFEDRDAKVLGVSVDNEFVHFQWRAQHEDLKTLPFPMVSDLKRELTAACGVLNADGVADRATFIVDPNNEVQFVSVTAGSVGRNVDEVLRVLDALQSDELCACNWKKGDPTINAGELLAGAV

SEQ ID NO: 21020 - protein, 195 aa, Mycobacterium marinum
MSLLTIGQQFPAYSLTALIGGDLSKVDAKQPGDYFKTVTSDDHAGKWRVVFFWPKDFTFVCPTEIAAFGKLNDEFEDRDAQVLGVSIDSEFVHFQWRAQHDDLKNLPFPMLADIKRDVVAATGVLNADGVADRVTFIVDPNNEIQFVSATAGSVGRNVDEVLRVLDALQSDELCACNWRKGDPTLDAGELLKASA

SEQ ID NO: 21021 - protein, 239 aa, Anopheles gambiae str. PEST
CSAFKMSFLVRQLAQACTRVGTSAAARGCLQRSALLHTGRTLSVAQVQQPAPSFQGTAVVNSDFREIKLADYRGKYLVLFFYPLDFTFVCPTEIIAFSDRINEFRELNTEVVGVSVDSHFSHLAWINTPRKAGGLGKLEYPLLADLTKRISADYGVLLPDGISLRGLFIIDPAGVVRQITINDLPVGRSVDETLRLIKAFQFVEKHGEVCPANWEPKSNAATIKPNPKDSREYFEKHGK

SEQ ID NO: 21022 - protein, 264 aa, Anopheles gambiae str. PEST
SKALLSMRNFDAAIMPGIVACCLLLFSFAIIVQEGDGAVADEPGSCHSFGGGHVYPQEAPRFVDHKLQYTKAVISRPAPAFEATAVVDGAFKKIKLSDYRGKYLVFFFYPLDFTFVCPTEILAFSDRVNEFKKLNAEVIAASIDSHFTHLAWINTPRKEGGLGKINIPLVSDITHSISKDYGVFLDDLGHTLRGLFIIDDRGVLRQITMNDLPVGRSVDETLRLVQAFQYTDKHGEVCPAGWKPGQDTIVPNPEEKIKYFEKNH

SEQ ID NO: 21023 - protein, 250 aa, Anopheles gambiae str. PEST
PNRTQATLLRSVNFAVRVCDCVRVCLCVSLVLPAFCVILSQIFPALYVRVISLQMPVPELQKPAPAFSGTAVVNGEFKEIRLSDYLGKYVVLFFYPLDFTFVCPTEIVAFSDRADEFHEKKCQVIACSTDSHFTHLAWINTPRKQGGLGELKIPLLADKSMKIARDYGVLQEESGVPFRGLFIIDDKGNLRQVTVNDLPVGRSVDETLRLVEAFRYTDEFGEVCPANWKPGSKTMVADPHKSKDYFNAVN

SEQ ID NO: 21024 - protein, 218 aa, Agrobacterium tumefaciens str. C58 (Cereon)
MSLRINDIAPDFTAETTQGPVRFHDWIGDGWAVLFSHPKNFTPVCTTELGAMGGLQPEFEKRGVKIIGISVDPVESHEKWKADIRTATGFNVDYPLIGDKDLKVAKLYDMLPAGAGDSSEGRTPADNATVRSVFVIGPDKKIKLVLTYPMTTGRNFDEILRAIDSIQLTSKHQVATPANWKQGEDVIITAAVSNEDAIARFGSYDTVLPYLRKTKQPG

SEQ ID NO: 21025 - protein, 186 aa, Xylella fastidiosa Temecula1
MSVLNTEILSFKATAYKNGQFVEVSEAVFKGKWAVFVFYPADFTFVCPTELEDLADHYEEFQKYGVEIYSVSTDTHFSHKAWHDISPAIGKIKYAMIGDPTHEISRNFNVLRPSGLADRGTFIIDPQGVIQSVEITAEGIGRDAKELLRKVKAAIYVANHPGEVCPAKWEEGGKTLAPSLDLVGKI

SEQ ID NO: 21026 - protein, 201 aa, Giardia lamblia ATCC 50803
MPVPIPGTPCPDFEVDVVTPELKFAKRKLSDYKGKYLIVFFYPLDFTFVCPSEIIHFSNLAEQLKKKCNAEIIIGSTDSVYSHYAWCLQGQNEGGIGTCKCDLFADTNHKMARDFGVLVEDAGIALRGMFIVSDKGVVRHVTINDLPVGRSVEEAMRLVQAFQYADKTGGDIPCGWTPEKNDTIIPDPEKKKEYFSKTFKE

SEQ ID NO: 21027 - protein, 201 aa, Giardia lamblia ATCC 50803
MPVPIPGTPCPDFEVDVVTPELKFAKRKLSDYKGKYLIVFFYPLDFTFVCPSEIIHFSNLAEQLKKKCNAEIIIGSTDSVYSHYAWCLQGQNEGGIGTCKCDLFADTNHKMARDFGVLVEDAGIALRGMFIVSDKGVVRHVTINDLPVGRSVEEAMRLVQAFQYADKTGGVIPCGWTPEKNDTIIPDPEKKKEYFSKTFKK

SEQ ID NO: 21028 - protein, 246 aa, Giardia lamblia ATCC 50803
MLLLICLISVAFAAACTLTVNKNTCIPDKCEKFGDTEVCMQLKTTSSVPIPGTPCPDFEVEVLTPELKFTKRKLADYKGKYLIIFFYPADFTFVCPSEIIHFSSMAEQLKKKYNTEIIIGSTDTVYSHHAWCLQNKTDGGIGPCKCDLFADTNHKMARDFGILVEEMGLALRAMFIVSDKGIVRHVTINDFPVGRSVEEAMRMIQAFQYADKTGGVIPCGWTPEKNDFIIPDPEKKKEYFSKTFTK

SEQ ID NO: 21029 - protein, 189 aa, Pyrococcus furiosus DSM 3638
MIRVGEVVPDFEADAYFPEKDEIGKLRISDYRGKWVVLAFYPADFTFVCPTELEELAEYYEEFKKEGAEIISVSTDTAYVHKAWHDTSPAIKKVRFPMLADPAGKICRLFGTYIEDEGISWRATFIIDPDGKVVHMEMHDNSIGRSAKEILRRLRAAKFVRENPGVVCPASWEPGKEALKVSLDLVGKI

SEQ ID NO: 21030 - protein, 226 aa, Methanothermobacter thermautotrophicus str. Delta H
MGEKVYELRKIKKKGRGMPLIGDKFPEMEVQTTHGPMELPDEFEGKWFILFSHPADFTPVCTTEFVAFQEVYPELRELDCELVGLSVDQVFSHIKWIEWIAENLDTEIEFPVIADTGRVADTLGLIHPARPTNTVRAVFVVDPEGIIRAILYYPQELGRNIPEIVRMIRAFRVIDAEGVAAPANWPDNQLIGDHVIVPPASDIETARKRKDEYECYDWWLCTQSRG

SEQ ID NO: 21031 - protein, 213 aa, Magnetospirillum magnetotacticum
MMEPLIMSDAIQNPTSLVTKAAPDFTAPAVMPDNEINPAFNLKSYLAGSYGIVFFYPLDFTFVCPSEILAHDHRVKAFAERNTKVIAVSVDSHFTHLAWKNTPVDKGGLGNVQFPMVADLTKDIAKSYGVLLPGGVALRGTFVIDKNGVVQSAHVNNLPLGRNVDEALRLIDALQFHEEHGEVCPAGWNKGKAGMKANPNGVAEYLAKHASEL

SEQ ID NO: 21032 - protein, 248 aa, Magnetospirillum magnetotacticum
MSSMKRVPTCSAWACICSISQGHWTASANTGEVLHIRGDGQLSAQLQPGHQDGLEIGTRGIDGGGAASRTGTQNQNLGVVMRHRDASRNLLILLRHSIRRGRTSSRRSILKSYLDGSYGIVFFYPLYFNFVCPSEILAHDHRVKAFAERNTNVIAVSVDSHFTHLAWKNTPVDKGGLGNVQFPMVADLTKDIAKSYGVLLPGGVALRGTFVIDKNGVVQSAHVNNLPLGRNVDEALRLIDALQFHEEH

SEQ ID NO: 21033 - protein, 193 aa, Leptospira interrogans serovar lai str. 56601
MPQVTSLAPDFKAEAVLGKEIKEIKLSDYKGKWVVLFFYPLDFTFVCPTEIIEYDNKLAEFKKLGTEVLGVSVDSAFTHLAWKNTPKKEGGIGEIKYPLIADLTKSISRDYNVLTEGGVALRGTFIIDPAGVIRQATINDLPVGRNIDEAIRLIKAFQFVEKHGEVCPANWDEGKKTMKADPEKSKDYFAAVN

SEQ ID NO: 21034 - protein, 188 aa, Fusobacterium nucleatum subsp. nucleatum ATCC 25586
MSLIGRKVPEFKATAFKKGEKDFVTVTDKDLLGKWSVFVFYPADFTFVCPTELEDLQDNYEAFKKEGAEVYSVSCDTAFVHKAWADHSERIKKVTYPMVADPTGFLARAFEVMIEEEGLALRGSFVINPEGKIVAYEVHDNGIGREAKELLRKLQGAKFVAEHGEVCPAKWQPGSETLKPSLDLIGEL

SEQ ID NO: 21035 - protein, 187 aa, Xanthomonas campestris pv. campestris str. ATCC 33913
MSLINTQVQPFKANAYHNGNFIEVTEASLKGKWSVLIFMPAAFTFNCPTEVEDAADNYAAFQKAGAEVYIVTTDTHFSHKVWHETSPAVGKAQFPLIGDPAHKLTRAFGVHIEEEGLALRGTFIINPEGVIKTLEIHDNSIARDVTETLRKLTAAQFVANNPGQVCPAKWKEGAKTLAPSLDLVGKI

SEQ ID NO: 21036 - protein, 187 aa, Xanthomonas axonopodis pv. citri str. 306
MSLINTQVQPFKANAYHNGNFIEVTEASLKGKWSVLIFMPAAFTFNCPTEVEDAADNYAAFQKAGAEVYIVTTDTHFSHKVWHETSPAVGKAQFPLIGDPTHKLTRAFGVHIEEEGLALRGTFIINPEGVIKTLEIHDNSIARDVTETLRKLTAAQFVANNPGQVCPAKWKEGAKTLAPSLDLVGKI

SEQ ID NO: 21037 - protein, 187 aa, Caulobacter crescentus CB15
MSLINTEIKPFTAQAYKDGKFVTVSEADVKGKWSVFFFYPADFTFVCPTELEDLADNYDVFTRLGVEIYAVSTDTHFSHKAWHDSSPAIGKIKYTMVGDPSGQVTNNFEIMRPGVGLADRGTFLVDPQGVIQFMEVTAEGIGRNAIELLRKIKAAQYVAAHPGEVCPAKWEEGEKTLAPSLDLVGKI

SEQ ID NO: 21038 - protein, 187 aa, Bacillus anthracis str. A2012
MLLIGTEVKPFKANAYHNGEFIQVTDESLKGKWSVVCFYPADFTFVCPTELEDLQNQYATLKELGVEVYSVSTDTHFTHKAWHDSSETIGKIEYIMIGDPTRTITTNFNVLMEEEGLAARGTFIIDPDGVIQSMEINADGIGRDASILVNKIKAAQYVRNNPGEVCPAKWQEGSATLKPSLDLVGKI

SEQ ID NO: 21039 - protein, 198 aa, Campylobacter jejuni subsp. jejuni NCTC 11168
MIVTKKALDFTAPAVLGNNEIVQDFNLYKNIGPKGAVVFFYPKDFTFVCPSEIIAFDKRYQEFKNRGIEVIGISGDNEFSHFAWKNTPVNQGGIGQVKFPLVADLTKQIARNFDVLYAEAVALRGSFLLDADGTVRHAVVNDLPLGRNIDEMLRMVDTMLFTNEHGEVCPAGWNKGDEGMKANPKGVAEYLGKNEAKL

SEQ ID NO: 21040 - protein, 195 aa, Chlorobium tepidum TLS
MSVLVGRPAPDFNAAAVVNGSTFVDSCQLSAYRGKYVVLFFYPLDFTFVCPTELHAFQEKLDEFKKRNVEVLGCSVDSKFSHFAWLNTPRSKGGIQGVTYPLISDINKTIAKDYDVLTPDGSVALRGLFLIDKEGIVRHQVVNDLGIGRNIDEVLRIVDALQFTEEFGEVCPANWNKGDKTMKPTDEGLKEYFAE

SEQ ID NO: 21041 - protein, 189 aa, Clostridium perfringens str. 13
MQMSLINKKVLDFKVQAYQNGEFKEVTSEDLKGHWSVFVFYPADFTFVCPTELGELADNYESFKEIGCEVYSISTDTHFVHKAWADASDTIGKIKYPMLADPTGKLARDFEVMIEEEGLALRGSFVINPEGEIKAYEIHDNGIGRNAEELLRKVQAAQFVAEHGDQVCPAKWKPGEETLAPSLDLIGKL

SEQ ID NO: 21042 - protein, 197 aa, Thermosynechococcus elongatus BP-1
MSECLRVGQPAPDFEAVAVYDQEFKTIKLSDYRGKYVVLFFYPLDFTFVCPTEIVAFSDRYDEFAKLNTEILGVSVDSQFSHLAWTQTDRKAGGVGDLKYPLVSDLKKDISTAYNVLTEEGVALRGLFIIDKEGIIQHATINNLAFGRSVDETLRVLQAIQYVQTHPDEVCPAGWHPGDKTMNPDPVKSKVYFEAVG

SEQ ID NO: 21043 - protein, 198 aa, Buchnera aphidicola str. Sg (Schizaphis graminum)
MTLVTQKAPNFIAPAILKNGKIMNNFDLKKYSNGQITVLFFWPMDFTFVCPSEIIEFNKTFEAFEKRNVKIVGVSIDSVFVHQAWQNTFPENGGIGKIKFPMVSDIKHEIQKSYHIEHPELNIALRASFLIDENWIIRHQVVNDLPFGRNIDEMIRMIDALNFHNKYGEVCPVNWKHGQEGMKASQEGVSSYLKKYFS

SEQ ID NO: 21044 - protein, 156 aa, Thermobifida fusca
MPIEVGQNAPDFELADQHGQTVRLSDFRGRSRVAVVFYPLAFSGICDKELRQLHECMSEFTARSVQPLAISVDSMFAHRVWADREGVDFPLLSDFWPHGAVAQRYGVFDETKGVALRGSFLIDTEGVVRWKVVNPTFQGRDMDDYRQAFADLGWNP

SEQ ID NO: 21045 - protein, 187 aa, Clostridium thermocellum ATCC 27405
MSLIGTEVKPFTAEAYHNGKFITVTEQDFKGKWSIVVFYPADFTFVCPTELEDLQNNYEKFKALGAEVYSVSTDTHYTHKAWHDTSEAIKKITYVMIGDPSHTLSRNFDVLNEATGLADRGTFIIDPDGVIQYVEVSAENVGRNAEALIDKIKAAQYVRNHPGEVCPAKWKEGGATLKPSIDLVGKI

SEQ ID NO: 21046 - protein, 189 aa, Leuconostoc mesenteroides subsp. mesenteroides ATCC 8293
MVTNFIDSEITDFKVNAYHDGDFTEVTKQDTLGKWGVYFFYPADFSFVCPTELGDLADHYADFQNINAEIYSVSEDSEFVHKAWAEATDTIAKVKYPMLADPAGKLARFFNVLDEDAGLAFRATFIVDPEGKIQSYTINNMGIGRNAEEILRTLEAAQFVAEHGDRVCPANWHPGEDTIAPSLDLVGKI

SEQ ID NO: 21047 - protein, 200 aa, Microbulbifer degradans 2-40
MGVLVGKQAPDFTAPAVLGSGEIVDSYNFAEATKGKKAVVFFYPLDFTFVCPSELLAFDHRIAEFEKRGVEVIGVSIDSHFSHNAWRNTPVNEGGIGPVKYTLVADMTHAICKAYDVESEGGVAFRGSFLIDEDGLVRHQVVNDLPLGRNVDEMLRMVDALAFHQEHGEVCPAGWKDGDKGMTASPEGVAAYLSENASNL

SEQ ID NO: 21048 - protein, 188 aa, Microbulbifer degradans 2-40
MQTIINTKILPFKATAFSKGDFIPVSEQDLLGKWSVVMFYPADFTFVCPTELGDMADHYAQLQEMGVEVYSVSTDTHFTHKAWHDSSDTIGKINFPMIGDPTGTISRNFGVMIEEDGLALRGTFVINPEGEIKVAEIHDLGIGRSAKELVRKIQAAQYVAEHDGEVCPAAWQPGEATLAPSLDLVGKI

SEQ ID NO: 21049 - protein, 199 aa, Trichodesmium erythraeum IMS101
MTDECLRVGQKAPDFTATAVVDQEFETIKLSDYRGKYVVLFFYPLDFTFVCPTEITAFSDRYKEFELLNTEILGVSVDSEFSHLAWIQTDRKSGGIGDLNYPLLSDIKKEISTAYNVLDLEAGIALRGLFIIDREGIIQHATVNNFAFGRNVDEAIRTLQAIQYVQIHPNEVCPVGWKPGDKTMNSDPIKSKEFFAAVS

SEQ ID NO: 21050 - protein, 184 aa, Brucella suis 1330
MLGIGDKLPSFKVTGVKPGFNHHEENGVSAFEEVTEQSFPGKWKVIFFYPKDFTFVCPTEIAEFARLASEFEDRDAVVLGGSTDNEFVKLAWRRDHKDLNKLPIWSFADTNGSLVDGLGVRSPDGVAYRYTFVVDPDNVIQHVYATNLNVGRAPKDTLRVLDALQTDELCPCNREVGGETLKAA

SEQ ID NO: 21051 - protein, 188 aa, Bifidobacterium longum DJO10A
MMTLLQHELTDFKVNAFQNNEFHEVTKDDVLGHWSLFFFYPADFTFVCPTELEDLAKNYAKFKEIGCEIYSVSCDTHFVHKAWHDANEKIAKIEYPMLADPTALLAKDLDTYNEADGMAERGDFIVSPEGKVVAYEVISSNVGRNAEELLRRVQASQFVYEHGDQVCPANWTPGEETIEPSLDLVGQL

SEQ ID NO: 21052 - protein, 200 aa, Haemophilus somnus 129PT
MVLVTRQAPDFTAAAVLGNGEIVEKFNLKQHIAGKAAVVFFYPMDFTFVCPSELIAFDHRYKEFQDRNVEIIGVSIDSEFTHNAWRNTPVDNGGIGQVQYALVADIKHEIAKAYGIEHPEAGVALRASFLIDKEGVVRHQVVNDLPLGRNIDEMLRMVDALQFHEEHGEVCPAQWEKGKEGMTGSPEGVAKYLKQNADKL

SEQ ID NO: 21053 - protein, 187 aa, Pseudomonas syringae pv. syringae B728a
MPIINSQVKPFKATAFKNGAFVDVSDADFKGKWSVVFFYPADFTFVCPTELEDLADNYEEFKKLGVEIYSVSTDTHFAHAAWHNTSPAIGKIQYTMIGDPTLTISRNFDVLIEEAGLADRGTFVINPEGQIKIVELNDGGVGRDASELLRKIKAAQYVAAHPGEVCPAKWKEGEATLAPSLDLVGKI

SEQ ID NO: 21054 - protein, 200 aa, Pseudomonas fluorescens PfO-1
MSVLVGKQAPDFTVPAVLGNGEIVDSFTLSSAIKGKYGLVFFYPLDFTFVCPSELIALDNRMADFKARNVEVVAVSIDSHFTHNAWRNTPVNNGGIGQVKYTMAADMKHEIAKAYDVESEGGVAFRGAFLIDDKGVVRSQIINDLPLGRNMEELIRLVDALQFHEEHGEVCPANWKKGDKGMNASPEGVAAYLTENAAAL

SEQ ID NO: 21055 - protein, 253 aa, Pseudomonas fluorescens PfO-1
MLKRAPFTGWPGLRINRCRRRYRFLLLIPSANSENKSAASGLPMSHPSSDWVGFTHRIHNPDGESSMPIINSQVKPFKATAFKNGDFVQVSDADLKGKWSVVFFYPADFTFVCPTELEDLADNYAAFQKLGVEIYSVSTDTHFAHAAWHNTSPAIGKIQYTMIGDPTQVISRNFDVLIEEAGLADRGTFVINPEGQIKIVELNDGGVGRDASELLRKIKAAQYVAAHPGEVCPAKWKEGEATLAPSLDLVGKI

SEQ ID NO: 21056 - protein, 187 aa, Bifidobacterium longum NCC2705
MTLLQHELTDFKVNAFQNNEFHEVTKDDVLGHWSLFFFYPADFTFVCPTELEDLAENYAKFKEIGCEIYSVSCDTHFVHKAWHDANEKIAKIEYPMLADPTALLAKDLDTYNEADGVAERGDFIVSPEGKVVAYEVISSNVGRNAEELLRRVQASQFVYEHGDQVCPANWTPGEETIEPSLDLVGQL

SEQ ID NO: 21057 - protein, 186 aa, Streptococcus agalactiae 2603V/R
MSLVGKEIIEFSAQAYHDGKFITVTNEDVKGKWAVFCFYPADFSFVCPTELGDLQEQYETLKSLDVEVYSVSTDTHFVHKAWHDDSDVVGTITYPMIGDPSHLISQGFDVLGQDGLAQRGTFIIDPDGVIQMMEINADGIGRDASTLIDKVRAAQYIRQHTGEVCPAKWKEGAETLTPSLDLVGKI

SEQ ID NO: 21058 - protein, 199 aa, Pseudomonas aeruginosa PAO1
MSVLVNKQAPDFTAAAVLGDGSIVDAFQLSSLRGKYVVLFFWPLDFTFVCPSEIIAHNNRMDKFRELGVEVVGVSIDSQFTHHAWRSTPVEKGGIGAVEFTMVADVKHEITRAYGIEHEDGVALRASFLIDRAGVVQHQVVNNLPLGREVDEMVRLVEALQFTEEHGEVCPAGWRKGQKGMKASAEGVASYLAENAEAL

SEQ ID NO: 21059 - protein, 200 aa, Pseudomonas aeruginosa PAO1
MSVLVGKKAPDFNVAAVLGNGEIVESFTLSEAIKGKYGLVFFYPLDFTFVCPSELIALDHRIPEFQARNVEVIGVSIDSHFTHNAWRNTPVDKGGIGAVKYTLAADTKHEIAKAYDVESDGGVAFRGAFLIDKEGVVRSQIVNDLPLGRNMDELLRLVDALQFHEEHGEVCPANWKKGDKGMTASPEGVAKYLAENASKL

SEQ ID NO: 21060 - protein, 187 aa, Pseudomonas aeruginosa PAO1
MSLINTQVQPFKVNAFHNGKFIEVTEESLKGKWSVLIFMPAAFTFNCPTEIEDAANNYGEFQKAGAEVYIVTTDTHFSHKVWHETSPAVGKAQFPLIGDPTHQLTNAFGVHIPEEGLALRGTFVINPEGVIKTVEIHSNEIARDVGETVRKLKAAQYTAAHPGEVCPAKWKEGEKTLAPSLDLVGKI

SEQ ID NO: 21061 - protein, 188 aa, Fusobacterium nucleatum subsp. vincentii ATCC 49256
MSLIGRKVPEFKATAFKKGEKDFITVTDKDLLGKWSVFVFYPADFTFVCPTELEDLQDNYEAFKKEGAEVYSVSCDTAFVHKAWADHSERIKKVTYPMVADPTGFLARAFEVMIEEEGLALRGSFVINPEGKIVAYEVHDNGIGREAKELLRKLQGAKFVAEHGEVCPAKWQPGSETLKPSLDLIGEL

SEQ ID NO: 21062 - protein, 181 aa, Helicobacter pylori
LVTKLAPDFKAPAVLGNNEVDEHFELSKNLGKNGVILFFWPKDFTFVCPTEIIAFDKRVKDFQEKGFNVIGVSIDSEQVHFAWKNTPVEKGGIGQVSFPMVADITKSISRDYDVLFEEAIALRGAFLIDKNMKVRHAVINDLPLGRNADEMLRMVDALLHFEEHGEVCPAGWRKGDKGMKA

SEQ ID NO: 21063 - protein, 181 aa, Helicobacter pylori
LVTKLAPDFKAPAVLGNNEVDEHFELSKNLGKNGVILFFWPKDFTFVCPTEIIAFDKRVKDFQEKGFNVIGVSIDSEQVHFAWKNTPVEKGGIGQVTFPMVADITKSISRDYDVLFEEAIALRGAFLIDKNMKVRHAVINDLPLGRNADEMLRMVDALLHFEEHGEVCPAGWRKGDKGMKA

SEQ ID NO: 21064 - protein, 181 aa, Helicobacter pylori
LVTKLAPDFKAPAVLGNNEVDEHFELSKNLGKNGVILFFWPKDFTFVCPTEIIAFDKRVKDFHEKGFNVIGVSIDSEQVHFAWKNTPVEKGGIGQVSFPMVADITKSISRDYDVLFEEAIALRGAFLIDKNMKVRHAVINDLPLGRNADEMLRMVDALLHFEEHGEVCPAGWRKGDKGMKA

SEQ ID NO: 21065 - protein, 181 aa, Helicobacter pylori
LVTKLAPDFKAPAVLGNNEVDEHFELSKNLGKNGVILFFWPKDFTFVCPTEIIAFDKRVKDFHEKGFNVIGVSIDSEQVHFAWKNTPVEKGGIGQVTFPMVADITKSISRDYDVLFEEAIALRGAFLIDKNMKVRHAVINDLPLGRNADEMLRMVDALLHFEEHGEVCPAGWRKGDKGMKA

SEQ ID NO: 21066 - protein, 181 aa, Helicobacter pylori
LVTKLAPDFKAPAVLGNNEVDEHFELSKNLGKNGAILFFWPKDFTFVCPTEIIAFDKRVKDFHEKGFNVIGVSIDSEQVHFAWKNTPVEKGGIGQVSFPMVADITKSISRDYDVLFEEAIALRGAFLIDKNMKVRHAVINDLPLGRNADEMLRMVDALLHFEEHGEVCPAGWRKGDKGMKA

SEQ ID NO: 21067 - protein, 181 aa, Helicobacter pylori
LVTKLAPDFKAPAVLGNNEVDEHFELSKNLGKSGAILFFWPKDFTFVCPTEIIAFDKRVKDFQEKGFNVIGVSIDSEQVHFAWKNTPVEKGGIGQVTFPMVADITKSISRDYDVLFEEAIALRGAFLIDKNMKVRHAVINDLPLGRNADEMLRMVDALLHFEEHGEVCPAGWRKGDKGMKA

SEQ ID NO: 21068 - protein, 198 aa, Helicobacter pylori
MLVTKLAPDFKAPAVLGNNEVDEHFELSKNLGKNGAILFFWPKDFTFVCPTEIIAFDKRVKDFHEKGFNVIGVSIDSEQVHFAWKNTPVEKGGIGQVSFPMVADITKSISRDYDVLFEEAIALRGSFLIDKNMKVRHAVVNDLPLGRNADEMLRMVDALLHFEEHGEVCPAGWRKGDKGMKATHQGVAEYLKENSIKL

SEQ ID NO: 21069 - protein, 181 aa, Helicobacter pylori
LVTKLAPDFKAPAVLGNNEVDEHFELSKNLGKNGAILFFWPKDFTFVCPTEIIAFDKRVKDFQEKGFNVIGVSIDSEQVHFAWKNTPVEKGGIGQVTFPMVADITKSISRDYDVLFEEAIALRGAFLIDKNMKVRHAVINDLPLGRNADEMLRMVDALLHFEEHGEVCPAGWRKGDKGMKA

SEQ ID NO: 21070 - protein, 196 aa, Helicobacter pylori
MLVTKLAPDFKAPAVLGNNEVDEHFELSKNLGKNGAILFFWPKDFTFVCPTEIIAFDKRVKDFQEKGFNVIGVSIDSEQVHFAWKNTPVEKGGIGQVTFPMVADITKSISRDYDVLFEEAIALRGAFLIDKNMKVRHAVINDLPLGRNADEMLRMVDALLHFEEHGEVCPAGWRKGDKGMKATHQGVAEYLKENSI

SEQ ID NO: 21071 - protein, 181 aa, Helicobacter pylori
LVTKLAPDFKAPAVLGNNEVDEHFELSKNLGKNGAILFFWPKDFTFVCPTEIIAFDKRVKDFHEKGFNVIGVSIDSEQVHFAWKNTPVEKGGIGQVTFPMVADITKSISRDYDVLFEEAIALRGAFLIDKNMKVRHAVINDLPLGRNADEMLRMVDALLHFEEHGEVCPAGWRKGDKGMKA

SEQ ID NO: 21072 - protein, 181 aa, Helicobacter pylori
LVTKLAPDFKAPAVLGNNEVDEHFELSKNLGKNGAILFFWPKDFTFVCPTEIIAFDKRVKDFHEKGFNVIGVSIDSEQVHFAWKNTPVEKGGIGQVSFPMVADITKSISRDYDVLFEEAIALRGAFLIDKNMKVRHTVINDLPLGRNADEMLRMVDALLHFEEHGEVCPAGWRKGDKGMKA

SEQ ID NO: 21073 - protein, 186 aa, Streptococcus mutans UA159
MSLVGKEMVEFSAQAYHQGEFVTVNNEDVKGKWAVFCFYPADFSFVCPTELGDLQEQYATLQSLGVEVYSVSTDTHFVHKAWHDDSDVVGTITYTMIGDPSHVLSQGFEVLGEDGLAQRGTFIVDPDGIIQMMEVNADGIGRDASTLIDKVRAAQYIRQHPGEVCPAKWKEGAETLKPSLDLVGKI

SEQ ID NO: 21074 - protein, 186 aa, Streptococcus agalactiae NEM316
MSLVGKEIIEFSAQAYHDGKFITVTNEDVKGKWAVFCFYPADFSFVCPTELGDLQEQYETLKSLDVEVYSVSTDTHFVHKAWHDDSDVVGTITYPMIGDPSHLISQGFDVLGQDGLAQRGTFIIDPDGVIQMMEINADGIGRDASTLIDKVRAAQYIRQHPGEVCPAKWKEGAETLTPSLDLVGKI

SEQ ID NO: 21075 - protein, 189 aa, Shewanella oneidensis MR-1
MTQSIINSTIKPFKATAYHNGEFVPVTEQDLLGKWSVVFFYPADFTFVCPTELGDMADHYAKLQGMGVEVYSVSTDTHFTHKAWHDTSDTIKKINFPMLADPTGTISRNFGVMIEEEGLALRGTFVINPEGQIKVAEIHDLGIGRSAQELVRKIQAAQYVATHDGEVCPAKWQPGDETLAPSLDLVGKI

SEQ ID NO: 21076 - protein, 200 aa, Yersinia pestis CO92
MVLVTRQAPDFTAAAVLGNGEIVENFNLKKHLNGRPAVLFFWPMDFTFVCPSELIAFDHRYEEFQKRGVEVVGVSFDSEFVHNAWRKTPVDKGGIGEVKYPMVADIKREIQKAYGIEHPDAGVALRGSFLIDKNGIVRSQIVNDLPIGRNIDEMIRTVDALQFHEEHGEVCPAQWEKGKAGMGASPDGVAKYLSENASKL

SEQ ID NO: 21077 - protein, 202 aa, Vibrio vulnificus CMCP6
MVLVGRQAPDFTAAAVLGNGEIVDNFNFAEFTKGKKAVVFFYPLDFTFVCPSELIAFDNRYEDFKAKGVEVIGVSIDSQFSHNAWRNTPVENGGIGQVKYPLIADVKHEICQAYDVEHPEAGVAFRGSFLIDEDGLVRHQVVNDLPLGRNIDEMLRMVDALNFHQKHGEVCPAQWEEGKAGMDASPQGVAAFLSEHAADLKK

SEQ ID NO: 21078 - protein, 185 aa, Vibrio vulnificus CMCP6
MINTTIKPFSATAYKDGKFVDITEQDVLGKWSVFFFYPADFTFVCPTELGDLADHYEELQSRGVEVYSVSTDTHFTHKAWHDSSDTIGKIKYFMVGDQTGNITNNFGVMRPGQGLADRATFVIDPQGVIQAVEITAEGIGRDAEDLLRKIKAAQYVAAHPGEVCPAKWKEGEQTLAPSLDLVGKI

SEQ ID NO: 21079 - protein, 152 aa, Tropheryma whipplei TW08/27
MSNQVLPKGSFAPDFELVDQNGATVVLSEVAAKKDVVLFFFPLAFSGICTDELIQVRDSLDSFKSFEVFALSVDSKFTLRAYSESQGFSFALLSDFWPHGGVAKQFGAFLEDVGVASRSTFIVGRDLKIKASFFSGIHEPRDFSEIRAALAS

SEQ ID NO: 21080 - protein, 158 aa, Oceanobacillus iheyensis HTE831
MSVEIGSKVNDFSLPNQHGENISLSDYQGKYVVLYFYPKDMTPGCTTEACDFRDNHESFKELDAVILGVSPDPEARHQKFIDKHELPFNLLSDEDHQLAEQFDVWKLKKNFGKEYYGIERSTFIIDKDGKLIKEYRKVRVKDHVSDALEYIKEINEVG

SEQ ID NO: 21081 - protein, 187 aa, Pseudomonas syringae pv. tomato str. DC3000
MPIINSQVKPFKATAFKNGSFVDVSDADFKGKWSVVFFYPADFTFVCPTELEDLADNYDTFQKLGVEIYSVSTDTHFAHAAWHNTSPAIGKIQYTMIGDPTLAISRNFDVLIEEAGLADRGTFVINPEGQIKIVELNDGGVGRDASELLRKIKAAQYVAAHPGEVCPAKWKEGEATLAPSLDLVGKI

SEQ ID NO: 21082 - protein, 203 aa, Vibrio parahaemolyticus RIMD 2210633
MVLVGRQAPDFTAAAVLGNGEIVENFNFAEFTKGKKAVVFFYPLDFTFVCPSELIAFDNRLADFQAKGVEVIGVSIDSQFSHNAWRNTAIEDGGIGQVKYPLVADVKHEICKAYDVEHPEAGVAFRGSFLIDEEGVVRHQVVNDLPLGRNIDEMLRMVDALNFHQKHGEVCPAQWEEGKAGMDASPKGVAAFLSEHAADLGKK

SEQ ID NO: 21083 - protein, 185 aa, Vibrio parahaemolyticus RIMD 2210633
MINTKIKPFAATAYKNGEFVEVTEQDVLGKWAVFFFYPADFTFVCPTELGDLADHYEELQKRGVEVYSVSTDTHFTHKAWHDSSETIGKIQYYMLGDQTGNITNNFGVMREGQGLADRATFLIDPEGTIQAMEITAEGIGRDAEDLLRKVKAAQYVAAHPGEVCPAKWKEGEETLAPSLDLVGKI

SEQ ID NO: 21084 - protein, 180 aa, Bacillus subtilis subsp. subtilis str. 168
MAERMVGKQAPRFEMEAVLASKEFGKVSLEENMKNDKWTVLFFYPMDFTFVCPTEITAMSDRYDEFEDLDAEVIGVSTDTIHTHLAWINTDRKENGLGQLKYPLAADTNHEVSREYGVLIEEEGVALRGLFIINPEGELQYQTVFHNNIGRDVDETLRVLQALQTGGLCPANWKPGQKTL

SEQ ID NO: 21085 - protein, 187 aa, Bacillus subtilis subsp. subtilis str. 168
MSLIGKEVLPFEAKAFKNGEFIDVTNEDLKGQWSVFCFYPADFSFVCPTELEDLQEQYAALKELGVEVYSVSTDTHFVHKGWHDSSEKISKITYAMIGDPSQTISRNFDVLDEETGLADRGTFIIDPDGVIQTVEINAGGIGRDASNLVNKVKAAQYVRQNPGEVCPAKWEEGGETLTPSLDLVGKI

SEQ ID NO: 21086 - protein, 211 aa, Aquifex aeolicus VF5
MDVKEIAKKIITDCPVRVGQKVPNFEMETYDPSTGKFGKVVLEDLLKERKWVILFFYPADYTFVCPTELADLAEKYDELKEMGCEVISVSTDTKFVHLAWHRDEPLLKNVKYPMGADPTGQVSRLFGVYDENTGLALRGTFIINPEGVLVGSEVNFYNVGRNADELVRKMKANVYLMSHPEEACPAKWEPGKKTLKPSEELVGRVGEVLNE

SEQ ID NO: 21087 - protein, 184 aa, Bradyrhizobium japonicum USDA 110
MLGIGSQLPPFDITGVKPGFQAQEEEGQSAFETLTEMSFPEKWKIIFFYPKDFTFVCPTEIAEFARLSKEFADRDAVVLGGSTDNEFCKLAWRRSHVDLHNLPIWQFADTKGTLVDGLGVRSPEGVAYRYTFIVDPQNTIQHVYATNLSVGRSPKDTLRVLDALQTDELCPCNREIGGETLKVA

SEQ ID NO: 21088 - protein, 184 aa, Brucella melitensis 16M
MLGIGDKLPPFKVTGVKPGFNHHEENGVSAFEEVTEQSFPGKWKVIFFYPKDFTFVCPTEIAEFARLASEFEDRDAVVLGGSTDNEFVKLAWRRDHKDLNKLPIWSFADTNGSLVDGLGVRSPDGGAYRYTFVVDPDNVIQHVYATNLNVGRAPKDTLRVLDALQTDELCPCNREVGGETLKAA

SEQ ID NO: 21089 - protein, 199 aa, Buchnera aphidicola str. Bp (Baizongia pistaciae)
MVLVTYPAPDFTASAISCNGDIINNFNFKEFTNNQTSILFFWPMDFTFVCPSEIIAFNQELSKFKKRNVKLIGVSIDSVYVHHAWRNTLSHNGQIDKINFTMVSDLKREIQRSYGIEHPQLGVALRATFLIDKNRIIRHQTINDLPFGRNISETLRMIDALHFYEKYGEVCPANWKKGDTGIKTTQEGIHKYLEKISKK

SEQ ID NO: 21090 - protein, 187 aa, Enterococcus faecalis V583
MNLINQKLFDFECDAYHDGEFTRVSTEDILGKWSIFFFYPADFSFVCPTELGDMQEHYAHLQELNCEVYSVSEDSHYVHKAWADATETIGKIKYPMLADPNGQLARFFGVLDEASGMAYRASFIVSPEGDIKSYEINDMGIGRNAEELVRKLEASQFVAEHGDKVCPANWQPGEETIAPSLDLVGKI

SEQ ID NO: 21091 - protein, 188 aa, Bacteroides thetaiotaomicron VPI-5482
MEPILNSQLPEFSVQAFQNGAFKTVTNNDLKGKWAILFFYPADFTFVCPTELVDMADKYAQFQEMGVEIYSVSTDSHFVHKAWHDASESIRKIKYPMLADPTGALSRALGVYIEEEGMAYRGTFVVNPEGKIKVVELNDNNIGRDASELLRKVEAAQFVATHDGEVCPAKWKKGESTLKPSIDLVGKI

SEQ ID NO: 21092 - protein, 187 aa, Bacillus cereus ATCC 14579
MLLIGTEVKPFKANAYHNGEFIQVTDESLKGKWSVVCFYPADFTFVCPTELEDLQNQYATLKDLGVEVYSVSTDTHFTHKAWHDSSETIGKIEYIMIGDPTRTITTNFNVLMEEEGLAARGTFIIDPDGVIQSMEINADGIGRDASILVNKIKAAQYVRNNPGEVCPAKWQEGSATLKPSLDLVGKI

SEQ ID NO: 21093 - protein, 200 aa, Coxiella burnetii RSA 493
MAVLVGREAPDFTVPAVLANGDIVENFNLAEAIQNKYGLVFFYPLDFTFVCPSELIALDKAIADFQKRRVEVIGVSIDSQFTHNAWRNTPVEKGGIGPVRYPLASDVTHSICRSYGVEHVAGVALRGAFLIDKQGIVRSQIVNDLPLGRSIPELLRLVDALQFTEEHGEVCPANWKKGDPAMQASPDGVAKYLAENADNL

SEQ ID NO: 21094 - protein, 179 aa, Coxiella burnetii RSA 493
MIKIGEQFPSFSLKAVISNDVNKAFTEINEKSYANKWLVLFFWPKDFTFVCPTEIAEFGRLNGEFADRDAQVLGASVDSEFVHLAWRREKEELSQLPFPMLSDIRRDLSQRLGILNEKEGVAERATFIVDPNHIVRFVMVNDLNVGRNPQEVLRVLDALQTDELCPCNWQQGEETIVVA

SEQ ID NO: 21095 - protein, 184 aa, Streptomyces avermitilis MA-4680
MLTVGDKFPEFDLTACVSLEKGNEFQQINHKTYEGQWKVIFAWPKDFTFVCPTEIAAFGKLNDEFADRDAQVLGFSGDSEFVHHAWRKDHDDLRDLPFPMMADSKHELMRDLGIEGEDGFAKRAVFIVDQNNEIQFSMVTAGSVGRNPKEVLRVLDALQTDELCPCNWTKGETTLDPVALLAGE

SEQ ID NO: 21096 - protein, 152 aa, Streptomyces avermitilis MA-4680
MAIQVGDKAPDFELKDNHGATVRLSDFRGEKNVVLLFYPFAFTGVCTGELCALRDELPKFVNDDVQLLAVSNDSIHTLRVFAEQEGLEYPLLSDFWPHGNTSRAYGVFDEDKGCAVRGTFIIDKEGVVRWTVVNGLPDARDLNEYVKALDTL

SEQ ID NO: 21097 - protein, 196 aa, Chlamydophila caviae GPIC
MESLFIGKAAPDFSVQAVVNGEVKNVSLKDYRGKYVILFFYPKDFTYVCPTELHAFQDSLEEFENRGAQIIGCSVDDLDTHKRWLNTDKKAGGVKGITYPLVSDTTHELSKLYGVLDSLSGLSFRGSFLIDKEGIIRHLVINDLPLGRSIDEELRVLDALIFYENHGLVCPANWQQGQKAMAPNEEGLKEYFGTID

SEQ ID NO: 21098 - protein, 174 aa, Thermoplasma acidophilum
MSLVNKAAPDFEANAFVNGQIKKVRLSSYRGKWVVLFFYPADFTFVCPTEVEGFAEDYEKFKKKNTEVISVSADTVYVHQAWVQHDERVAKAKFPMVEDRKGTIARAYDVYNEETGNAQRGLFIINPDGIVKYVVITDDNVGRSTDETLRVLEALQSGGLCPVNWHEGEPTIKV

SEQ ID NO: 21099 - protein, 187 aa, Thermus aquaticus
MSLVGKKVQPFRAQAYHNGEFIEVTEQDFMGKWSIVCFYPADFTFVCPTELEDLQDHYATFKELGVEVYSVSTDTHYTHKAWHDTSPAISKIEYVMIGDPSHQLSRMFDVLDEEQGLAQRGTFIIDPDGVIQAVEINADGIGRNASTLIDKIKAAQYVRNHPGEVCPAKWKEGAETLKPSLDLVGKI

SEQ ID NO: 21100 - protein, 199 aa, Porphyra purpurea
MISGHNCLQVGQIAPDFSATAVYDQEFKTIKLSDFKNKYVILFFYPLDFTFVCPTEITAFSDKYSDFSELNTEILGVSVDSEYSHLAWLQTDRESGGLGDLEYPLVSDLKKEISIAYNVLNSGGVALRGLFIIDPKGIIQYSTVNNLEFGRSVEETLRVLQAIQYVQAHPDEVCPANWKPGDRTMNPDPIKSKNYFAAA

SEQ ID NO: 21101 - protein, 164 aa, Heliobacillus mobilis
MIQTFPRRFNSMAELIAGQIAPDFTLPASNGEEVSLSQFRGSYVVLYFYPKDNTAGCTTEAQEFRDLHGQFLDKNTVVLGVSRDSVTSHGKFITKQELPFLLLSDGDSTLCNLYQVLKEKNMYGKKSIGIERSTFIIDPDGVITHIFRKVKAAGHAAKVLDSIG

SEQ ID NO: 21102 - protein, 160 aa, Mycoplasma penetrans
MLIGRKYINFFSKAYSGKTDSILNYDLTKNMGKNGTLLFFIHQDFYPTSTSEIIELNQKHQNFVNLGVNPIVISVDSELTHQQLVKNLKDKKTINNMSLDFVSDISKEISRDYLVLFEEGYSLPSTIFIDKKGIIKYFSTGSVEVKRDIDSILKTIATYQ

SEQ ID NO: 21103 - protein, 201 aa, Geobacter metallireducens
MCMCTLVTKEAPDFAADAVLPDNTFATIKLSSFRGKYVILFFYPLDFTFVCPSEILAFNKKLDQFKAKNCEVIGVSVDSKFTHLAWKNTKVEDGGIGNIQYPLVSDLKKEIATQFGVLFENGGVALRGLFLIDTKGIVRHAVINDLPLGRSVDEALRMLDALQFVETHGDQVCPANWREGDEAMKPTAAGVADYLAKHAAG

SEQ ID NO: 21104 - protein, 223 aa, Geobacter metallireducens
MNRITALLAAILATSLFAGPACAAPEKADDMTKATELMVQHHKGMVRTAPEMAKVGEPAPPFTLDAVVDKEFKKVSLGDYRGKWVVLFFYPADFTFVCPTEITGFNKAMDRFTELNAQLLGASVDSKYSHLAWIKRGDLGDLKYPLLADNKKEATARYGILDEKEGVALRGLFIIDPNGVLQYQVVNNLSVGRSVDETLRVLEALQTGELCPLGWKPGEKTIK

SEQ ID NO: 21105 - protein, 204 aa, Odontella sinensis
MTNFPKIGKTPPNFLTIGVYKKRLGKIRLSDYRGKKYVILFFYPANFTAISPTELMLLSDRISEFRKLSTQILAISVDSPFSHLQYLLCNREEGGLEDLNYPLVSDLTQTITRDYQVLTDEGLAFPGLFIIDKEGIIQYYTVNNLLCGRNINELLRILESIQYVKENPGYACPVNWNFGDQVFYSHPLKSKIYFKDLYSPKKSS

SEQ ID NO: 21106 - protein, 212 aa, Pseudomonas putida
MSLKLGDIAPDFEQDSSEGKIRFHEWLGNSWGVLFSHPADFTPVCTTELGLTAKLKDDFAKRGVKPIALSVDPVDSHHRWIEDINETQNTVVNFPIIADADRKVSELYDLIHPNANDTLTVRSLFVIDPNKKVRLTITYPASTGRNFNEILRVIDSLQLTDNHKVATPGNWQDGDDVVIVPSLKDEEEIKQRFPKGYRAVKPYLRLTPQLNR

SEQ ID NO: 21107 - protein, 212 aa, Pseudomonas putida
MSLKLGDIAPDFEQDSSEGKIRFHEWLGNSWGVLFSHPADFTPVCTTELGLTAKLKDDFAKRGVKAIALSVDPVDSHHRWIDDINETQNTVVNFPIIADADRKVSDLYDLIHPNASDTLTVRSLFVIDPNKKVRLTITYPASTGRNFNEILRVIDSLQLTDNHKVATPGNWQDGDDVVIVPSLKDEEEIRQRFPKGYRAVKPYLRLTPQPNR

SEQ ID NO: 21108 - protein, 187 aa, Ralstonia solanacearum
MSLINTQVQPFKAQAFHNGKFVEVTEQNLKGKWSVLIFMPAAFTFNCPTEVEDAADNYAEFQKAGAEVYIVTTDTHFSHKVWHETSPAVGKAQFPLVGDPTHVLTNAFGVHIPEEGLALRGTFVINPEGVVKTSEVHDNAIARDVKETLRKLKAAQYVASNPGQVCPAKWNEGAKTLKPSLDLVGKI

SEQ ID NO: 21109 - protein, 230 aa, Ralstonia solanacearum
MRPGTTDAWPIAAHSPIVAGRVRPPLACLAGALLVCRTPSAAPPQEKPMKTIGDKLEPFKVIGVKPGFNRHEENGQSAFEDITEASFPGKWKVIYFYPKDFTFVCPTEIVAFARLNQDFEDRDTVVLGGSTDNEFVKLAWRREHKDLDRLKQWSFADTTGALIDQLGVREHEAGVALRATFIVDPDNVIQHVSVNNLNVGRNPDEVLRILDALQTDELCPCNRAVGGATL

SEQ ID NO: 21110 - protein, 199 aa, Chlamydomonas reinhardtii
RASHAEKPLVGSVAPDFKAQAVFDQEFQEITLSKYRGKYVVLFFYPLDFTFVCPTEITAFSDRYKEFKDINTEVLGVSVDSQFTHLAWIQTDRKEGGLGDLAYPLVADLKKEISKAYGVLTEDGISLRGLFIIDKEGVVQHATINNLAFGRSVDETKRVLQAIQYVQSNPDEVCPAGWKPGDKTMKPDPKGSKEYFSAV

SEQ ID NO: 21111 - protein, 235 aa, Chlamydomonas reinhardtii
MAALQSASRSSAVAFSRQARVAPRVAASVARRSLVVRASHAEKPLVGSVAPDFKAQAVFDQEFQEITLSKYRGKYVVLFFYPLDFTFVCPTEITAFSDRYKEFKDINTEVLGVSVDSQFTHLAWIQTDRKEGGLGDLAYPLVADLKKEISKAYGVLTEDGISLRGLFIIDKEGVVQHATINNLAFGRSVDETKRVLQAIQYVQSNPDEVCPAGWKPGDKTMKPDPKGSKEYFSAV

SEQ ID NO: 21112 - protein, 199 aa, Globodera rostochiensis
MSSNSKAFIGKPAPKFSADAVVNGDFKTISLDDYKGKYVVLFFYPLDFTFVCPTEIIAFSDRADEFKKIDTQLIACSTDSKFSHLEWINKPRKHGGLGEMKIPVLADTNHKISRDYGVLMEEAGIAFRGLFIIDDKGILRQITINDLPVGRSVDETLRLVQAFKYTDTHGEVCPANWQPGEDTIKPDPEGSQTFFGKKR

SEQ ID NO: 21113 - protein, 60 aa, Globodera rostochiensis
RAHIGKPAPDFTVEAVVDHDFQTVSLSDFKGKYVVLIFYPEDFSFVCPTEITAFSDRSDE

SEQ ID NO: 21114 - protein, 199 aa, Trypanosoma brucei rhodesiense
MSCGDAKLNHPAPHFNEVALMPNGTFKKVDLASYRGKWVVLFFYPLDFTFVCPTEICQFSDRVKEFNDVDCEVIACSMDSEFSHLAWTNVERKKGGLGTMNIPILADKTKSIMKAYGVLKEEDGVAYRGLFIIDPQQNLRQITINDLPVGRNVDETLRLVKAFQFVEKHGEVCPANWKPGSKTMKADPNGSQDYFSSMN

SEQ ID NO: 21115 - protein, 187 aa, Azotobacter vinelandii
MSLINTEVKPFKATAYHNGKFIDVTEADLQGKWSVFFFYPADFTFVCPTELGDLADNYAEFQKLGVEIYAVSTDTHFTHKAWHDSSETIKKLQFPMVGDPTLAISRNFEVLIEEAGLAERGTFVVDPQGKIQIIELNAGNIGRDANELLRKIKAAQYVASHPGEVCPAKWKEGEGTLKPSLDLVGKI

SEQ ID NO: 21116 - protein, 265 aa, Spinacia oleracea
MACVASSTTLISSPSSRVFPAKSSLSSPSVSFLRTLSSPSASASLRSGFARRSSLSSTSRRSFAVKAQADDLPLVGNKAPDFEAEAVFDQEFIKVKLSDYIGKKYVILFFYPLDFTFVCPTEITAFSDRHSEFEKLNTEVLGVSVDSVFSHLAWVQTDRKSGGLGDLNYPLISDVTKSISKSFGVLIHDQGIALRGLFIIDKEGVIQHSTINNLGIGRSVDETMRTLQALQYTGNPDEVCPAGWKPGEKSMKPDPKLSKEYFSAI

SEQ ID NO: 21117 - protein, 200 aa, Rickettsia sibirica
MSVFVGKTAPDFTAKAIMPNNNIDDKFKLSNYAAGDNIVLFFYPLDFTFVCPSEIIAFHNKLGEFTERRTKVVAVSVDSHFSHLAWKNTPHNKGGLGQVQFPMVSDIKKDISSKYNVLNEDGVALRGTFLIDKDFIVRHMLVNDLPIGRDINYTLKVIDALIHHQKHGEVCPAGWHKGEEAITPSHEGIAHYLSSHAEKL

SEQ ID NO: 21118 - protein, 219 aa, Fagopyrum esculentum
MPGLTIGDSIPNLQVETTHGSFKLHDFIGDSWVILFSHPGDFTPVCTTELGKMAKYEEEFTKRGVKLLGLSCDDIASHKEWIKDVEAFTPGSKVRYPIIADPKREVITKLNMVDPDEKDSSGSQLPSRALHIVGPDKKVKLSFLYPATTGRNMEEVVRVVESLQKAANDKVATPVDWQPGDEAVISPSVSDEEAKKMFPHGYRTVDLPSKKGYLRFTQV

SEQ ID NO: 21119 - protein, 195 aa, Plasmodium falciparum 3D7
MASYVGREAPYFKAEAVFADNTFGEVNLHDFIGKKYVLLYFYPLDFTFVCPSEIIALDKALDAFKERNVELIGCSVDSKYTHLAWKKTPLTKGGIGNIQHTLISDITKSISRSYNVLFGDSVSLRAFVLIDKQGVVQHLLVNNLAIGRSVEEVLRIIDAVQHHEQHGDVCPANWKKGKVAMKPSEEGVSEYLSKL

SEQ ID NO: 21120 - protein, 216 aa, Plasmodium falciparum 3D7
MFLKKLCRSNFFGNSRRSFSLVTKKAYNFTAQGLNKNNEIINVDLSSFIGQKYCCLLFYPLNYTFVCPTEIIEFNKHIKDFENKNVELLGISVDSVYSHLAWKNMPIEKGGIGNVEFTLVSDINKDISKNYNVLYDNSFALRGLFIIDKNGCVRHQTVNDLPIGRNVQEVLRTIDSIIHVDTSGEVCPINWKKGQKAFKPTTESLIDYMNNANKNV

SEQ ID NO: 21121 - protein, 199 aa, Wigglesworthia glossinidia endosymbiont of Glossina brevipalpis
MLVANKFIDFTAPAILSNGEIVQNFNLSNYIKNKVSVLFFWPMNFTFVCPSELIAFDKRFFEFKNRNVKLVGVSLDTVYSHQAWRSTSTKLGGIGEVRYPMVSDIKRNIMKSYNVEHPEIGVALRASFLIDKAGIVRHQIINDLPIGRDINEMIRVIDALLFHEKHGEVCPAQWKKNREGIVPSREGISQYLSENLNDL

SEQ ID NO: 21122 - protein, 271 aa, Arabidopsis thaliana
MASIASSSSTTLLSSSRVLLPSKSSLLSPTVSFPRIIPSSSASSSSLCSGFSSLGSLTTNRSASRRNFAVKAQADDLPLVGNKAPDFEAEAVFDQEFIKVKLSEYIGKKYVILFFYPLDFTFVCPTEITAFSDRYEEFEKLNTEVLGVSVDSVFSHLAWVQTDRKSGGLGDLNYPLVSDITKSISKSFGVLIPDQGIALRGLFIIDKEGVIQHSTINNLGIGRSVDETMRTLQALQYVQENPDEVCPAGWKPGEKSMKPDPKLSKEYFSAI

SEQ ID NO: 21123 - protein, 271 aa, Arabidopsis thaliana
MASIASSSSTTLLSSSRVLLPSKSSLLSPTVSVPRTLHSSSASSSSLCSGFSSLGSLTTSRSASRRNFAVKAQADDLPLVGNKAPDFEAEAVFDQEFIKVKLSEYIGKKYVILFFYPLDFTFVCPTEITAFSDRYEEFEKLNTEVLGVSVDSVFSHLAWVQTDRKSGGLGDLNYPLVSDITKSISKSFGVLIPDQGIALRGLFIIDKEGVIQHSTINNLGIGRSVDETMRTLQALQYVQENPDEVCPAGWKPGEKSMKPDPKLSKEYFSAI

SEQ ID NO: 21124 - protein, 273 aa, Arabidopsis thaliana
MSMASIASSSSTTLLSSSRVLLPSKSSLLSPTVSFPRIIPSSSASSSSLCSGFSSLGSLTTNRSASRRNFAVKAQADDLPLVGNKAPDFEAEAVFDQEFIKVKLSEYIGKKYVILFFYPLDFTFVCPTEITAFSDRYEEFEKLNTEVLGVSVDSVFSHLAWVQTDRKSGGLGDLNYPLVSDITKSISKSFGVLIPDQGIALRGLFIIDKEGVIQHSTINNLGIGRSVDETMRTLQALQYVQENPDEVCPAGWKPGEKSMKPDPKLSKEYFSAI

SEQ ID NO: 21125 - protein, 266 aa, Arabidopsis thaliana
MASVASSTTLISSPSSRVFPAKSSLSSPSVSFLRTLSSPSASASLRSGFARRSSLSSTSRRSFAVKAQADDLPLVGNKAPDFEAEAVFDQEFIKVKLSDYIGKKYVILFFYPLDFTFVCPTEITAFSDRHSEFEKLNTEVLGVSVDSVFSHLAWVQTDRKSGGLGDLNYPLISDVTKSISKSFGVLIHDQGIALRGLFIIDKEGVIQHSTINNLGIGRSVDETMRTLQALQYIQENPDEVCPAGWKPGEKSMKPDPKLSKEYFSAI

SEQ ID NO: 21126 - protein, 271 aa, Arabidopsis thaliana
MASIASSSSTTLLSSSRVLLPSKSSLLSPTVSFPRIIPSSSASSSSLCSGFSSLGSLTTNRSASRRNFAVKAQADDLPLVGNKAPDFEAEAVFDQEFIKVKLSEYIGKKYVILFFYPLDFTFVCPTEITAFSDRYEEFEKLNTEVLGVSVDSVFSHLAWVQTDRKSGGLGDLNYPLVSDITKSISKSFGVLIPDQGIALRGLFIIDKEGVIQHSPINNLGIGRSVDETMRTLQALQYVQENPDEVCPAGWKPGEKSMKPDPKLSKEYFSAI

SEQ ID NO: 21127 - protein, 266 aa, Arabidopsis thaliana
MASVASSTTLISSPSSRVFPAKSSLSSPSVSFLRTLSSPSASASLRSGFARRSSLSSTSRRSFAVKAQADDLPLVGNKAPDFEAEAVFDQEFIKVKLSDYIGKKYVILFFYPLDFTFVCPTEITAFSDRHSEFEKLNTEVLGVSVDSVFSHLAWVQTDRKSGGLGDLNYPLISYFTKSISKSFGVLIHDQGIALRGLFIIDKEGVIQHSTINNLGIGQSVDETMRTLQALQYIQENPDEVCPAGWKPGEKSMKPDPKLSKEYFSAI

SEQ ID NO: 21128 - protein, 265 aa, Arabidopsis thaliana
MASVASSTTLISSPSSRVFPAKSSLSSPSVSFLRTLSSPSASASLRSGFARRSSLSSTSRRSFAVKAQADDLPLVGNKAPDFKAEAVFDQEFIKVKLSDYNGKKYVILFFYPLDFTFVCPTEITAFSDRHSEFEKLNTEVLGVSVDSVFSHLAWVQTDRKSGGLGDLNYPLISDVTKSISKSFGVLIHDQGIALRGLFIIDKEGVIQHSTINNLGIGRSVDETMRTLQALQYTGNPDEVCPAGWKSGEKSMKPDPKLSKEYFSAI

SEQ ID NO: 21129 - protein, 267 aa, Arabidopsis thaliana
MASVASSTTLISSPSSRVFPAKSSLSSPSVSFLRTLSSPSASASLRSGFARRSSLSSTSRRSFAVKAQADDLPLVGNKAPDFEAEAVFDQEFIKVKLSDYNGKKYVILFFYPLDFTFVCPTITAFSDRHSEFEKLNTEVLGVSVDSVFSHLAWVQTDRKSGGLGDLNYPLISDVTKSISKSFGVLIHDQGIGIALRGLFIIDKEGVIQHSTINNLGIGRSVDETMRTLQALQYIQENPDEVCPAGWKPGEKSMKPDPKLSKEYFSAI

SEQ ID NO: 21130 - protein, 270 aa, Brassica napus
MASLASTTTLISSSSVLLPSKPSPFSPAASFLRTLPSTSVSTSSSLRSCFSSISPLTCIRSSSRPSFAVKAQADDLPLVGNKAPDFEAEAVFDQEFIKVKLSEYIGKKYVILFLYPLDFTFVCPTEITAFSDRYEEFEKLNTEVLGVSVDSVFSHLAWVQTERKSGGLGDLNYPLVSDITKSISKSFGVLIPDQGIALRGLFIIDKKGVIQHSTINNLGIGRSVDETMRTLQALQYVQENPDEVCPAGWKPGEKSMKPDPKLSKEYFSAI

SEQ ID NO: 21131 - protein, 273 aa, Brassica rapa
  unsure (1)..(273): unsure at all Xaa locations
MASVASSTTLISSSASVLPATKSSLLPSPSLSFLPTLSSPSPSASLRSLVPLPSPQSASSSRRSFAVKGQTDDLPLVGNKAPDFEAEGVFDQEFIKFIKVKLSDYIGKKYVILFFLPLDFTFVCPTEITAFSDRYAEFEKLNTEVLGVSVDSVSVFSHLAGVQTDRKFGGLGDLNYPLISDVTKSISKSFGVLIHDQGIALRGLFIIDKEGVIQHSTIXNLGIGRSVDETMRTLQALQYIQEGPGEVCPAGWKPGEKSMKPDPKLSKELFSAI

SEQ ID NO: 21132 - protein, 219 aa, Mesorhizobium loti
MSLRINDIAPDFTAETTQGTISFHDWIGDGWAILFSHPKNFTPVCTTELGTMAGLEGEFKKRNVKIIGISVDPVASHDKWQADIKTATGQTVHYPLIGDKDLKVAKLYDMLPAGAGETSEGRTPADNATVRSVYVIGPDKKIKLVLTYPMTTGRNFDEILRAVDSMQLTAKHQVATPANWKQGEDVIITAAVSNEDAIKRFGAFDTILPYLRKTKQPSA

SEQ ID NO: 21133 - protein, 222 aa, Mesorhizobium loti
MSLRIADTAPDFAAETTHGPISFHDWLGNSWGILFSHPKDFTPVCTTELGYMAKLKPEFDKRNVKIIGLSVDPVERHAGWADDIAETQGQAPNFPMIGDPMLAIAKLYDMLPATAGDSAEGRTAADNQTVRHVYVIGPDKKIKLMIAYPMTTGRNFDEILRVVDSMQLTAKHRVATPVNWRPGDDVIIAGSVSNDEAKVLYPDGWKQPKPYIRIVPQPHSNA

SEQ ID NO: 21134 - protein, 219 aa, Sinorhizobium meliloti
MSLRINDTAPDFTAETTQGTINFHEWIGDGWAVLFSHPKNFTPVCTTELGAMAGIEPEFRKRGVKIIGISVDPVESHSKWKNDIKVATGFEVDYPLIGDRDLKVAKLYDMLPAGAGETSEGRTPADNATVRSVYVIGPDKKIKLILTYPMTTGRNFNEILRAIDSIQLTAKHQVATPANWQQGEDVIITAAVSNEDAVQRFGSFDTVLPYLRKTKQPTA

SEQ ID NO: 21135 - protein, 280 aa, Glycine max
  unsure (1)..(280): unsure at all Xaa locations
SKQQLTSWGRSTRSTLLLMEKATNVVXQDATKPLTSTPSYGELQTLSLPXTLTLSPRALLPPSRALLSPSRAPRRSFVVKASSSELPLVGNTAPDFEAEAVFDQEFINVKLSDYIGKKYVVLFFYPLDFTFVCPTEITAFSDRHAEFEALNTEILGVSVDSVFSHLAWIQTDRKSGGLGDLNYPLISDVTKSISKSYGVLIPDQGIALRGLFIIDKEGVIQHSTINNLAIGRSVDETKRTLQALQYVQENPDEVCPAGWKPGEKSMKPDPKLSKDYFAAV

SEQ ID NO: 21136 - protein, 262 aa, Glycine max
  unsure (1)..(262): unsure at all Xaa locations
MACSATSASLFSANPTPLFSPKPSLSLHLNPLPTRPSPSLTRPSLSLTRPSHSRRSFVVKASSSELPLVGNTAPXDFEAEAVFDQEFINVKLSDYIGKKYVVLFFYPLDFTFVCPTEITAFSDRHAEFEALNTEILGVSVDSVFSHLXAWIQTDRKSGGLGDLNYPLISDVTKSISKSYGVLIPDQGIALRGLFIIDKEGVIQHSTINNLAIGRSVDETKRTLQALQYVQENPDEVCPAGWKPGEKSMKPDPKLSKDYFAAV

SEQ ID NO: 21137 - protein, 267 aa, Glycine max
  unsure (1)..(267): unsure at all Xaa locations
MACSAXPLASLFSANPTPLFSPKSSLSLPNNSLHLNPLPTRPSLSLTRPSHTRRSFVVKASSVSFLNSELPLVGNTAPDFEAEAVFDQEFINVKXLSDYIGKXKYVVLFFYPLDFTFVCPTEITAFSDRHAEFEALNTEILGVSVDSVFSHLAWIQTDRKSGGLGDLNYPLISDVTKSISKSYGVLIPDQGXIALRGLFIIDKEGVIQHSTINNLAIGRSVDETKRTLQALQYVQENPDEVCPAGWKPGEKSMKPDPKLSKDYFAAV

SEQ ID NO: 21138 - protein, 153 aa, Glycine max
  unsure (1)..(153): unsure at all Xaa locations
AVPLFIESDKLSSSSKAFIGKPAPNFMADAVVNGDFKTISLEQFKGQYVVLFFYPLDFTFVCPTEIIAFSDKAGEFKKIGVQLIACSTDSKFCHLEWINKPRKQGGLGEMNIPVLADTSHKISRDSRVLMEEAGIAYRGLFIIDDQGVLRQIX

SEQ ID NO: 21139 - protein, 146 aa, Glycine max
  unsure (1)..(146): unsure at all Xaa locations
VCFKRVTLVGNTAPDFEAEAVFDLEFIKFSHLAXVQTDRKSGGLGHLKYPXVSDITKSTSKSYGVLIPDQGIALRGLFIIDKEGVIQHSTINNLAIGRSVDETKITLQALQYVQENPDEVXPAGWKPGEKSMKPDPKLSKDYFAAV

SEQ ID NO: 21140 - protein, 150 aa, Glycine max
  unsure (1)..(150): unsure at all Xaa locations
MACAFSASTVSTAAALVASPKPAGAPXSACRFPAXRRQALPPRRRRLEDXARARSFVARAAAEYDLPLVGNKAPDFAAEAVFDQEFINVKLSDYIGKKYVILFFYPLDFTFVCPTEITAFSDRHEEFEKINTEILGVSVDSVFFHLAWVQ

SEQ ID NO: 21141 - protein, 170 aa, Glycine max
  unsure (1)..(170): unsure at all Xaa locations
MACSATSASLFSANPTPLFSPKSSLSLXXTTLSTSTLSPRALLSPSRAXSHTRRSFVVKASSSELPLVGNTAPDFEAEAVFDQEFINVKLSDYIGKKYVVLFFYPLDFTFVCPTXFWHLAWVQTDRKSGGLGDLNYPLISDVTKCISKSYGVXLIPDQGNCIXRGLVIYX

SEQ ID NO: 21142 - protein, 155 aa, Glycine max
  unsure (1)..(155): unsure at all Xaa locations
VFPREKRERERQVSMASVASSTTLISSSASVLPATKSSLLPSPSLSFLPTRSSPSPSASLRLARPSPLTSIRSSSRRSFAVKAQTDDLPLVGNKAPDFEAEAVFDQEFIKVKLSEYIGKKYVILFFYPLDFTFICPTEITAFSDRYAEFEXXNTE

SEQ ID NO: 21143 - protein, 218 aa, Tortula ruralis
MGGGWALGDLVPDIQADSTMGHIKVRDYCKDGWTIIFSHPGDYPPVCTTELGKIAAYNPEFEKRGVKLLGLSTDTVEDHQGWIKDIESYTPDAPVLYPILADPDRKITVALNMMDPDEKDANGKPLASRALHIIGPDCRLKLSLLYPGTTGRNFDEVLRVLDSLQLASKHKIATPANWQKGEPVVISPSVSDEKAKQMFPQGWETVNLPKALRMTFVD

SEQ ID NO: 21144 - protein, 260 aa, Phaseolus vulgaris
MASSAPCASLISSNPNILFSPKFPSSSFSSLSFPNSPNSLFKPLRTSLNPSSPPLRTFVARASSELPLVGNTAPDFEAEAVFDQEFIKVKLSDYIGKKYVILFFYPLDFTFVCPTEITAFSDRYAEFEALNTEILGVSVDSVFSHLAWVQTDRKSGGLGDLNYPLISDVTKSISKSYDVLIPDQGIALRGLFIIDKEGVIQHSTINNLAIGRSVDETKRTLQALQYVQENPDEVCPAGWKPGEKSMKPDPKLSKEYFSAI

SEQ ID NO: 21145 - protein, 263 aa, Pisum sativum
MACSAPFASLLYSNPNTLFSPKFSSPRLSSLSIPNAPNSLPKLRTSLPLSLNRSSSSRRTFVVRASGELPLVGNSAPDFEAEAVFDQEFIKVKLSEYIGKKYVILFFYPLDFTFVCPTEITAFSDRHAEFDAINTEILGVSVDSVFSHLAWVQSDRKSGGLGDLKYPLVSDVTKSISESYGVLIPDQGIALRGLFIIDKEGVIQHSTINNLGIGRSVDETKRTLQALQYVQENPDEVCPAGWKPGEKSMKPDPKGSKEYFAAV

SEQ ID NO: 21146 - protein, 220 aa, Oryza sativa (japonica cultivar-group)
MPGLTIGDTVPNLELDSTHGKIRIHDFVGDTYVILFSHPGDFTPVCTTELAAMAGYAKEFDKRGVKLLGISCDDVQSHKDWIKDIEAYKPGNRVTYPIMADPSREAIKQLNMVDPDEKDSNGGHLPSRALHIVGPDKKVKLSFLYPACVGRNMDEVVRAVDALQTAAKHAVATPVNWKPGERVVIPPGVSDDEAKEKFPQGFDTADLPSGKGYLRFTKVG

SEQ ID NO: 21147 - protein, 220 aa, Oryza sativa (japonica cultivar-group)
MPGLTLGDVVPDLELDTTHGKIRLHDFVGDAYVIIFSHPADFTPVCTTELSEMAGYAGEFDKRGVKLLGFSCDDVESHKDWIKDIEAYKPGRRVGFPIVADPDREAIRQLNMIDADEKDTAGGELPNRALHIVGPDKKVKLSFLFPACTGRNMAEVLRATDALLTAARHRVATPVNWKPGERVVIPPGVSDEEAKARFPAGFETAQLPSNKCYLRFTQVD

SEQ ID NO: 21148 - protein, 271 aa, Nicotiana tabacum
MACSASSTALLSSNPKAASISPKSSFQAPISQCLSVPSSFNGLRNCKPFVSRVARSLSTRVAQSQRRRFVVRASSELPLVGNQAPDFEAEAVFDQEFIKVKLSEYIGKKYVILFFYPLDFTFVCPTEITAFSDRYGEFEKLNTEILGVSVDSVFSHLAWVQTDRKSGGLGDLNYPLISDVTKSISKSYNVLIPDQGIALRGLFIIDKEGVIQHSTINNLGIGRSVDETLRTLQALQYVQDNPDEVCPAGWKPGEKSMKPDPKGSKEYFASI

SEQ ID NO: 21149 - protein, 275 aa, Riccia fluitans
MATACAAVSAVAVPVASVANHIASSSSGTPSLAIPRSYEGLNKSFGARIAPRSTSAFRKPVTGVSLKQFSKGKVASARCASPLVGNVAPDFEAEAVFDQEFVKIKLSEYIGKRYVVLFFYPLDFTFVCPTEITAFSDKHEEFEKLNTEVIGVSTDSVFSHLAWIQTDRKSGGLGDLKYPLVSDLTKKIAEDFGVLIPDQGIALRGLFIIDKEGVIQHATINNLAIGRSVEETLRTLQAVQYVQENPDEVCPAGWKPGEKTMKPDTKLSKEYFAQV

SEQ ID NO: 21150 - protein, 193 aa, Litomosoides sigmodontis
MTLAGSKAFIGQPAPNFKTTAVVNGDFKEISLCQFKGKYVVLFFYPLDFTFVCPTEIIAFSDRIAEFKQLDVAVMACSTDSHFSHLAWVNTDRKMGGLGAMNIPILADTNHTISRAYGVLKEDDGIAYRGLFIIDPKGILRQITVNDLPVGRSVDETLRLIQAFQFVDKHGELCPANWQPGSETIKPGVKESK

SEQ ID NO: 21151 - protein, 199 aa, Onchocerca ochengi
MTLAGSKAFIGQPAPNFKTTAVVNGDFKEISLNQFKGKYVVLFFYPLDFTFVCPTEIIAFSDRISEFKKLDVAVMACSTDSHFSHLAWVNTDRKMGGLGQMNIPILADTNHAISKAYGVLKEDEGIAYRGLFIIDSKGILRQITVNDLPVGRSVDETLRLIQAFQFVDNHGEVCPANWQPGSETIKPEVKESKEYFGKH

SEQ ID NO: 21152 - protein, 199 aa, Leishmania donovani chagasi
MSCGDAKINCPAPPFEEVALMPNGSFKKISLAAYKGKWVVLFFYPLDFTFVCPTEIIAFSENVSRFNELNCEVLACSMDSEYAHLQWTLQDRKKGGLGAMAIPMLADKTKSIARAYGVLAEKQGVAYRGLFIIDPNGMVRQITVNDMPVGRNVEEVLRLLEAFQFVEKHGEVCPANWKKGAPTMKPEPKASVEGYFSKQ

SEQ ID NO: 21153 - protein, 199 aa, Leishmania donovani chagasi
MSCGDAKINCPAPPFEEVALMPNGSFKKISLAAYKGKWVVLFFYPLDFTFVCPTEIIAFSENVSRFNELNCEVLACSMDSEYAHLQWTLQDRKKGGLGAMAIPMLADKTKSIARAYGVLAEKQGVAYRGLFIIDPNGMVRQITVNDMPVGRNVEEVLRLLEAFQFVEKHGEVCPANWKKGAPTMKPEPKASVEGYFSKL

SEQ ID NO: 21154 - protein, 190 aa, Leishmania donovani chagasi
MSCGDAKINCPAPPFEEVALMPNGSFKKISLAAYKGKWVVLFFYPLDFSFVCPTEIIQFSENISRFNELNCEVLACSMDSEYAHLQWTLQDRKKGGLGAMAIPMLADKTKSIARAYGVLEEKQGVAYRGLFIIDPNGMVRQITVNDMPVGRNVEEVLRLLEAFQFVEKHGEVCPANWKKGDPGLKVDHNK

SEQ ID NO: 21155 - protein, 222 aa, Haemaphysalis longicornis
MPPLNLGDPFPNFTCETTVGTIDFHQWLGDSWGILFSHPADYTTPVCTTELARAAQLAHVFAQKGVKIIALSCDSVDSHHGWIKDIEAFGELPDGPFPYPIIADEKREIAVKLGMLDPVEKDKEGLPLTCRAVFIIGPDKKMKLSMLYPATTGRNFDEVLRATDSLLVTETRKVATPAGWKKGTPCMVLPSVTEEEIPKLFPTGIKQYDVPSGKKYLRTTMD

SEQ ID NO: 21156 - protein, 201 aa, Legionella pneumophila
MSVLVGRKAPDFTVAAVMGNGEIVDKFNLHEHLKGKYGLVFFYPLDFTFVCPSELIALDHRIEEFKRRNVEVVAVSIDSHFTHNAYRNTPVKNGGIGPVRFTLAADMTHSICQSYGVEHPVAGVAFRGAFVIDTNGMVRSQIVNDLPIGRNIDEILRIIDAVQFFEENGEVCPAGWQKGQAGMKASPKGVAEYLSEHSESL

SEQ ID NO: 21157 - protein, 201 aa, Legionella pneumophila
MSVLVGRKAPDFTVAAVMGNGEIVDKFNLHEHLKGKYGLVFFYPLDFTFVCPSELIALDHRIEEFKRRNVEVVAVSIDSHFTHNAYRNTPVKNGGIGPVRFALAADMTHSICQSYGVEHPVAGVAFRGAFVIDTNGMVRSQIVNDLPIGRNIDEILRIIDAVQFFEENGEVCPAGWQKGQAGMKASPKGVAEYLSEHSESL

SEQ ID NO: 21158 - protein, 205 aa, Dictyostelium discoideum
MTHPHCHKKEQIRIRKPAPAFKGQAVVNGEFKEISLDDYKGKYLYLFFYPLDFTFVCPTEIIAFSNAAEEFKKAGCELVGCSIDSPFTHLAWINTPRKEGGLGGINIPLLSDLTHQISKDYGVYIEEDGHTIRGSILIDKEGLVRVITMNDNPVGRSVDEAIRTLKALKFTDQFGEVCPANWSEGDKSMKADPKGSKEYFEAVNK

SEQ ID NO: 21159 - protein, 202 aa, Bromus secalinus
STHGKIRIHDYVANGYVILFSHPGDFTPVCTTELAAMANYAKEFEKRGVKLLGISCDDVQSHKEWTKDIEAYKPGSKVTYPIMADPDRSAIKQLNMVDPDEKDAEGQLPSRTLHIVGPDKKVKLSFLYPSCTGRNMDEVVRAVDSLLTAAKHKVATPANWKPGECVVIAPGVSDEEAKKLFPQGFETKDLPSKKGYLRFTKV

SEQ ID NO: 21160 - protein, 210 aa, Hordeum vulgare
DARARSFVARAAAEYDLPLVGNKAPDFAAEAVFDQEFINVKLSDYIGKKYVILFFYPLDFTFVCPTEITAFSDRHEEFEKINTEILGVSVDSVFSHLAWVQTERKSGGLGDLKYPLVSDVTKSISKSFGVLIPDQGIALRGLFIIDKEGVIQHSTINNLGIGRSVDETLRTLQALQYVKKPDEVCPAGWKPGEKSMKPDPKGSKEYFAAI

SEQ ID NO: 21161 - protein, 242 aa, Hordeum vulgare
DARARSFVARAAAEYDLPLVGNKAPDFAAEAVFDQEFINVKLSDYIGKKYVILFFYPLDFTFVCPTEITAFSDRHEEFEKINTEILGVSVDSVFSHLAWVQTERKSGGLGDLKYPLVSDVTKSISKSFGVLIPDQGIALRGLFIIDKEGVIQHSTINNLGIGRSVDETLRTLQALQYVKKPDEVCPAGWKPGEKSMKPDLGPKRSTRCYLERTFALSCGVLSWPFLGYMCFCDPSCSYHAYN

SEQ ID NO: 21162 - protein, 261 aa, Oryza sativa
MAACCSSLATAVSSSSAKPLAGIPPAAPHSLSLPRAPAARPLRLSASSSRSARASSFVARAGGVDDAPLVGNKAPDFDAEAVFDQEFINVKLSDYIGKKYVILFFYPLDFTFVCPTEITAFSDRYDEFEKLNTEILGVSIDSVFSHLAWVQTDRKSGGLGDLKYPLISDVTKSISKSFGVLIPDQGIALRGLFIIDKEGVIQHSTINNLAIGRSVDETMRTLQALQYVQDNPDEVCPAGWKPGDKSMKPDPKGSKEYFAAI

SEQ ID NO: 21163 - protein, 266 aa, Oryza sativa
  unsure (1)..(266): unsure at all Xaa locations
CRGASRLPEGARLRAVAAVPAVPPLPSPPGSPCASPPPPPRDPRARSFVARAGGESWDXRAPACVRAQGDLPLVGNKAPDFEAEAMFDQGFIKVKLSEYIGXKKYVVLFFYPLDFTFVCPTEITAFSDRYEEFEKINTEVLGVSIDSVFSHLAWIQTDRKSGGLGDXKYQLISDVTKSISKSFGVLIPDQGIALRGLFIIDKEGVIQHSTINNLAIGRSVDETLRTLQALQYVQENPDEVCPAGWKPGKKSMKPDPKDSKEYFASI

SEQ ID NO: 21164 - protein, 156 aa, Oryza sativa
  unsure (1)..(156): unsure at all Xaa locations
MACAFSVSSAAAPLASPKGDLPLVGNKAPDFEAEAMFDQGFIKSKCXXFVSSAEITAFSDRYEEFEKINTEVLGVSIDSVGIALRGLFIIDKEGVIQHSTINNLAIGRSVDETLRTLQALQYVQENPDEVCPAGWKPGEKSMKPDPKDSKEYFASI

SEQ ID NO: 21165 - protein, 94 aa, Oryza sativa
MACAFSVSSAAAPLASPKGIALRGLFIIDKEGVIQHSTINNLAIGRSVDETLRTLQALQYVQENPDEVCPAGWKPGEKSMKPDPKDSKEYFASI

SEQ ID NO: 21166 - protein, 258 aa, Secale cereale
MACAFSASTVSTAAALVASPKPAGAPSACRFPALRRGRAGLRCARLEDARARSFVARAAAEYDLPLVGNKAPDFAAEAVFDQEFINVKLSDYIGKKYVILFFYPLDFTFVCPTEITAFSDRHEEFEKINTEILGVSVDSVFSHLAWVQTERKSGGLGDLKYPLVSDVTKSISKSFGVLIPDQGIALRGLFMIDKEGVIQHSTINNLGIGRSVDETLRTLQALQYVQENPDEVCPAGWKPGEKSMKPDPKGSKEYFAAI

SEQ ID NO: 21167 - protein, 304 aa, Triticum aestivum
MQSRLHPYARSRGRTRGRTRSSYSGTLSIWRLPNPLPGTPRLTAAAMACAFSASTVSTAAALVASPKPAGVPQCLSFPRAAARPSRLAAAGSRTARARSFVARAAAEYDLPLVGNKAPDFAAEAVFDQEFINVKLSDYIGKKYVILFFYPLDFTFVCPTEITAFSDRHEEFEKINTEILGVSVDSVFSHLAWVQTERKSGGLGDLKYPLVSDVTKSISKSFGVLIPDQGIALRGLFIIDKEGVIQHSTINNLGIGRSVDETLRTLRALQYVQENPDEVCPAGWKPGEKSMKPDPKGSKEYFAAI

SEQ ID NO: 21168 - protein, 210 aa, Triticum aestivum
DARARSFVARAAAEYDLPLVGNKAPDFAAEAVFDQEFINVKLSDYIGKKYVILFFYPLDFTFVCPTEITAFSDRHEEFEKINTEILGVSVDSVFSHLAWVQTERKSGGLGDLKYPLVSDVTKSISKSFGVLIPDQGIALRGLFIIDKEGVIQHSTINNLGIGRSVDETLRTLRALQYVKKPDEVCPAGWKPGEKSMKPDPKGSKEYFAAI

SEQ ID NO: 21169 - protein, 224 aa, Triticum aestivum
PAGLGDLTQSLIQTTQTNTIIMSQAFVQRPAPEFTATTLFPGGEFKDIKLSDYQGQWVVLLFYPMDFTFVCPTEIIQYNNALDRFKEINTTVFGVSTDSHFTHLAWVEKPRKQGGLGHLELPLIADKSTKISRNYGVLIEDEGIALRGLFIIDPKGVLRQITVNDLPVGRDVEETIRLVKAFQFTDEYGEVCPAGWQEGGKTMKADPKGSLEYFSAQGENGAKA

SEQ ID NO: 21170 - protein, 225 aa, Triticum aestivum
  unsure (1)..(225): unsure at all Xaa locations
MACAFSASTVSTAAALVASPKPAGVPXSACRFPAXRRQALPPRRRRLEDXARARSFVARAAAEYDLPLVGNKAPDFAAEAVFDQEFINVKLSDYIGKKYVILFFYPLDFTFVCPTEITAFSDRHEEFEKINTVVVXXFSEVNXNVIFLQGIARRGLFIIGWEGVIQHSTINNLGIGRSVDETLRTLQALQYVQENPDEVCPAGWKLGEKSMKPDPKGSKEYFAAI

SEQ ID NO: 21171 - protein, 124 aa, Triticum aestivum
  unsure (1)..(124): unsure at all Xaa locations
RSARATRLVARAGGVDDLPLVGNKAPDFEAEAVFDQEFINVKLSDYIGKKYVILFFYPLDFTFVCPTEITAFSDRYEEFEKLNTEVLGVSIDSVFSHLAWVQTDRKFGGLGDLKYPLISDATKX

SEQ ID NO: 21172 - protein, 103 aa, Triticum aestivum
  unsure (1)..(103): unsure at all Xaa locations
XARIGKPAPDFKATAVVDGAFKEVKLSDYKGKYVVLFFYPLDFTFVCPTEIITFSNRAEDFRKLGCEVLGVSVDSHFTHLAWINTPRKEGCLGPLNIPLLADX

SEQ ID NO: 21173 - protein, 136 aa, Triticum aestivum
  unsure (1)..(136): unsure at all Xaa locations
MACAFSASTVSTAAALVASPKPAGAPQCLSFPRSFVARAAAEYDLPLVGNKAPDFAAEAVFDQEFIHVKLSDYIGKKYVILFFYPLDFTFVCPTEITAFSDRHEEFEKINTEILGVSVDSVFSHLAWVQTERXSGX

SEQ ID NO: 21174 - protein, 218 aa, Triticum turgidum subsp. durum
MPGLTIGDTVPNLELDSTHGKIRIHDYVGNGYVILFSHPGDFTPVCTTELAAMANYAKEFEKRGVKLLGISCDDVQSHKEWTKDIEAYKPGSKVTYPIMADPDRSAIKQLNMVDPDEKDAEGQLPSRTLHIVGPDKKVKLSFLYPSCTGRNMDEVVRAVDSLLTAAKHKVATPANWNPGECVVIAPGVSDDGAKKMFPQGFETADLPSKKGYLRFTKV

SEQ ID NO: 21175 - protein, 251 aa, Zea mays
  unsure (1)..(251): unsure at all Xaa locations
XWPGNPSQLIPNPKPPIHPSPPHPPAVATAARPLRLVASRSARAIRLVARAGGVDDLPLVGNKAPDFEAEAVFDQEFINVKLSDYIGKKYVVLFFYPLDFTFVCPTEITAFSDRYEEFEKLNTEVLGVSIDSVFSHLAWVQTDRKSGGLGDLKYPLISDVTKSISKAFGVLIPDQGIALRGLFIIDKEGVIQHSTINNLAIGRSVDETMRTLQALQYVQENPDEVCPAGWKPGERSMKPDPKGSKEYFAAV

SEQ ID NO: 21176 - protein, 276 aa, Zea mays
  unsure (1)..(276): unsure at all Xaa locations
PQTPIHPIPSSSTPXAAMACSFSAAITVSSAPTPAARPLAAAPQSVCIARSAVATTARPLRLAASRSARATRLVARARVDDLPLVGNKAPDFEAEAVFDQEFINVKLSDYIGKKYVILFFYPLDFTFVCPTEITAFSDRYEEFEKLNTEVLGVSIDSVFSHLAWVQTDRKSGGLGDLKYPLVSDVTKSISKAFGVLIPDQGIALRGLFIIDKEGVIQHSTINNLAIGRSVDETMRTLQALQYVQENPDEVCPAGWKPGERSMKPDPKGSKEYFAAV

SEQ ID NO: 21177 - protein, 261 aa, Zea mays
  unsure (1)..(261): unsure at all Xaa locations
MACSFAAATVVSSAPTPAARPLAVAPQSVSXLPLRRRRRRQAXLRLVASRSARATRLVARAGGVDDLPLVGNKAPDFEAEAVFDQEFINVKLSDYIGKKYVVLFFYPLDFTFVCPTEITAFSDRYEEFEKLNTEVLGVSIDSVFSHLAWVQTDRKSGGLGDLKYPLISDVTKSISKAFGVLIPDQGIALRGLFIIDKEGVIQHSTINNLAIGRSVDETMRTLQALQYVQENPDEVCPAGWKPGERSMKPDPKGSKEYFAAV

SEQ ID NO: 21178 - protein, 259 aa, Zea mays
  unsure (1)..(259): unsure at all Xaa locations
MACSFAAATVVSSAPTPAARPLAAAPXSPSLFPALATAARPLRLVASRSARAIRLVARAGGVDDLPLVGNKAPDFEAEAVFDQEFINVKLSDYIGKKYVVLFFYPLDFTFVCPTEITAFSDRYEEFEKLNTEVLGVSIDSVFSHLAWVQTDRKSGGLGDLKYPLVSDVTKSISKAFGVLIPDQGIALRGLFIIDKEGVIQHSTINNLAIGRSVDETMRTLQALQYVQENPDEVCPAGWKPGERSMKPDPKGSKEYFAAI

SEQ ID NO: 21179 - protein, 259 aa, Zea mays
  unsure (1)..(259): unsure at all Xaa locations
MACSFAAATVVSFAPTPAARPLAAAPXSPSLFPALATAARPLRLVASRSARAIRLVARAGGVDDLPLVGNKAPDFEAEAVFDQEFINVKLSDYIGKKYVVLFFYPLDFTFVCPTEITAFSDRYEEFEKLNTEVLGVSIDSVFSHLAWVQTDRKSGGLGDLKYPLISDVTKSISKAFGVLIPDQGIALRGLFIIDKEGVIQHSTINNLAIGRSVDETMRTLQALQYVQENPDEVCPAGWKPGERSMKPDPKGSKEYFAAV

SEQ ID NO: 21180 - protein, 294 aa, Zea mays
  unsure (1)..(294): unsure at all Xaa locations
MPVQPRKGGNPSQLIPNPKPPIHPSPPHPLRAAMACSFAAATVVSSAPTPAARPLAVAPQSVSXLPLRRRRRRQAXLRLVASRSARATRLVARAGGVDDLPLVGNKAPDFEAEAVFDQEFINVKLSDYIGKKYVVLFFYPLDFTFVCPTEITAFSDRYEEFEKLNTEVLGVSIDSVFSHLAWVQTDRKSGGLGDLKYPLISDVTKSISKAFGVLIPDQGIALRGLFIIDKEGVIQHSTINNLAIGRSVDETMRTLQALQYVQENPDEVCPAGWKPGERSMKPDPKGSKEYFAAV

SEQ ID NO: 21181 - protein, 260 aa, Zea mays
MACSFAAATVVSSAPTPAARPLAVAPQSVSVSRSAVATAARPLRLVASRSARATRLVARAGGVDDLPLVGNKAPDFEAEAVFDQEFINVKLSDYIGKKYVVLFFYPLDFTFVCPTEITAFSDRYEEFEKLNTEVLGVSIDSVFSHLAWVQTDRKSGGLGDLKYPLISDVTKSISKAFGVLIPDQGIALRGLFIIDKEGVIQHSTINNLAIGRSVDETMRTLQALQYVQENPDEVCPAGWKPGERSMKPDPKGSKEYFAAV

SEQ ID NO: 21182 - protein, 249 aa, Zea mays
  unsure (1)..(249): unsure at all Xaa locations
XGNPSQLIPNPKPPIHPSPPHPPAVATAARPLRLVASRSARAIRLVARAGGVDDLPLVGNKAPDFEAEAVFDQEFINVKLSDYIGKKYVVLFFYPLDFTFVCPTEITAFSDRYEEFEKLNTEVLGVSIDSVFSHLAWVQTDRKSGGLGDLKYPLISDVTKSISKAFGVLIPDQGIALRGLFIIDKEGVIQHSTINNLAIGRSVDETMRTLQAWRYVQENPDEVCPAGWKPGERSMKPDPKGSKEYFAAV

SEQ ID NO: 21183 - protein, 277 aa, Zea mays
  unsure (1)..(277): unsure at all Xaa locations
PQTPIHPIPSSSTPGGHGLLLLRXPSPSLPPLPRPPDPSLLPRSPSASLXSAVATTARPLRLAASRSARATRLVARASVVDDLPLVGNKAPDFEAEAVFDQEFINVKLSDYIGKKYVILFFYPLDFTFVCPTEITAFSDRYEEFEKLNTEVLGVSIDSVFSHLAWVQTDRKSGGLGDLKYPLVSDVTKSISKAFGVLIPDQGIALRGLFIIDKEGVIQHSTINNLAIGRSVDETMRTLQALQYVQENPDEVCPAGWKPGERSMKPDPKGSKEYFAAI

SEQ ID NO: 21184 - protein, 225 aa, Zea mays
  unsure (1)..(225): unsure at all Xaa locations
MINAFQYSTRRAFANTVLKRSVSDRKAVLPLKVTDPAPKWKAMGVLNXXEFKTYELSDYSGKFLVMVFYPLNFTFVCPTELIAFSEKKDEFLKRNTHLVGVSCDSHFSHLAWNNQPRKEGGLGGLNFPLISDIKKQISRDYNVLLPEQGISLRGLFIIDDKGILRVTMVNDLPIGRNVEEVLRLVDAIQFTDKHGEVCPANWNKGSSTIKPNVSGSKEYFKNQXT

SEQ ID NO: 21185 - protein, 199 aa, Zea mays
MASTRFPQIGKPAPEFGGQAVVDGQFKNINLSDYKNKYVVLFFYPLDFTFVCPTEIIAFSEAAEQFRAINTELIACSNDSHFSHLAWVNLPRKQGGLGKMEIPLLADKSGKIARDYGVYIEEEGISFRGLFIIDGNGVLRQITINDLPVGRSVEETLRLVQAFQFTDEHGEVCPANWKPGKKTIKPSVENSKDFFQDSA

SEQ ID NO: 21186 - protein, 166 aa, Zea mays
  unsure (1)..(166): unsure at all Xaa locations
XKGKYVVFFFYPLDFTFVCPTEIIAFSDRAEEFKKLNCQVIGASVDSHFCHLAWVNTPKKQGGLGPMNIPLVSDPKRTIAQDYGVLKADEGISFRGLFIIDDKGILRQITVNDLPVGRSVDETSRLVQAFQFTDKHGEVCPAGLIPGSDTIKPDVHKSKEYFSKQK

SEQ ID NO: 21187 - protein, 158 aa, Zea mays
  unsure (1)..(158): unsure at all Xaa locations
XNALDRFKEINPTVFGVSTDSHFTHLAWVEKPRKQGGLGPDLELPLIADKSTKISRNYGVLIEDEGIALRGLFIIDPKGVLRQITVNDLPVGRDVEETIRLVKAFQFTDEYGEVCPAGWQEGGKTMKADPKGSLEYFSAQGENDTSNETRIPINTRSQ

SEQ ID NO: 21188 - protein, 212 aa, Zea mays
  unsure (1)..(212): unsure at all Xaa locations
SASFTAAITAVFRRYLGRQTLALLPPTPALSVAPPAPPLALLSPSAHLGPRAVHQLVATASVMDLLXPLVARHAYSEAAGCVLHSTFINTVDLSDHIANKYCILLFYPLEFTSTSSSEITALSDRYNEFAKVNTEVLADSFDQAVSHLAWGHTNRKSGGVGDPKYTLASDVSXSISKAFGALITDHGIALRGLFIIDKXGVLQHSTINNLAI

SEQ ID NO: 21189 - protein, 201 aa, Zea mays
  unsure (1)..(201): unsure at all Xaa locations
XNPSQIRKLTPNPNPPXIPSSSTPXAAMACSFSAAITVSSAPTPAARPLAAATQSDDLPLVGNKAPDFVAEAVFDQEFINVKLSDYIGKKYVILVFYPLDFTFVCPTEITAFSDRYEEFEKVNTEGLGGSIDSVVSHLAWVLTDRMSGGLGVLIFPLFFVVSLFFSFFFFFFFFSYFFLLFFFFIFFISFFFILFFFIFFF

SEQ ID NO: 21190 - protein, 243 aa, Entamoeba dispar
MSCNQQKECCKKECQEKECCKEYCCKEYCKKECCCPRIKAFKKFMNTFEKAQIGKEAPEFKAQAYCPCGSIKEIDINEYKGKYVVLLFYPLDWTFVCPTEMIGYSEVAGQLKEINCEVIGVSVDSVYCHQAWCEADKSKGGVGKLGFPLVSDIKRCISIKYGMLNVETGVSRRGYVIIDDKGKVRYIQMNDDGIGRSTEETIRIVKAIQFSEEHGAVCPINWKAGKDTIEPTPEGIKKYLTTH

SEQ ID NO: 21191 - protein, 208 aa, Phytophthora infestans
MVLTIRKPAPEFTADAVVNGEFIKISLSDYKGQYVVLFFYPMDFTFVCPTEICAFSDRADEFKKLNTQVIGCSIDSKFTHLAWINTPRKKGGLGDMNIPLVADVKKDLCSKYEVLVSEGDDEGVAFRGLFIIDKEGVLRQITINDLPIGRNVDEVLRLIEAFQFHEEHGDVCPANWKKGAKGMTANPKDSLKYFETVEEPSKKRKLTK

SEQ ID NO: 21192 - protein, 187 aa, Novosphingobium aromaticivorans
MSIVGTKLKPFQATAFHQGKFVDVSDADVVGKWGVFFFYPADFTFVCPTELEDLAGIYEELQGLGVEVYSVSTDTHFSHKAWHDSSPAIGKINYYMLGDQNHTISNNFGILREGVGLADRGTFVTDPDGTIQLVEITPEGVGRNAAELLRKIKAAKYWREHPGQVCPAKWEEGAETLAPSIDLVGKI

SEQ ID NO: 21193 - protein, 192 aa, Schizosaccharomyces pombe
MSLQIGKPAPDFKGTAVVNGAFEEIKLADYKGKWVFLGFYPLDFTFVCPTEIVAFSEAASKFAERNAQVILTSTDSEYSHLAFINTPRKEGGLGGINIPLLADPSHKVSRDYGVLIEDAGVAFRGLFLIDPKGVLRQITINDLPVGRSVDEALRLLDAFQFVEEHGEVCPANWHKGSDTIDTKNPEKYFSKH

SEQ ID NO: 21194 - protein, 196 aa, Saccharomyces cerevisiae
MVAQVQKQAPTFKKTAVVDGVFDEVSLDKYKGKYVVLAFIPLAFTFVCPTEIIAFSEAAKKFEEQGAQVLFASTDSEYSLLAWTNIPRKEGGLGPINIPLLADTNHSLSRDYGVLIEEEGVALRGLFIIDPKGVIRHITINDLPVGRNVDEALRLVEAFQWTDKNGTVLPCNWTPGAATIKPTVEDSKEYFEAANK

SEQ ID NO: 21195 - protein, 196 aa, Saccharomyces cerevisiae; identical to SEQ ID NO: 598

SEQ ID NO: 21196 - protein, 187 aa, Desulfitobacterium hafniense
MSLIGKEVNEFKVQAFVEGAFKEVTKGDLLGKWSVFVFYPADFTFVCPTELGDLADQYDEFKKIGVEIYSVSTDTHFVHKAWHDASDTIRKIRYPMLADPTAKLAKDFEVYIEEEGLALRGSFVVNPEGKIVAYEVNSNNIGREASELLRKVQAAQFVAEHGDQVCPAKWRPGAETLKPSLDLVGKL

SEQ ID NO: 21197 - protein, 174 aa, Thermoplasma volcanium
MSLVNKAAPDFEANAFVNGEVKKIRLSSYRGKWVVLFFYPADFTFVCPTEVEGFAEDYEKFKKKNTEVISVSEDTVYVHKAWVQYDERVAKAKYPMVEDRKGIIARAYDVYNEETGNAQRGLFIINPDGIVKYVVITDDNVGRSTDETLRVLEALQSGGLCPVNWHEGEPTLKV

SEQ ID NO: 21198 - protein, 202 aa, Ajellomyces capsulatus
MTEERAAPLRLGSIAPNFKAVTTKGEIDFHEFIGDHYVILFSHPDDFTPTCTTELGAFAKLEPEFTARRVKLIGLSANALKSHFEWIKDIDEVTGSNLQFPIIADADRKISYLYDMLDYQDTTNVDEKEVAMTIRSVFIIDPNKKIRLILSYPATTGRNAAEVLRVIDALQTTDKNGVNTPINWTLGEDVIIPPDCEDRGRD

SEQ ID NO: 21199 - protein, 225 aa, Neurospora crassa
MASTDRNAPLRLGTIAPNFQADTTTGPIDFHEFIGDNWVILFSHPEDYTPVCTTELGEMARLEPEFKKRGVKLIGLSANTLGSHEGWINDIKDVTGSQVQFPIIADKERKVAYLYDMLDYQDTTNVDEKGIAFTIRSVFVIDPKKTIRTILAYPASTGRNSAEILRIVDSLQTGDKHKVTTPINWVPGDDVIVHPSIKGEEATRLFPNLKAVKPYLRFTPLPKDA

SEQ ID NO: 21200 - protein, 154 aa, endosymbiont of Riftia pachyptila
MLQIGEVAPEFELPDADMYMVKSTDFIGKKNLVLYFYPKDDTTGCTIEAVELSDLVETFEQSDTQIFGVSRDNCVSHAAFRDKHGLTVRLLADPDGEACEVYGVWQEREAHGEKRMGIVRSTFIIDKHGVLRHALYDVKPKGHAAEVLQLVQQL

SEQ ID NO: 21201 - protein, 196 aa, Candida albicans
MAPVVQQPAPSFKKTAVVDGVFEEVTLEQYKGKWVLLAFIPLAFTFVCPSEIIAYSEAVKKFAEKDAQVLFASTDSEYTWLAWTNVARKDGGIGKVDFPVLADTNHSLSRDYGVLIEEEGVALRGIFLIDPKGVLRQITINDLPVGRSVEESLRLLEAFQFTEKYGEVCPANWHPGDETIKPSPEASKEYFNKVNK

SEQ ID NO: 21202 - protein, 217 aa, Suberites domuncula
MPNLGQIFPNFEADTTEGPIKFHDWLGDGWGILFSHPADFTPVCTTELGTVAKLVPEFQKRNVKVIAISCDPVDSHKTWIKDIESYGKLSSFGYPIIADKNRELAVQFGMLDPEEKDKAGLPLTARAVFIIGPDKKLKLSLLYPATTGRNFDEILRVVDSLQLTAYKKVATPANWKNGEKCMILPSVSKEDAEKFPGYETADVPSGKKYIRLADQPK

SEQ ID NO: 21203 - protein, 188 aa, Crithidia fasciculata
MSCGAAKLNHPAPEFDDMALMPNGTFKKVSLSSYKGKYVVLFFYPMDFTFVCPTEIIQFSDDAKRFAEINTEVISCSCDSEYSHLQWTSVDRKKGGLGPMAIPMLADKTKAIARAYGVLDEDSGVAYRGVFIIDPNGKLRQIIINDMPIGRNVEEVIRLVEALQFVEEHGEVCPANWKKGDAKKKEGH

SEQ ID NO: 21204 - protein, 188 aa, Crithidia fasciculata
MSCGAAKLNHPAPEFDDMALMPNGTFKKVSLSSYKGKYVVLFFYPMDFTFVCPTEIIQFSDDAKRFAEINTEVISCSCDSEYSHLQWTSVDRKKGGLGPMAIPMLADKTKGIARAYGVLDEDSGVAYRGVFIIDPNGKLRQIIINDMPIGRNVEEVIRLVEALQFVEEHGEVCPANWKKGDAKKKEGH

SEQ ID NO: 21205 - protein, 188 aa, Crithidia fasciculata
  unsure (1)..(188): unsure at all Xaa locations
XSCGAAKLNHPAPEFDDXALXPNGTFKKVSLSSYKGKYVVLFFYPXDFTFVCPTEIIQFSDDAKRFAEINTEVISCSCDSEYSHLQWTSVDRKKGGLGPXAIPXLADKTKAIARAYGVLDEDSGVAYRGVFIIDPNGKLRQIIINDXPIGRNVEEVIRLVEALQFVEEHGEVCPANWKKGDAKKKEGH

SEQ ID NO: 21206 - protein, 199 aa, Leishmania donovani
MSCGNAKINCPAPPFEEVALMPNGSFKKISLAAYKGKWVVLFFYPLDFTFVCPTEIIAFSENVSRFNELNCEVLACSMDSEYAHLQWTLQDRKKGGLGAMAIPMLADKTKSIARAYGVLEEKQGVAYRGLFIIDPNGMVRQITVNDMPVGRNVEEVLRLLEAFQFVEKHGEVCPANWKKGAPTMKPEPKASVEGYFSKQ

SEQ ID NO: 21207 - protein, 190 aa, Leishmania donovani
MSCGDAKINCPAPPFEEVALMPNGSFKKISLAAYKGKWVVLFFYPLDFSFVCPTEIIQFSENVSRFNELNCEVLACSMDSEYAHLQWTLQDRKKGGLGTMAIPMLADKTKSIARAYGVLEEKQGVAYRGLFIIDPNGMVRQITVNDMPVGRNVEEVLRLLEAFQFVEKHGEVCPANWKKGDPGLKVDHNK

SEQ ID NO: 21208 - protein, 226 aa, Leishmania major
MLRRLSTSSFLKRAQFRGFAATSPLLNLDYQMYRTATVREAAPQFSGQAVVNGAIKDINMNDYKGKYIVLFFYPMDFTFVCPTEIIAFSDRHADFEKLNTQVVAVSCDSVYSHLAWVNTPRKKGGLGEMHIPVLADKSMEIARDYGVLIEESGIALRGLFIIDKKGILRHSTINDLPVGRNVDEALRVLEAFQYADENGDAIPCGWKPGQPTLDTTKAAEFFEKNM

SEQ ID NO: 21209 - protein, 199 aa, Leishmania major
MSCGNAKINSPAPSFEEVALMPNGSFKKISLSSYKGKWVVLFFYPLDFTFVCPTEVIAFSDSVSRFNELNCEVLACSIDSEYAHLQWTLQDRKKGGLGTMAIPMLADKTKSIARSYGVLEESRGVAYRGLFIIDPHGMLRQITVNDMPVGRSVEEVLRLLEAFQFVEKHGEVCPANWKKGAPTMKPEPKASVEGYFSKQ

SEQ ID NO: 21210 - protein, 199 aa, Leishmania major
MSCGNAKINSPAPSFEEVALMPNGSFKKISLSSYKGKWVVLFFYPLDFSFVCPTEVIAFSDSVSRFNELNCEVLACSIDSEYAHLQWTLQDRKKGGLGTMAIPMLADKTKSIARSYGVLEESQGVAYRGLFIIDPHGMLRQITVNDMPVGRSVEEVLRLLEAFQFVEKHGEVCPANWKKGAPTMKPEPNASVEGYFSKQ

SEQ ID NO: 21211 - protein, 226 aa, Leishmania infantum
MLRRLPTSCFLKRSQFRGFAATSPLLNLDYQMYRTATVREAAPQFSGQAVVNGAIKDINMNDYKGKYIVLFFYPMDFTFVCPTEIIAFSDRHADFEKLNTQVVAVSCDSVYSHLAWVNTPRKKGGLGEMHIPVLADKSMEIARDYGVLIEESGIALRGLFIIDKKGILRHSTINDLPVGRNVDEALRVLEAFQYADENGDAIPCGWKPGQPTLDTTKAGEFFEKNM

SEQ ID NO: 21212 - protein, 185 aa, Leishmania infantum
INCPAPPFEEVALMPNGSFKKISLAAYKGKWVVLFFYPLDFTFVCPTEIIAFSENVSRFNELNCEVLACSMDSEYAHLQWTLQDRKKGGLGAMATPMLADKTKSIARAYGVLEEKQGVAYRGLFIIDPNGMVRQITVNDMPVGRNVEEVLRLLEAFQFVEKHGEVCPANWKNGAPTMKPEPKASV

SEQ ID NO: 21213 - protein, 226 aa, Trypanosoma brucei
MLRRFSMLPLSGGIARRSFFRTAPLFNLDYQAYRTATVREAAPEFAGKAVVDGKIKDISMNDYKGKYIVLFFYPLDFTFVCPTEIVSFSDSHAEFEKLNTQVIAVSCDSHFSHLAWVETPRKKGGLGEMKIPLLSDFTKEISRDYGVLVEEQGLSLRALFVIDDKGILRHVTINDLPVGRNVDEVLRVVQAFQYADKTGDVIPCNWKPGKETMKVEAAKEYFEKNL

SEQ ID NO: 21214 - protein, 199 aa, Trypanosoma cruzi
MSCGDAKLNHPAPDFNETALMPNGTFKKVALTSYKGKWLVLFFYPMDFTFVCPTEICQFSDRVKEFSDIGCEVLACSMDSEYSHLAWTSIERKRGGLGQMNIPILADKTKCIMKSYGVLKEEDGVAYRGLFIIDPKQNLRQITVNDLPVGRDVDEALRLVKAFQFVEKHGEVCPANWKPGDKTMKPDPEKSKEYFGAVA

SEQ ID NO: 21215 - protein, 199 aa, Trypanosoma cruzi
MSCGDAKLNHPAPDFNETALMPNGTFKKVALSSYKGKWLVLFFYPMDFTFVCPTEICQFSDRVKEFSDIGCEVLACSMDSEYSHLAWTSVEAKRGGLGQMNIPILADKTKCIMKSYGVLKEEDGVAYRGLFIIDPKQNLRQITVNDLPVGRDVDEALRLVKAFQFVEKHGEVCPANWKPGDKAMKPDPEKSKEYFGAVA

SEQ ID NO: 21216 - protein, 226 aa, Trypanosoma cruzi
MFRRMAVTSLQKGLSRRAFCNTLRLLNLDYQAYKTATVREAAPEWAGKAVVNGKIQDISLNDYKGKYVVLLFYPMDFTFVCPTEITAFSDAQAEFDKINTQVVAVSCDSQYSHLAWINTPRNKGGLGEMSIPVLSDLTKEIARDYGVLIEEQGISLRGLFIIDDKGILRHITVNDLPVGRNVEEVLRVVQAFQYVDKNGDVIPCNWRPGKPTMKTEKANEYFEKNA

SEQ ID NO: 21217 - protein, 196 aa, Trichomonas vaginalis
MLVGKPAPAFKGQAVFPDTDFKEVSLEQYKGKWLVLFSYPLDFTFVCPTEIIEFSNKYEEFKKIGCEVLGLSVDSVFTHLAWINTPRKEGGLGEIKYPLIGDLGAKIAKEYGFYMCEAGHTLRGTAIIDPEGIIRHVQMNHPDVGRNVDEILRLIKAYQFAAKHGEVCPAQWHGEGDLTIKPNPKASKEYFGKANN

SEQ ID NO: 21218 - protein, 201 aa, Giardia intestinalis
MPVPIPGTPCPDFEVDVVTPELKFAKRKSSDYKGKYLIVFFYPLDFTFVCPSEIIHFSNLAEQLKKKCNAEIIIGSTDSVYSHYAWCLQGQNEGGIGTCKCDLFADTNHKMARDFGVLVEDAGIALRGMFIVSDKGVVRHVTINDLPVGRSVEEAMRLVQAFQYADKTGGVIPCGWTPEKNDTIIPDPEKKKEYFSKTFKK

SEQ ID NO: 21219 - protein, 273 aa, Entamoeba histolytica
MKRRKIIKYDSPSYDDIADKQRNELSNVYNEILQKKLREKARMEVMKEIKAKECQEKECCKECCCPRIKAFKKFINTFEKAQIGKEAPEFKAPAYCPCGSIKEIDINEYRGKYVVLLFYPLDWTFVCPTEMIGYSELAGQLKEIDCEVIGVSVDSVYCHQAWCEADKSKGGVGKLTFPLVSDIKRCISIKYGMLNVEAGIARRGYVIIDDKGKVRYIQMNDDGIGRSTEETIRIVKAIQFSDEHGAVCPLNWKPGKDTIEPTPDGIKKYLTAH

SEQ ID NO: 21220 - protein, 233 aa, Entamoeba histolytica
MSCNQQKECCKKECQEKECCKECCCPRIKAFKKFINTFEKAQIGKEAPEFKAPAYCPCGSIKEIDINEYRGKYVVLLFYPLDWTFVCPTEMIGYSELAGQLKEINCEVIGVSVDSVYCHQAWCEADKSKGGVGKLTFPLVSDIKRCISIKYGMLNVEAGIARRGYVIIDDKGKVRYIQMNDDGIGRSTEETIRIVKAIQFSDEHGAVCPLNWKPGKDTIEPTPDGIKKYLTAH

SEQ ID NO: 21221 - protein, 226 aa, Entamoeba histolytica
GCCKKECQEKECCKECCCPRIKAFKKFINTFEKAQIGKEAPEFKAPAYCPCGSIKEIDINEYKGKYVVLLFYPLDWTFVCPTEMIGYSELAGQLKEINCEVIGVSVDSVYCHQAWCEADKSKGGVGKLTFPLVSDIKRCISIKYGMLNVEAGIARRGYVIIDDKGKVRYIQMNDDGIGRSTEETIRIVKAIQFSDEHGAVCPLNWKPGKDTIEPTPDGIKKYLTAH

SEQ ID NO: 21222 - protein, 218 aa, Entamoeba histolytica
EKECCKECCCPRIKAFKKFINTFEKAQIGKEAPEFKAPAYCPCGSIKEIDINEYKGKYVVLLFYPLDWTFVCPTEMIGYSELAGQLKEINCEVIGVSVDSVYCHQAWCEADKSKGGVGKLTFPLVSDIKRCISIKYGMLNVEAGIARRGYVIIDDKGKVRYIQMNDDGIGRSTEETIRIVKAIQFSDEHGAVCPLNWKPGKDTIEPTPDGIKKYLTAH

SEQ ID NO: 21223 - protein, 208 aa, Entamoeba histolytica
ARVKAFKKFINTFEKAQIGKEAPEFKAPAYCPCGSIKEIDINEYKGKYVVLLFYPLDWTFVCPTEMIGYSELAGQLKEINCEVIGVSVDSVYCHQAWCERDKTAKEEYGKLTFPLVSDIKRCISIKYGMLNVEAGIARRGYVIIDDKGKVRYIQMNDDGIGRSTEETIRIVKAIQFSDEHGAVCPLNWKPGKDTIEPTSDGIKKYLTH

SEQ ID NO: 21224 - protein, 231 aa, Entamoeba histolytica
AREKECCKKECQEKECQEKECCCPRIKAFKKFINTFEKAQIGKEAPEFKAPAYCPCGSIKEIDINEYKGKYVYCCFIHWIGHLFVPTEMIGYSELAGQLKEINCEVIGVSVDSVYCHQAWCEADKSKGGVGKLTFPLVSDIKRCISIKYGMLNVEAGIARRGYVIIDDKGKVRYIQMNDDGIGRSTEETIRIVKAIQFSDEHGAVCPLNWKPGKDTIEPTPDGIKKYLTAH

SEQ ID NO: 21225 - protein, 133 aa, Entamoeba histolytica
GSIKEIDINEYRGKYVVLLFYPLDWTFVCPTEMIGYSELAGQLKEINCEVIGVSVDSVYCHQAWCEADKSKGGVGKLTFPLVSDIKRCISIKYGMLNVEAGIARRGYVIIDDKGKVRYIQMNDDGIGRSTEET

SEQ ID NO: 21226 - protein, 133 aa, Entamoeba histolytica
GSIKEIDINEYKGKYVVLLFYPLDWTFVCPTEMIGYSEVAGQLKEINCEVIGVSVDSVYCHQAWCEADKSKGGVGKLGFPLVSDIKRCISIKYGMLNVETGVSRRGYVIIDDKGKVRYIQMNDDGIGRSTEET

SEQ ID NO: 21227 - protein, 196 aa, Toxoplasma gondii
MPAPMVSQPAPAFEAEAVMADGSFGKISLSQFKGKKYVVLFFYPFDFTFVCPSEILAFHRLHGEFEKRGCQLLGVSVDSKFVHNAWRNVELKDGGIGKISFPLLADVSHKMAEDYGVLHPEGMAFRGLFLIDKEGVLQHCVINNLPLGRSADEALRMLDALQHVEQYGEVCPANWKKGDKAMKPTAEGVKEYLGSK

SEQ ID NO: 21228 - protein, 283 aa, Toxoplasma gondii
MAACLRAARLSLRQMEGLIEPSVRGRSSPLSMVRLLPSSSVSSSSPSPPSALSSPSAPSSPFVSAFQGLVSGKRAFSTADSPNGLCLVTRIAPDFTADAVMPNGEIQKVTLSEVYRSGSGVVLLFYPLDFTFVCPSEILAFNAAVDEFEALGFKVWGVSVDSAYTHQAWTRTAPAEGGIGQLRFPLVSDLDKTISRKFHSLLNNSVALRTLAIVDKTGTVRHLTVNDLPLGRSVEEALRVCEMIREVEKNGGKQVCPANWRRGEKMMHASFEGVKNYLGQLKN

SEQ ID NO: 21229 - protein, 194 aa, Prochlorococcus marinus subsp. pastoris str. CCMP1378
MSLRVGQEAPDFTATAVYDQEFKDITLSSYKGKWVVLFFYPLDFTFVCPTEITAFSDEFNKFSDLNTEVLGVSVDSKHCHLAWIQTPRNEGGIGDINYPLVSDLKREICQAYNVLNDDGEADRGLFLINPEGIVMHTTVNKAPVGRNVDETLRILQGYQYVAANPDEVCPANWTPGEKTMLEDPKGSKEYFSAL

SEQ ID NO: 21230 - protein, 186 aa, Salmonella typhimurium
SLINTKIKPFKNQAFKNGEFIEVTEKDTEGRWSVFFFYPADFTFVCPTELGDVADHYEELQKLGVDVYSVSTDTHFTHKAWHSSSETIAKIKYAMIGDPTGALTRNFDNMREDEGLADRATFVVDPQGIIQAIEVTAEGIGRDASDLLRKIKAAQYVAAHPGEVCPAKWKEGEATLAPSLDLVGKI

SEQ ID NO: 21231 - protein, 184 aa, Salmonella typhimurium
MSLINTKIKPFKNQAFKNGEFIEVTEKDTEGRWSVFFFYPADFTFVCPTELGDVADHYEELQKLGVDVYSVSTDTHFTHKAWHSSSETIAKIKYAMIGDPTGALTRNFDNMREDEGLADVRPLLLTRRVSSRRSKLPLKVSAVTRLTCCVKLKQHSTLPLTQAKYARRNGKKANDSGSILRPGR

SEQ ID NO: 21232 - protein, 177 aa, Encephalitozoon cuniculi
MFPKTLTDSKYKAFVDGEIKEISLQDYIGKYVVLAFYPLDFTFVCPTEINRFSDLKGAFLRRNAVVLLISCDSVYTHKAWASIPREQNGVLGTAWPMVWDAKRELCNQFGLYDEENGHPMRSTVILAKDLSVRHISSNYHAIGRSVDEIIRLIDAITFNDENGDICPAEWRSENKDN

SEQ ID NO: 21233 - protein, 219 aa, Schistosoma mansoni
MLLQGFIKGALRYNRSSVSNLCRHYAAHVQRPAPDFCGTAVVDGQFKEIKLRDFAGKYLVLFFYPLDFTFVCPTELTAFSDRIDEFKNEGVEVVGVSTDSHFSHLAWINTPRKEGGLGGLRYPLLADYQKQVTRDYGVLHEELGVALRGLFIISADGIIRQITINDLPAGRSVDEVLRLVRAFQYTDKYGEVCPADWQPKGPTIKPDLKKYKEYFHKVN

SEQ ID NO: 21234 - protein, 194 aa, Schistosoma mansoni
MLLPNQPAPDFEGTAVIGTELRPISLSQFQGKYVLLVFYPLDFTFVCPTELIAFSERAAEFQSRGCQVIACSTDSVYAHLAWTKLDRKAGGLGQMNIPLLSDKNLRISRAYEVLDEQEGHAFRGMFLIDRKGILRQITVNDRPVGRSVDEAIRLLDAFIFFEKHGEVCPANWKPNSATIKPDPVASLSYFSSVH

SEQ ID NO: 21235 - protein, 185 aa, Schistosoma mansoni
MVLLPNRPAPEFKGQAVINGEFKEICLKDYRGKYVVLFFYPADFTFVCPTEIIAFSDQVEEFNSRNCQVIACSTDSQYSHLAWDNLDRKSGGLGHMKIPLLADRKQEISKAYGVFDEEDGNAFRGLFIIDPNGILRQITINDKPVGRSVDETLRLLDAFQFVEKHGEVCPVNWKRGQHGIKVNQK

SEQ ID NO: 21236 - protein, 194 aa, Fasciola hepatica
MLQPNMPAPNFSGQAVVGKEFKTISLSDYKGKWVILAFYPLDFTFVCPTEIIAFSDQMEQFARRNCAVIFCSTDSVYSHLQWTKMDRKVGGIGQLNFPLLAEKNMSISRAYGVLDEEQGNTYRGNFLIDPKGVLPQITVNDRPVGRSVEEALRLLDAFIFHEEHGEVCPANWKPKSKTIVPTPDGSKAYFSSAN

SEQ ID NO: 21237 - protein, 194 aa, Fasciola hepatica
MLQPNMPAPNFSGQAVVGKEFETISLSDYKGKWVILAFYPLDFTFVCPTEIIAISDQMEQFAQRNCAVIFCSTDSVYSHLQWTKMDRKVGGIGQLNFPLLADKNMSVSRAFGVLDEEQGNTYRGNFLIDPKGVLRQITVNDDPVGRSVEEALRLLDAFIFHEEHGEVCPANWKPKSKTIVPTPDGSKAYFSSAN

SEQ ID NO: 21238 - protein, 193 aa, Echinococcus granulosus
MAAVVGKLAPSFTCKALVDGELKDVSLSDYRGKYVILFFYPMDFTFVCPTEIIAFNDRADEFHQRGCQLLACSTDSGYCHLAWNNVSRKEGGVQGMRIPMLADTNHKISRDYGVLIEDQGIALRGLFIIDDKGVLRQITINDLPVGRSVDEALRLLDAFQFTDKHGEVCPANWQPGSKTFKPSAGDLKSFMSS

SEQ ID NO: 21239 - protein, 185 aa, Echinococcus granulosus
APSFTCKALVDGELKDVSLSDYRGKYVILFFYPMDFTFVCPTEIIAFNDRADEFHQRGCQLLACSTDSGYCHLAWNNVSRKEGGVQGMRIPMLADTNHKISRDYGVLIEDQGIALRGLFIIDDKGVLRQITINDLPVGRSVDEALRLLDAFQFTDKHGEVCPANWQPGSKTFKPSAGDLKSFMSS

SEQ ID NO: 21240 - protein, 193 aa, Echinococcus multilocularis
MVALVGKLAPSFTCKALVDGELKDVSLSDYRGKYVILFFYPMDFTFVCPTEIIAFNDRADEFRQRGCQLLACSTDSGYCHLAWNNVSRKEGGVQGMRIPMLADTNHKISRDYGVLIEDQGIALRGLFIIDDKGVLRQITINDLPVGRSVDEALRLLDAFQFTDKHGEVCPANWHPGSKTFKPSAGDLKSFMSS

SEQ ID NO: 21241 - protein, 195 aa, Caenorhabditis elegans
MSKAFIGKPAPQFKTQAVVDGEFVDVSLSDYKGKYVVLFFYPLDFTFVCPTEIIAFSDRAEEFKAINTVVLAASTDSVFSHLAWINQPRKHGGLGEMNIPVLADTNHQISRDYGVLKEDEGIAFRGLFIIDPSQNLRQITINDLPVGRSVDETLRLVQAFQFVEKHGEVCPAGWTPGSDTIKPGVKESQEYFKKH

SEQ ID NO: 21242 - protein, 576 aa, Caenorhabditis elegans
MVRVTILHPDLGIGGAERLIVDAAVGLQDRGHSVRIFTNQYSRSHCFQETLDLDICTVVPWIPRSIFGKGHALCAYLKMIIAALYIVIYHKDTDVILSDSVSASQFVLRHFSKAKLVFYCHFPDRLLTKRDGNLKAFYRNIIDWIEEYTTGLADVICVNSNFTKNVVRETFKSLASQELTVLYPSLNTEFFDSIEASDDFGEEIPRGTKYVFTSLNRFERKKNIVLALDAFEKLKSNLPADEFSQCHLVIAGGYDLKNPENIEHYDELVEHMKKLELPADQIVFLHSPSDTQKVNLIRRSRAVLYTPDREHFGIVPVEAMYLGTPVIAVNTGGPCESVRNNETGFLVDQTAEAFAEKMIDLMKDEEMYRRMSEEGPKWVQKMSKAFIGKPAPQFKTQAVVDGEFVDVSLSDYKGKYVVLFFYPLDFTFVCPTEIIAFSDRAEEFKAINTVVLAASTDSVFSHLAWINQPRKHGGLGEMNIPVLADTNHQISRDYGVLKEDEGIAFRGLFIIDPSQNLRQITINDLPVGRSVDETLRLVQAFQFVEKHGEVCPAGWTPGSDTIKPGVKESQEYFKKH

SEQ ID NO: 21243 - protein, 226 aa, Caenorhabditis elegans
MFSSAVRALCRTVPTVATRQLSTSRALLSLRPLGPKNTVPAFKGTAVVDGDFKVISDQDYKGKWLVMFFYPLDFTFVCPTEIIAYGDRANEFRSLGAEVVACSCDSHFSHLAWVNTPRKDGGLGDMDIPLLADFNKKIADSFGVLDKESGLSYRGLFLIDPSGTVRHTTCNDLPVGRSVDETLRVLKAFQFSDKHGEVCPADWHEDSPTIKPGVATSKEYFNKVNK

SEQ ID NO: 21244 - protein, 195 aa, Ascaris suum
MSKAMIGKPAPEFTATAVVDGDFKSISLSDYKGKYVVLFFYPMDFTFVCPTEIIAFSEHVGEFKKLGVEVLAASTDSQFSHLAWINTPRKQGGLGEMKIPIISDNNHQISRDYGVLKEDDGIAYRGLFIIDPKGILRQITVNDLPVGRSVTETLRLVQAFQFVDKHGEVCPAGWTPGADTIKPGVKESKAYFEKH

SEQ ID NO: 21245 - protein, 247 aa, Acanthocheilonema viteae
MTLAGSKAFIGQPAPNFKTTAVMNGDFKEISLCQFKGKYVVLFFYPLDFTFVCPTEIIAFSDRIAEFKQLDVAVMACSTDSHFSHLAWVNTDRKMGGLGPMNIPILADTNHEISRAYGVLKEDDGIAYRGLFIIDPKGILRQITINDLPVGRSVDETLRLIQAFQFVDKHGEVCPANWHPGSETIKPGVKESKAYFQNIENEPLYNVDQLSNFFNICVLNTFDEYGISALLYSVILIVLDDIICRFL

SEQ ID NO: 21246 - protein, 199 aa, Brugia malayi
MTLAGSKAFIGQPAPNFKTTAVVNGDFKEISLGQFKGKYVVLLFYPLDFTFVCPTEIIAFSDRIAEFKQLDVAVMACSTDSHFSHLAWVNTDRKMGGLGQMNIPILAYTNHVISRAYGVLKEDDGIAYRGLFIIDPKGILGQITINDLPVGRSVDETLRLIQAFQFVDKHGEVCPANWHPGSETIKPGVKESKAYFEKH

SEQ ID NO: 21247 - protein, 229 aa, Brugia malayi
MIRSVLASVSPLRQILASQLCTSSITLAGIRPLGPKNKAPDFSGTAVVNGDFKTISMKDYKGKWLILFFYPLDFTFVCPTEITAFSDRCAEFQKLNTELIACSCDSHFSHLAWIQTPRSEVGGLGDMKIPVLADFNKDIANAFGVLDHETGISYRGLFLIDPSGEIRHSLVNDLSVGRSVDEAFRTLKAFQFVEKHGEVCPANWSDDKPTIKPGIKESKEYFKKVDGHT

SEQ ID NO: 21248 - protein, 163 aa, Brugia malayi
MTLAGSKAFIGQPAPNFKTTAVVNGDFKEISLGQFKGKYVVLFFYPLDFTFVCPTEIIAFSDRIAEFKQLDVAVMACSTDSHFSHLAWVNTDRKMGGLGQMNIPILADTNHVISRAYGVLKEDDGIAYRGLFIIDPKGILRQITINDLPVGRSVDETLRLIQA

SEQ ID NO: 21249 - protein, 199 aa, Onchocerca volvulus
MTLAGSKAFIGQPAPNFKTTAVVNGDFKEISLNQFKGKYVVLFFYPLDFTFVCPTEIIAFSDRISEFKKLDVAVMACSTDSHFSHLAWVNTDRKMGGLGQMNIPILADTNHAISKAYGVLKEDEGIAYRGLSIIDSKGILRQITVNDLPVGRSVDETLRLVQAFQFVDNHGEVCPANWQPGSETIKPEVKESKEYFGKH

SEQ ID NO: 21250 - protein, 199 aa, Onchocerca volvulus
MTLAGSKAFIGQPAPNFKTTAVVNGDFKEISLNQFKGKYVVLFFYPLDFTFVCPTEIIAFSDRISEFKKLDVAVMACSTDSHFSHLAWVNTTEKWVGLGQMNIPILADTNHAISKAYGVLKEDEGIAYRGLFIIDSKGILRQITVNDLPVGRSVDETLRLIQAFQFVDNHGEVCPANWQPGSETIKPEVKESKEYFGKH

SEQ ID NO: 21251 - protein, 199 aa, Dirofilaria immitis
MTLAGSKAFIGQPAPNFKTTAVVNGDFKEISLCQFKGKYVVLFFYPLDFTFVCPTEIIAFSDRIAEFKKLDVAVMACSTDSHFSHLAWVNTDRKMGGLGQMNIPILADTNHTISRAYGVLKEDDGIAYRGLFIIDPKGILRQITINDLPVGRSVDETLRLIQAFQFVDNHGEVCPANWQPGSEAIKPGVKESKAYFEKH

SEQ ID NO: 21252 - protein, 199 aa, Dirofilaria immitis
MTLAGSKAFIGQPAPNFKTTAVVNGDFKEISLCQFKGKYVVLFFYPLDFTFVCPTEIIAFSDRIAEFKQLDVVVMACSTDSHFSHLAWINTDRKMGGLGQMNIPILADTNHTISRAYGVLKEDDGIAYRGLFIIDPEGILRQITVNDLPVGRSVDETLRLIQAFQFVDNHGEVCPANWHPGSEAIKPGVKESKAYFEKH

SEQ ID NO: 21253 - protein, 193 aa, Ostertagia ostertagi
  unsure (1)..(193): unsure at all Xaa locations
AFIGKPAPDFATKAVYNGDFIDVKLSDYKGKYTVLFFYPLDFTFVCPTEIIAFSDRVEEFKKIDAAVLACSXDSVFSHLAWINTPRKMGGLGDMNIPVLADTNHQIAKDYGVLKEDEGIAYRGLFIIDPKGILRQITVNDLPVGRSVDETLRLVQAFQYVDKHGEVCPAGWTPGKATIKPGVKDSKEYFSKAN

SEQ ID NO: 21254 - protein, 104 aa, Nostoc punctiforme
MSLTYGTEGSLRVGQQAPDFTATAVVDQEFKTIKLSDYRGKYVVLFFYPLDFTFVCPTEITAFSDRYEEFKKINTEVLGASVDSEFSPSLGFNRSVVWWCRRPD

SEQ ID NO: 21255 - protein, 219 aa, Aplysia californica
MVNLGDVFPNFTANTSKGEIKFHDWLGGSWAILFSHPADYTPVCTTELARVVTLAPEFEKRGVKLIALSCDGVNSHVGWGKDVMTFAGGKQDDLPYPIVADEERKLAVELGMIDPDERTKEGLPLTARAVFIIGPDKKLKLSLLYPATTGRNFNGILRVVDSLQLTATQKVATPVDWEKGQKCMVLPTIPMDEARKLFPNMEVRDVPSGEGYLRFTPMS

SEQ ID NO: 21256 - protein, 223 aa, Biomphalaria glabrata
NSARAGGQVYPQETKRTIGHTIQWSQAVISKPAPDWNGTAVIKGEFKDIKLSDFKGKYLVFFFYPLDFTFVCPTEIIAFSDRIDEFQKINTKVVGCSVDSQFTHLAWTNVPRSQGGLGKINYPLLSDITHEISKAYGVYLQDLGHSLRGLFIIDPKGTLRQITMNDLPVGRSVDETLRLVQAFQYTDKHGEVCPAGWKPGSATIIPDPKKSKEYFKQQSNDEL

SEQ ID NO: 21257 - protein, 207 aa, Vibrio cholerae
MLRSKKMVLVGRKAPDFTAAAVLGNGEIVDNFNFAEFTKGKKAVVFFYPLDFTFVCPSELIAFDNRYEDFLAKGVEVIGVSIDSQFSHNAWRNTAVENGGIGQVKYPLVADVKHEICKAYDVEHPEAGVAFRGSFLIDEEGMVRHQVVNDLPLGRNIDEMLRMVDALNFHQTHGEVCPAQWEAGKAGMEASPKGVAAFLSQYSADLK

SEQ ID NO: 21258 - protein, 194 aa, Streptomyces viridosporus
MGASSLQGEPVLTVGDKFPEFELTACVSLEKGKEFETINHKTYEGKWKIVFAWPKDFTFVCPTEIAAFGKLNDEFADRDAQILGFSGDSEFVHHAWRKDHDDLRDLPFPMMADSKHELMRALGIEGEDGFAKRAVFIVDQNNEIQFTMVTAGSVGRNPKEVLRVLDALQTDELCPCNWTKGDETLDPVALLAGE

SEQ ID NO: 21259 - protein, 221 aa, Ixodes scapularis
MGPLNLGDPFPNFTCDTTEGKIDFHEWLGNSWGILFSHPADYTPVCTSELARAAQLHHVFQKKGVKLIALSCDSVESHRGWIKDINAFGELPDGPFPYPIIADEKRDIAVKLGMLDPVEKDKEGLPLTCRAVFIIGPDKKMKLSMLYPATTGRNFDEVLRATDSLLVTETRKVATPAGWQKGTPCMVLPSVTEEEILKLFPTGIKQYEVPSGKNYLRTTMD

SEQ ID NO: 21260 - protein, 196 aa, Aedes aegypti
MPVPDLQKPAPKFSGTAVVNGAFKEIKLEDYAGKYLVLFFYPLDFTFVCPTEIIAFSDRVEEFEKIGCSVIGVSTDSHFTHLAWINTPRKQGGLGELRIPLLADKSMKISRDYGVLQEESGVPFRGLFVIDGKQNLRQVTVNDLPVGRSVDETLRLVQAFQFTDEHGEVCPANWKPGSKTMVADPQKSKEYFNAAN

SEQ ID NO: 21261 - protein, 234 aa, Drosophila melanogaster
MSFVARSLIRNVPLMGKAILSQQKQIAARLLHQTAPLAAVRVQQPAPDFKGLAVVDNSFQEVKLEDYRGKYLVLFFYPLDFTFVCPTEIVAFSERIKEFHDINTEVLGVSVDSHFSHLTWCNVDRKNGGVGQLKYPLLSDLTKKISADYDVLLDKEGISLRGTFIIDPNGILRQYSINDLPVGRSVDEVLRLIKAFQFVEQHGEVCPANWNPNSNPATIKPDVEESKKYFSKHG

SEQ ID NO: 21262 - protein, 194 aa, Drosophila melanogaster
MPQLQKPAPAFAGTAVVNGVFKDIKLSDYKGKYLVLFFYPLDFTFVCPTEIIAFSESAAEFRKINCEVIGCSTDSQFTHLAWINTPRKQGGLGSMDIPLLADKSMKVARDYGVLDEETGIPFRGLFIIDDKQNLRQITVNDLPVGRSVEETLRLVQAFQYTDKYGEVCPANWKPGQKTMVADPTKSKEYFETTS

SEQ ID NO: 21263 - protein, 242 aa, Drosophila melanogaster
MSKYLSVLLLSAALVGAAKPEDNESCYSFAGGSVYPDQPKGDHQLQYTKAVISKPAPQFEGTAVVNKEIVKLSLSQYLGKYVVLLFYPLDFTFVCPTEIIAFSDRIAEFKKIKTEVIGVSVDSHFTHLAWINTPRKEGGLGDVKIPLLSDLTHKISKDYGVYLESSGHALRGLFIIDQTGVLRQITMNDLPVGRSVDETIRLVQAFQYTDTHGEVCPAGWRPGADTIVPNPEEKTKYFAKNN

SEQ ID NO: 21264 - protein, 196 aa, Drosophila melanogaster
MRMLNINQVAPNFTTNAVVSGGYRNFALTDLRGRYVLLVFYPADFSYVCPTELQAFSDRAPEFRNVGCEVLACSTDSHFVHCAWMNTPRKNGGLGELDIPLLADKNMKIARDYGVLDEDTGLALRALFIIDREGRIRQITVNDMGVGRSVDEALRLVQAFQFSDEFGEVCPVNWRPGAKTMKADATGKEEYFKHAI

SEQ ID NO: 21265 - protein, 168 aa, Bacillus sp. YN-1
EFIEVSEESFKGQWSVLCFYPADFTFVCPTELEDLQNEYAALKELGVEVFSASTDTHFTHKGWHDSSETIGKITYAMIGDPSQTLSRNFDVLNEVSGLADRGTFIIDPDGVVQAAEINAEGIGRDASTLVNKIKAAQYVRNNPGEVCPAKWQEGDETLKPSLDLVGKI

SEQ ID NO: 21266 - protein, 215 aa, Plasmodium yoelii yoelii
MRVLNSLFSNVYRRSVRSFSHVTQKAHDFTAQGVNKNNEIINVQLSSYIGKKYCCLFFYPLNYTFVCPTEVIEFNKHVKSFEEKNVELLGISVDSVYSHIAWKNMPIEKGGIGNINFTLVSDINKEISKNYNVLYDNSFALRGLFIIDLEGKIRHKTVNDLSIGRNVNEVLRVIDSIIHVDTSGNVCPINWKKGDKSFKPNNEALLDYLNTEYKK

SEQ ID NO: 21267 - protein, 195 aa, Plasmodium yoelii yoelii
MPSIVGNQAPSFKAEAVFGDNTFGEVSLSDFIGKKYVLLYFYPLDFTFVCPSEIIALDKALDSFKERNVELLGCSVDSKFTHLAWKKTPLSQGGIGNIKHTLISDISKSIARSYDVLFNESVALRAFVLIDKQGVVQHLLVNNLALGRSVDEILRLIDALQHHEKYGDVCPANWQKGKESMKPSEEGVAKYLSNL

SEQ ID NO: 21268 - protein, 200 aa, Prochlorococcus marinus str. MIT 9313
MTTNECLRVGQQAPDFNATAVVDQEFKEISLSQYRGKYVVLFFYPLDFTFVCPTEITAFSDRYTDFSSRNTEVLGVSVDSQFSHLAWIQTSRKEGGLGDINYPLIADLKKEISTAYNVLDDEAGVALRGLFIIDPDGVIMHSTINNLPVGRNVDETLRVLQAFQYVQSHPDEVCPANWTPGEKTMKPDPVGSKEFFASIN

SEQ ID NO: 21269 - protein, 200 aa, Pasteurella multocida
MVLVTRQAPDFTAAAVLGNGEIVDNFNFKQHIAGKAAVVFFYPLDFTFVCPSELIAFDHRYEEFQKRGVEVVGISIDSEFSHNAWRKTPVENGGIGEVKYALVADIKHEIAQAFGIEHPEAGVALRASFLIDKDGVVRHQVVNDLPLGRNIDEMLRMVDALQFHEEHGDVCPAQWEKGKEGMTGSPEGVAKYLKQHADQL

SEQ ID NO: 21270 - protein, 202 aa, Rickettsia conorii
MNMSVFVGKTAPDFTAKAIMPNNNIDDKFKLSNYAAGDNIVLFFYPLDFTFVCPSEIIAFHNKLGEFTERRTKVVAVSVDSHFSHLAWKNTPHNKGGLGQVQFPMVSDIKKDISSKYNVLNEDGVALRGTFLIDKDFIVRHMLVNDLPIGRDINYTLKVIDALTHHQKHGEVCPAGWHKGEEAITPSHEGIAHYLSSHAEKL

SEQ ID NO: 21271 - protein, 200 aa, Rickettsia prowazekii
MSVFVGKTAPDFTAKAIMPNNNIDDKFKLSDYAAGDNIVLFFYPLDFTFVCPSEIIAFHNKLGEFTERRTKVIAVSVDSHFSHLAWKNTPHNKGGLGQVQFPMVSDITKDISSKYNVLNEDGIALRGTFLIDKDFIVRHMLVNDLPIGRDINYTLKVIDALTHHQKHGEVCPAGWHKGEEAITPSHEGIAHYLSSHAEKL

SEQ ID NO: 21272 - protein, 199 aa, Cyprinus carpio
MAAGKAHIGKPAPDFTAKAVMPDGQFKDLSLSEYKGKYVVLFFYPLDFTFVCPTEIIAFSDAVEEFRKINCEVIGASVDSHFCHLAWINTPRKQGGLGHMNVPLVADSLRSISQDYGVLKEDEGIAYRGLFIIDDKGILRQITINDLPVGRSIDETLRLVQAFQFTDKHGEVCPAGWKPGKDTIKPDVQQSKDYFSKQH

SEQ ID NO: 21273 - protein, 209 aa, Methanothermobacter marburgensis str. Marburg
MPLIGDKFPEMEVQTTHGLMKLPAEFKGRWFILFSHPADFTPVCTTEFVAFQEVYPELRELDCELVGLSVDQVFSHIKWIEWIEENLDTEIEFPVIADTGRVADTLGLIHPARPTNTVRAVFVVDPEGIIRAILYYPQELGRNIPEIVRMIRAFRVIDAEGVAAPANWPDNQLIGDHVIVPPASDIETARKRKEEYECYDLALPPQRKW

SEQ ID NO: 21274 - protein, 199 aa, Oncorhynchus mykiss
MAAGKARIGHLAPGFTAKAVMPDGQFKDISMSDYRGKYVVFFFYPLDFTFVCPTEIIAFSDAAEEFRKIGCEVIGASVDSHFCHLAWTNTPRKHGGLGAMKIPLVADTLRSISTDYGVLKEDEGIAYRGLFIIDDKGVLRQITINDLPVGRSVDETLRLVQAFQFTDKHGEVCPAGWKPGSDTIKPDVQKSKDFFSKQQ

SEQ ID NO: 21275 - protein, 200 aa, Oncorhynchus mykiss
MAAGKARIGHLAPGFTAKAVMPDGQFKDISMSDYRGKYVVFFFYPLDFTFVCPTEIIAFSDAAEEFRKIGCEVIGASVDSHFCHLAWTNTPRKHGGLGAMKIPLVADTMRSISTDYGVFEGGMRASPTGGLFIIDDKGVLRQITINDLPVGRCVDEILRLVQAFQFTDKHGEVCPAGWKPGSDTIKPDVQKSKDFFSKQQ

SEQ ID NO: 21276 - protein, 195 aa, Chlamydia trachomatis
MGSLVGRQAPDFSGKAVVCGEEKEISLADFRGKYVVLFFYPKDFTYVCPTELHAFQDRLVDFEERGAVVLGCSVDDIETHSRWLAVARNAGGIEGTEYPLLADPSFKISEAFGVLNPEGSLALRATFLIDKYGVVRHAVINDLPLGRSIDEELRILDSLIFFENHGMVCPANWRSGERGMVPSEEGLKEYFQTMD

SEQ ID NO: 21277 - protein, 210 aa, Bacteroides fragilis
MRSLIGKQAPKFDATAVINGHEIVQNFSLDQYKGKKYVVFFFYPMDFTFVCPTELHAFQEKLEEFEKRDVAVVGCSVDSEYSHFSWLQMPKNEGGIQGVKYPIVSDFSKSISESYGVLAGSYAPDENGNWVCEGTPVAFRGLFLIDKEGVVRHCVINDLPLGRNVDEVLRMVDALQHFEEYGEVCPANWSKGKDAMKATEDGVANYLSKH

SEQ ID NO: 21278 - protein, 188 aa, Bacteroides fragilis
MEPIINSQMPEFKVQAFQNGSFKTVSSEDVKGKWAIFFFYPADFTFVCPTELVDVAEKYEQFQAMGVEVYSVSTDSHFVHKAWHDASESIRKIKYPMLADPTGILSRGFGVMIEEDGMAYRGTFLVNPEGKIKVAEIQDNNIGRNADELLRKVEAAQFVATHDGEVCPAKWKKGEATLKPSIDLVGKI

SEQ ID NO: 21279 - protein, 112 aa, Platichthys flesus
AFSDRAEEFRKIGCEVIGCSVDSHFSHLAWINTPRKQGGLGKMNIPLVADLTKSISRDYGVLKEDDGIAYRGLFVIDDKGTLRQITINDLPVGRSVDETLRLIQAFQHTDFA

SEQ ID NO: 21280 - protein, 200 aa, Cynops pyrrhogaster
MSAGKAQIGKPAPEFQAKAVMPGGEFKDIKLADYRGKYVVFFFYPLDFTFVCPTEIIAFSDRAEEFRKINCELIAASVDSHFCHLAWTNTSRKEGGLGSMKIPLVADTKRTISQDYGVLKEDEGISFRGLFIIDDKGILRQITINDLPVGRSVDETLRLVQAFQHTDKFGEVCPAGWKPGSDTIKPDISKSKEYFSKQKA

SEQ ID NO: 21281 - protein, 195 aa, Mycobacterium tuberculosis H37Rv
MPLLTIGDQFPAYQLTALIGGDLSKVDAKQPGDYFTTITSDEHPGKWRVVFFWPKDFTFVCPTEIAAFSKLNDEFEDRDAQILGVSIDSEFAHFQWRAQHNDLKTLPFPMLSDIKRELSQAAGVLNADGVADRVTFIVDPNNEIQFVSATAGSVGRNVDEVLRVLDALQSDELCACNWRKGDPTLDAGELLKASA

SEQ ID NO: 21282 - protein, 153 aa, Mycobacterium tuberculosis H37Rv
MLNVGATAPDFTLRDQNQQLVTLRGYRGAKNVLLVFFPLAFTGICQGELDQLRDHLPEFENDDSAALAISVGPPPTHKIWATQSGFTFPLLSDFWPHGAVSQAYGVFNEQAGIANRGTFVVDRSGIIRFAEMKQPGEVRDQRLWTDALAALTA

SEQ ID NO: 21283 - protein, 195 aa, Chlamydia muridarum
MGSLVGKQAPDFSGKAIVCGEEKEISLSDFRGKYVILFFYPKDFTYVCPTELHAFQDRLGDFEERGAVVIGCSVDDIETHSRWLAVERRAGGIQGTQYPLLADDSLEISKAFGVLNPEGSVALRATFLIDKDGVIRHAVINDLPLGRSIEEELRVLDSQIFFENHGMVCPANWQSGERGMVPSEEGLKEYFQTID

SEQ ID NO: 21284 - protein, 200 aa, SYNECHOCOCCUS SP. WH 8102
MTETGCLRVGQQAPDFTATAVVDQEFKEISLSQYRGKYVVLFFYPLDFTFVCPTEITAFSDRYADFSSKNTEVLGVSVDSQFSHLAWIQTPRNQGGLGDINYPLVADLKKEIATAYNVLDDAEGVALRGLFIIDPDGVIMHSTINNLPVGRNVDETLRVLQAFQYVQSNPDEVCPANWTPGEKTMKPDPKGSKEYFSAIG

SEQ ID NO: 21285 - protein, 198 aa, Helicobacter pylori 26695
MLVTKLAPDFKAPAVLGNNEVDEHFELSKNLGKNGAILFFWPKDFTFVCPTEIIAFDKRVKDFQEKGFNVIGVSIDSEQVHFAWKNTPVEKGGIGQVTFPMVADITKSISRDYDVLFEEAIALRGAFLIDKNMKVRHAVINDLPLGRNADEMLRMVDALLHFEEHGEVCPAGWRKGDKGMKATHQGVAEYLKENSIKL

SEQ ID NO: 21286 - protein, 198 aa, Helicobacter pylori J99
MLVTKLAPDFKAPAVLGNNEVDEHFELSKNLGKNGVILFFWPKDFTFVCPTEIIAFDKRVKDFHEKGFNVIGVSIDSEQVHFAWKNTPVEKGGIGQVSFPMVADITKSISRDYDVLFEEAIALRGAFLIDKNMKVRHAVINDLPLGRNADEMLRMVDALLHFEEHGEVCPAGWRKGDKGMKATHQGVAEYLKENSIKL

SEQ ID NO: 21287 - protein, 183 aa, Bacillus halodurans
MTDKRMVAKQAPRFEMDAVMPNKEFGKVSLEENMKNDKWTVLFFYPMDFTFVCPTEITSLSDRYDEFEDLDAEVIGVSTDTIHTHKAWINTSRDDNGLGDLKYPLAADTNHEVSREYGVLIEEEGIALRGLFIISPEGELMYSVVNHNNIGRDVDETLRVLQALQTGGLCPANWKPGQETLSV

SEQ ID NO: 21288 - protein, 200 aa, Salmonella enterica subsp. enterica serovar Typhi
MVLVTRQAPDFTAAAVLGSGEIVDKFNFKQHTNGKTTVLFFWPMDFTFVCPSELIAFDKRYEEFQKRGVEVVGVSFDSEFVHNAWRNTPVDKGGIGPVKYAMVADVKREIQKAYGIEHPDEGVALRGSFLIDANGIVRHQVVNDLPLGRNIDEMLRMVDALQFHEEHGDVCPAQWEKGKEGMNASPDGVAKYLAENISSL

SEQ ID NO: 21289 - protein, 187 aa, Salmonella enterica subsp. enterica serovar Typhi
MSLINTKIKPFKNQAFKNGEFIEVTEKDTEGRWSVFFFYPADFTFVCPTELGDVADHYEELQKLGVDVYSVSTDTHFTHKAWHSSSETIAKIKYAMIGDPTGALTRNFDNMREDEGLADRATFVVDPQGIIQAIEVTAEGIGRDASDLLRKIKAAQYVAAHPGEVCPAKWKEGEATLAPSLDLVGKI

SEQ ID NO: 21290 - protein, 219 aa, Xerophyta viscosa
MPGLTIGDTIPNLELDTTQGRIKIHDYVGNGYVILFSHPGDFTPVCTTELGKMAAYADEFSKRGVKLLGLSCDDVQSHKEWIKDIEAYTPGCHVKYPIAADPTREIIQQLNMVDPDETESSKCAVPSRALHIIGPDKRIKLSFLYPASTGRNMDEVLRAVESLQQAAKHKVATPANWKPGEPVVIKPDVSSEEAKKLFPQGYKSVDLPSKKDYLRFTNV

SEQ ID NO: 21291 - protein, 187 aa, Nitrosomonas europaea
MSLINTTVKPFKATAYHNGDFVEITDKTLKGKWSVIVFYPADFTFVCPTELEDLADNYDEFQKIGVEVYGVSTDTHFTHKAWHDTSSVVRKVRYPLVGDPTRELSRNFDVLIEDAGLALRGSFIINPEGEIKAFEVQDNNIGRNAAELLRKVKAAQYVSMHEGEVCPAKWTEGAATLKPSIDLVGKI

SEQ ID NO: 21292 - protein, 198 aa, Homo sapiens
MASGNARIGKPAPDFKATAVVDGAFKEVKLSDYKGKYVVLFFYPLDFTFVCPTEIIAFSNRAEDFRKLGCEVLGVSVDSQFTHLAWINTPRKEGGLGPLNIPLLADVTRRLSEDYGVLKTDEGIAYRGLFIIDGKGVLRQITVNDLPVGRSVDEALRLVQAFQYTDEHGEVCPAGWKPGSDTIKPNVDDSKEYFSKHN

SEQ ID NO: 21293 - protein, 198 aa, Homo sapiens
MASGNARIGKPAPDFKATAVVDGAFKEVKLSDYKGKYVVLFFYPLDFTFVCPTEIIAFSNRAEDFRKLGCEVLGVSVDSQFNHLAWINTPRKEGGLGPLNIPLLGDVTRRLSEDYGVLKTDEGIAYRGLFIIDGKGVLRQITVNDLPVGRSVDEALRLVQAFQYTDEHGEVCPAGWKPGSDTIKPNVDDSKEYFSKHN

SEQ ID NO: 21294 - protein, 197 aa, Homo sapiens
  unsure (1)..(197): unsure at all Xaa locations
XSGNARIGKPAPDFKATAVVDGAFKEVKLSDYKGKYVVLFFYPLDFTFVXPTEIIAFSNRAEDFRKLGCEVLGVSVDSQFTHLAWINTPRKEGGLGPLNIPLLADVTRRLSEDYGVLKTDEGIAYRGLFIIDGKGVLRQITVNDLPVGRSVDEALRLVQAFQYTDEHGEVCPAGWKPGSDTIKPNVDDSKEYFSKHN

SEQ ID NO: 21295 - protein, 199 aa, Homo sapiens
MSSGNAKIGHPAPNFKATAVMPDGQFKDISLSDYKGKYVVFFFYPLDFTFVCPTEIIAFSDRAEEFKKLNCQVIGASVDSHFCHLAWVNTPKKQGGLGPMNIPLVSDPKRTIAQDYGVLKADEGISFRGLFIIDDKGILRQITVNDLPVGRSVDETLRLVQAFQFTDKHGEVCPAGWKPGSDTIKPDVQKSKEYFSKQK

SEQ ID NO: 21296 - protein, 271 aa, Homo sapiens
MEALPLLAATTPDHGRHRRLLLLPLLLFLLPAGAVQGWETEERPRTREEECHFYAGGQVYPGEASRVSVADHSLHLSKAKISKPAPYWEGTAVIDGEFKELKLTDYRGKYLVFFFYPLDFTFVCPTEIIAFGDRLEEFRSINTEVVACSVDSQFTHLAWINTPRRQGGLGPIRIPLLSDLTHQISKDYGVYLEDSGHTLRGLFIIDDKGILRQITLNDLPVGRSVDETLRLVQAFQYTDKHGEVCPAGWKPGSETIIPDPAGKLKYFDKLN

SEQ ID NO: 21297 - protein, 198 aa, Homo sapiens
MASGNARIGKPAPDFKATAVVDGAFKEVKLSDYKGKYVVLFFYPLDFTFVCPTEIIAFTTVKRTSAKLGCEVLGVSVDSQFTHLAWINTPRKEGGLGPLNIPLLADVTRRLSEDYGVLKNDEGIAYRGLFIIDGKGVLRQITVNDLPVGRSVDEALRLVQAFQYTDEHGEVCPAAWKPGRDTIKPNVDDSKEYFSKHN

SEQ ID NO: 21298 - protein, 199 aa, Homo sapiens [sequence omitted]

SEQ ID NO: 21299 - protein, 256 aa, Homo sapiens
MAAAVGRLLRASVARHVSAIPWGISATAALRPAACGRTSLTNLLCSGSSQAKLFSTSSSCHAPAVTQHAPYFKGTAVVNGEFKDLSLDDFKGKYLVLFFYPLDFTFVCPTEIVAFSDKANEFHDVNCEVVAVSVDSHFSHLAWINTPRKNGGLGHMNIALLSDLTKQISRDYGVLLEGSGLALRGLFIIDPNGVIKHLSVNDLPVGRSVEETLRLVKAFQYVETHGEVCPANWTPDSPTIKPSPAASKEYFQKVNQ

SEQ ID NO: 21300 - protein, 256 aa, Homo sapiens
MAAAVGRLLRASVARHVSAIPWGISATAALWPAACGRTSLTNLLCSGSSQAKLFSTSSSCHAPAVTQHAPYFKGTAVVNGEFKDLSLDDFKGKYLVLFFYPLDFTFVCPTEIVAFSDKANEFHDVNCEVVAVSVDSHFSHLAWINTPRKNGGLGHMNIALLSDLTKQISRDYGVLLEGSGLALRGLFIIDPNGVIKHLSVNDLPVGRSVEETLRLVKAFQYVETHGEVCPANWTPDSPTIKPSPAASKEYFQKVNQ

SEQ ID NO: 21301 - protein, 164 aa, Homo sapiens
GKYVVLFFYPLDFTFVCPTEIIAFSNRAEDFRKLGCEVLGVSVDSQFTHLAWINTPRKEGGLGPLNIPLLADVTRRLSEDYGVLKTDEGIAYRGLFIIDGKGVLRQITVNDLPVGRSVDEALRLVQAFQYTDEHGEVCPAGWKPGSDTIKPNVDDSKEYFSKHN

SEQ ID NO: 21302 - protein, 252 aa, Homo sapiens
MSFYLKPAIPFVAHNFYNLYGLYTMYLIMKSTEERGRNREKGDQVISGFEFENHPGNQNNYHSVLFLPGVGGLFSEACVRTADRKMSSGNAKIGHPAPNFKATAIMPDKNIAFSDTEEFKKFNCQVIGASVDSHFCQLAWIHTPKKQGGLGPRNIPLASDPKCTIAQDYGILKAEEGISFRGLFIVDDMGILRQITVNDLPVDCSVDETLRLVQAFQFTDKHREVCPAGWKPGSDTIKTDVQKSKEYLSKQE

SEQ ID NO: 21303 - protein, 220 aa, Homo sapiens
MRVQIFQLENKVLPGFPWACRVDLYGQIGFDAAAQCLSLSVSKAEPLVKKAPPELREQLARKTLSSDNLKYLFDNKDIMKVKQSKKKKEHSFRKNNGCIKPAPDFKATAVIIAFSDHAEDFRKLGCEVLGISVDSQFTHLAWINNPQREGDLGPLNIPLLAEITVNDLPVGRSVDEALRLVQAFQYAEEHAEVCPAGWKPGTDTIKLNVGDSKENLSKHN

SEQ ID NO: 21304 - protein, 127 aa, Sus scrofa
  unsure (1)..(127): unsure at all Xaa locations
LFFYPLDFTFVCPTEIIAFSDRAEEFHQLGCEVLGVSVDXQXTHLAWINTPRKEGGLGPLKIPLLADVTRNLSLDYGVLKEDEGIAYRGLFIIDGKGVLRQITVNDLPVGRXVDEALRLVQGXQYTD

SEQ ID NO: 21305 - protein, 209 aa, Cytophaga hutchinsonii
MSLVGKKAPSFVAPAVLNGYEVVEAFSLDQYLGKKYVVFYFYPKDFTFVCPTEILAFQEKLAAFEAKDTVVVGCSTDTENSHFAWLSMPKNKGGIQGVKYPLVADTAKTIATNYGVLGGNFDIDDNGQMIFVGAPIAYRGTFLIDKEGIVRHETVNDFPLGRNIDETLRMVEALQHVEKFGEVCPANWGEGKEAMKATVEGVSDYLAKN

SEQ ID NO: 21306 - protein, 185 aa, Cytophaga hutchinsonii
MQNRILSVGSAFPAFKKTAVVSIEKGKEFTEISSENLVNEDNQWTVMFWWPKDFTFVCPTEIAEFNNAFGDFRDRDTTLIGASTDSEFVHAAWRRDHEDLRGLKFPMLADTSKSLAEELGILEAAEKVALRATFIIDPQGIIRWVSVNDLNVGRNVKEVIRVLDALQTDELCPCNWEKGQETIHA

SEQ ID NO: 21307 - protein, 199 aa, Bos taurus
MACVCKAHVGKPAPEFQATAVVDGAFKEVKLSDYKGKYVVLFFYPLDFTFVCPTEIVAFSDRAAEFHKLNCEVLGVSVDSQFTHLAWINTPRKEGGLGPLNIPLLADVTRKLSSDYGVLKEDEGIAYRGLFVIDGKGVLRQVTINDLPVGRSVDEALRLVQAFQYTDEHGEVCPAGWTPGSDTIKPNVDDSKEYFSKHN

SEQ ID NO: 21308 - protein, 274 aa, Bos taurus
MEAPPPPPPLPATTLAPGRSRKLLLLPLLLFLLRAEAVRGFEAEERPRTREEECHFYAGGQVYPGEVSRVSVAEHSLHLSKAKISKPAPYWEGTAVINGEFKELKLTDYRGKYLVFFFYPLDFTFVCPTEIIAFGDRIDEFRSINTEVVACSVDSQFTHLAWINTPRRQGGLGSINIPLLADLNHQISKDYGVYLEDSGHTLRGLFIIDDKGILRQITLNDLPVGRSVDETLRLVQAFQYTDKHGEVCPAGWKPGSETIIPDPAGKLKYFDKLN

SEQ ID NO: 21309 - protein, 199 aa, Bos taurus
MSSGNAKIGHRAPQFKATAVMPDGQFKDISLADYKGKYVVFFFYPLDFTFVCPTEIIAFSDRAEEFKKLNCQVIGASVDSHFCHLAWINTPKKQGGLGPMNIPLISAPKRTIAQDYGVLKADEGISFRGLFIIDDKGILRQITINDLPVGRSVDETLRLVQAFQFTDKHGEVCPAGWKPGSDTIKPDVQKSKEYFSKQK

SEQ ID NO: 21310 - protein, 257 aa, Bos taurus
MAATAGRLFRASLIRHVSAIPWGISASAALRPAASRRMCLTNALWSGSDQAKFAFSTSSSYHAPAVTQHAPYFKGTAVVSGEFKEISLDDFKGKYLVLFFYPLDFTFVCPTEIIAFSDKASEFHDVNCEVVAVSVDSHFSHLAWINTPRKNGGLGHMNIALLSDLTKQISRDYGVLLEGPGLALRGLFIIDPNGVIKHLSVNDLPVGRSVEETLRLVKAFQFVEAHGEVCPANWTPESPTIKPHPTASREYFEKVNQ

SEQ ID NO: 21311 - protein, 195 aa, Bos taurus
  unsure (1)..(195): unsure at all Xaa locations
APAVTQHAPYFKGTAVVSGEFKEISLDDFKGKYLVLFFYPLDFTFVXPTEIIAFSDKASEFHDVNCEVVAVSVDSHFSHLAWINTPRKNGGLGHMNIALLSDLTKQISRDYGVLLEGPGLALRGLFIIDPNGVIKHLSVNDLPVGRSVEETLRLVKAFQFVEAHGEVCPANWTPESPTIKPHPTASREYFEKVNQ

SEQ ID NO: 21312 - protein, 141 aa, Bos taurus
MSSGNAKIGHRAPQFKATAVMPDGQFKDISLADYKGKYVVFFFYPLDFTFVCPTEIIAFSDRAEEFKKLNCQVIGASVDSHFCHLAWINTPKKQGGLGPMNIPLISDPKRTIAQDYGVLKADEGISFRGLFIIDDKGILRQ

SEQ ID NO: 21313 - protein, 105 aa, Bos taurus
VCPTEIIAFSDRAEEFKKLNCQVIGASVDSHFCHLAWINTPKKQGGLGPMNIPLISDPKRTIAQDYGVLKADEGISFRGLFIIDDKGILRQITINDLPVGRSVDE

SEQ ID NO: 21314 - protein, 672 aa, Mus musculus
MDSVILMKAAERVVREIPFWEDRDTAEEFQPSFFGSDETQIPVLGIEWLLKWMMRRSESISGRLGCGCRSCPVDQTFVQTKVAETCSSTLLIARCFQEMQNLGILPPDFKATAVVPDGQFREIGLNPKCTIAQDYGVLKADGGISFRGLFIIDDESILRQVTINDLSVGCSVDKILRPAQAFQFTDVCPAAWKPSSDNIKPNVPKSEEYFFKVEVSTEPFFLPGSIEQPEENLLYSCLNIRCNVIQDRPFLQIWGWKYCLSLGVIAGQPIPVLGCVSVFHTSGVSVFFSQPNVAVNYVVLSVSSLTLKSYLLSKQGKIHEARNCGSVRVIGVGTSHTNTVTQTQGSLSAFRLPRSVEASLERTGEALTAGIGEGVELEKKKILVKTWQPWILEMTGHKEGSPPRSFKGLRLSKVAGHNDKSRPVMLTEDLGSSQALGSQFPLITVGNDFRATLIDVSKTVLSSFSLSSPVQTLDFQWNSLNGTMVLVTHRKSYFCNNPSYTQKPTPNSTKDPSGKCSRDTSESFDRVHKLILLPDFHFPLRHTAYSDGKLPFPHSSVGGQGEAQGRAPAVVGATGRKLEHFQPEKQCEKKAKAPPGSSPWQQCTTPSLKTWSSQMKLVGERIRVKLDGSRLIKVHLDKAQQNNSQHKVGTFSGVSKKLTRKDVNLGFPKFRL

SEQ ID NO: 21315 - protein, 131 aa, Mus musculus
MGLKERLTRVISHGLQQHAHQKPAPDFTVTAAADGVLKEIRLSDYRGKYVVLFFYLLDFTFVCPTEIITFSDHDKDFQKLGFESIVKALCLVQAFQYIDEHGEVCPAGWKPGSDTIKPSVDDRKEYFSKHN

SEQ ID NO: 21316 - protein, 78 aa, Rattus norvegicus
MKVISFRGLFLIDDKGILRQMTINDLPVGRSVDEILRLVQAFQFTDKHGEVCPAGWKPGSDTIKPDVNKSKEYFSKQK

SEQ ID NO: 21317 - protein, 165 aa, Rattus norvegicus
MPSYVLMAVFVWETCSLTLLIARCLQEMQKLGILLLTSVMPDGQFKDINLSEHKGKLTHPRNKEDWDPRTFPWYQIPSVPLLRIMESDEGISLRVLFIIDDKGILYHIMINDLPVGRSVDEICRLVQAFQFTEKHGEVCPASWKPGNDTIKPDINMNKEYFSKQK

SEQ ID NO: 21318 - protein, 223 aa, Rattus norvegicus
MWGATKRGLASDLKGEMVKIGKRRVLWVAIVIAARKSSEGAGEQHAMVQPSIMASRHGPMSHLRHMMRRSVSISGGCCGTSCPVDQIFVQTKVTCTKLLDPEIIAFSDRAEAFKRLNGQVMRVPVDSRFCHLAPINTPRTQGGVEPMGIPLAPDPMCAIAQDYGVQDINDLPVGHSANKILRPVQAFQLTDKCSEVCPASWKPSSDTIEPNVQKSKGCFLKQK

SEQ ID NO: 21319 - protein, 434 aa, Rattus norvegicus
MPGKTGSLRWGFHGHGSRWTDKCGANHSQLKPEWPWVCDPAMFHSALQVRRLDNQLPACVPTEVKGDIERAQMQDDMVIKGFCSKLTRPIDYSSMNVYTVGGAILENEAMEFHIGFAFSLGERVGEEGTAAEDREEGLRHTLKFFDGDSALSQHSQVQSYLALESRRRQSGGVSYGKLNRIKCVEPLEYDDCCRMHNHDLDPCEKGLEDPGLQTCHPEKIIDEMNHAHPSPLESWKICHDAKLKQNRKWKTTKIIWVPEHSGVRIFDQVGTNLQQSVWYNLRATVKFDEQAYQMNGGDKEQINLPWGFVVHTDPQAEGSEGRLKREKPTVNIRNVPSIDHMVSGADFRCWLLRLHADPKRTIAQDDGVLKADEGISFRGLFIIDDKSILRQIIINDLPVGLSVDEIRRLVQAFQFTDKHGEVCPAGWKPGCDTI

SEQ ID NO: 21320 - protein, 173 aa, Rattus norvegicus
MICMMSTWNRSLNPFLKVRVAGRTKKRNLNKPIALNIEDIVPSVPLSRSLAKHQLSKQCVIQTPTEIGLECNPRLITVVAEPESKILCLMFAAQQHTTGAPARGAYLKGQRSLRQITINDLPVDRSVDEILRLVQAFQFTDKHGEGCPAGWEPSSDTIKPDVDKSKEYFSKQK

SEQ ID NO: 21321 - protein, 200 aa, Synechocystis sp. PCC 6803; identical to SEQ ID NO: 597

SEQ ID NO: 21322 - protein, 182 aa, Burkholderia fungorum
MKTVGDKVEAFTVTAAKPGFNHHEENGVSAFEEITEQSFPGKWKIIYFYPKDFTFVCPTEIVEFAKLAKDFEERDAVLMGGSVDNEFVKLAWRREHKDLDKLNHYAFGDVKGELIDQLGVRDKEAGVALRATFIVDPDNTIQHVSVNNLNVGRNPEEVLRILDGLQTDELCPCNRAVGGATL

SEQ ID NO: 21323 - protein, 81 aa, Triticum aestivum
  unsure (1)..(81): unsure at all Xaa locations
XKTDEGIAYRGLFIIDGKGVLRQITVNDLPVGRSVDXALRVVQAFQYTDEHGEVCPAGWKPGSYTIKPNVDDSKEYFSKHN

SEQ ID NO: 21324 - protein, 216 aa, Pyrococcus horikoshii
MVVIGEKFPEVEVKTTHGVIKLPDYFTKQGKWFILFSHPADFTPVCTTEFYGMQKRVEEFRKLGVEPIGLSVDQVFSHIKWIEWIKDNLSVEIDFPVIADDRGELAEKLGMIPSGATITARAVFVVDDKGIIRAIVYYPAEVGRDWDEILRLVKALKISTEKGVALPHKWPNNELIGDKVIVPPASTIEEKKQREEAKAKGEIECYDWWFCYKKLE

SEQ ID NO: 21325 - protein, 220 aa, Plasmodium falciparum
MAYHLGATFPNFTATASNVDGVFDFYKYVGDNWAILFSHPHDFTPVCTTELAEFGKMHEEFLKLNCKLIGFSCNSKESHDQWIEDIKFYGNLDKWDIPMVCDESRELANQLKIMDEKEKDIKGLPLTCRCVFFISPDKKVKATVLYPATTGRNSQEILRVLKSLQLTNTHPVATPVNWKEGDKCCILPSVDNADLPKLFKNEVKKLDVPSQKAYLRFVQM

SEQ ID NO: 21326 - protein, 133 aa, Homo sapiens
MASGNMHIGKLTPDFKATAVVDGTYRECWGPRWAQFTHLAWINIPRKEGGFESLDTPLLADLSENYGVLKTDEGIIAVNDWPVGHFVDEALRLVQAFQYTDEHPEICPAGWKPGSDMIKPSVNDSKEYFSKHN

SEQ ID NO: 21327 - protein, 224 aa, Mus musculus
MPGGLLLGDEAPNFEANTTIGRIRFHDFLGDSWGILFSHPRDFTPVCTTELGRAAKLAPEFAKRNVKLIALSIDSVEDHLAWSKDINAYNGETPTEKLPFPIIDDKGRDLAILLGMLDPVEKDANNMPVTARVVFIFGPDKKLKLSILYPATTGRNFDEILRVVDSLQLTGTKPVATPVDWKKGESVMVVPTLSEEEAKQCFPKGVFTKELPSGKKYLRYTPQP

SEQ ID NO: 21328 - protein, 224 aa, Mus musculus
MPGGLLLGDEAPNFEANTTIGRIRFHDFLGDSWGILFSHPRDFTPVCTTELGRAAKLAPEFAKRNVKLIALSIDSVEDHLAWSKDINAYNGETPTEKLPFPIIDDKGRDLAILLGMLDPVEKDDNNMPVTARVVFIFGPDKKLKLSILYPATTGRNFDEILRVVDSLQLTGTKPVATPVDWKKGESVMVVPTLSEEEAKQCFPKGVFTKELPSGKKYLRYTPQP

SEQ ID NO: 21329 - protein, 224 aa, Mus musculus
MPGGLLLGDEAPNFEANTTIGRIRFHDFLGDSWGILFSHPRDFTPVCTTELGRAAKLAPEFAKRNVKLIALSIDSVEDHLAWSKDINAYNGETPTEKLPFPIIDDKGRDLAILLGMLDPVEKDDNNMPVTARVVFIFGPDKKLKLSILYPATTSRNFDEILRVVDSLQLTGTKPVATPVDWKKGESVMVVPTLSEEEAKQCFPKGVFTKELPSGKKYLRYTPQP

SEQ ID NO: 21330 - protein, 224 aa, Mus musculus
MPGGLLLGDEAPNFEANTTIGRIRFHDFLGDSWGILFSHPRDFTPVCTTELGRAAKLAPEFAKRNVKLIALSIDSVEDHLAWSKDINAYNGETPTEKLPFPIIDDKGRDLAILLGMLDPVEKDDNNMPVTARVVFIFGPDKKLKLSILYPATTGRNFDEILRVVDSLQLTGTKPVATPVDRKKGESVMVVPTLSEEEAKQCFPKGVFTKELPSGKKYLRYTPQP

SEQ ID NO: 21331 - protein, 224 aa, Mus musculus
MPGGLLLGEEAPDFEANTTIGRIRFHDFLGNSWGMLFSHPKDFTPVCTTELGRAAKLAPEFAKRNVKLIALSVDSVEDHLAWSKDINAYNGATPKEKLPFPIIDDKDRDISILFCMLDPVEKDANSMPLTARGVFIFGPDKKLKMSLLYPNSTGRNFDEILRVIDSLQLTETKPVATPVDWKKGESVMVLPDLPEEEAKRCFPKGISTTKLPSGKNYLRYTPQP

SEQ ID NO: 21332 - protein, 203 aa, Mus musculus
MPGGLLLGEEAPDFEANTTIGRIRFHDFLGNSWGMLFSHPKDFTPVCTTELGRAAKLAPEFAKRNVKLIALSVDSVEDHLAWSKDINAYNGATPKEKLPFPIIDDKDRDISILFCMLDPVEKDANSMPLTARGVFIFGPDKKLKMSLLYPNSTGRNFDEILRVIDSLQLTETKPVATPVDWKKGESVMVLPRPPRRGSQTMFP

SEQ ID NO: 21333 - protein, 161 aa, Mus musculus
MPEGLLPGNEAPNSETDTTTIRIYFHDFLGDSWDILFSHPRNFTPVCTTELGRAAKLSPEFAKRNVQLIALPVDSVEDHLAWSKDINAYSGTAPTEKLPFPIIDDEDRDLAILWASIMGRNFDEILRVIDSLQLTAAKPVDWKKGESMMVLPDLPEEEAKR

SEQ ID NO: 21334 - protein, 224 aa, Rattus norvegicus
MPGGLLLGDEAPNFEANTTIGHIRFHDFLGDSWGILFSHPRDFTPVCTTELGRAAKLAPEFAKRNVKLIALSIDSVEDHFAWSKDINAYNGAAPTEKLPFPIIDDKDRDLAILLGMLDPAEKDEKGMPVTARVVFIFGPDKKLKLSILYPATTGRNFDEILRVVDSLQLTASNPVATPVDWKKGESVMVLPTLPEEEAKQLFPKGVFTKELPSGKKYLRYTPQP

SEQ ID NO: 21335 - protein, 212 aa, Nostoc sp. PCC 7120
MALRLGDTVPNFTQASTHGDIDFYAWAGDSWVVLFSHPADYTPVCTTELGTVAKLKPEFDKRNVKAIALSVDDVESHNGWVGDIEETQSTTLNYPILADADRKVSDLYDMIHPNANAAVTVRSVFVIDPNKKLRLTFTYPPSTGRNFDELLRVIDSLQLTDNYSVATPADWKDGDKVVIVPSLKDPEVLKEKFPKGYEVVKPYLRLTPQPNK

SEQ ID NO: 21336 - protein, 212 aa, Sulfolobus tokodaii
MSEEKIPLIGEKFPEMEVITTHGKIKLPDYYQGKWFVLFSHPGDFTPVCTTEFYSFAKKYEEFKKLNTELIGLSVDSNISHIEWVMWIEKNLKVEIPFPIIADPMGNVAKRLGMIHAESSTSTVRAVFIVDDKGIVRLIMYYPMEIGRNIDEILRSIRALQLVDKSGVVIPANWPNNELIGNKVINPPPRTVKDAKLRINQPFDWWFTYKEI

SEQ ID NO: 21337 - protein, 215 aa, Sulfolobus tokodaii
MVKLYSKFPDVQVLTTKGPIDFYKDIFGKGKWLFLFAHPADFTPVCTTEFVAFSQKYEEFKKLGVELVGLSVDSIYSHIQWLMDIEQRYGVKVPFPVIADPDKKLARMLDALDEASGQTIRIVVLASPDGIIRFVAQYPMEFGRNIDELLRITKAAIVNYKAKVVLPANWQPGQDVIVPPPAIFDEAEMRIKLPNAKAWYLLFKKYEELPPDQKV

SEQ ID NO: 21338 - protein, 150 aa, Sulfolobus tokodaii
MPPNIGEQAPDFEAESTLGKIRLSDYKGKFVVLYFYPKSFTPGCTREIQRFSELYEEFKKLNAEVIGVSADSITTQKRFAEKYNAKFPVVADKEKKIIETYGVLNEKGTSAQRVTFIIDPEGKIIQILKNLKKAEEHADKALEIIKNKKS

SEQ ID NO: 21339 - protein, 211 aa, Synechocystis sp. PCC 6803
MALQLGDVVPDFTQESSQGPISFHEWAGDSWVVLFSHPADYTPVCTTELGTVAKLKPEFDKRNVKVIALSVDDVESHKGWICDIDETQNTTVNYPILADGDKKVSDLYGMIHPNALNNLTVRSVFIIDPAKKLRLTFTYPASTGRNFDEILRVIDSLQLTDYHQVATPANWQDGDKCVVVPSISTEDAKVKFPKGVEEIKPYLRLTPQPNK

SEQ ID NO: 21340 - protein, 221 aa, Thermoanaerobacter tengcongensis
METEAIENIPRVCLPQIGAPAPDFKANSTFGPIKLSDYRGKWVVLFSHPGDFTPVCTTEFIAFTQVYTSFVERNVQLIGLSVDSNPSHLAWVENIYKTTGVEIPFPIIEDKDMRIAKLYGMISPAETSTSAVRAVFIIDDKQILRLILYYPLEIGRNIQEIIRIIDALQTVDKYKVLAPANWYPGMPVIVPPPKTYPELKQRLKNVEGYTCTDWYLCYKKV

SEQ ID NO: 21341 - protein, 220 aa, Thermoanaerobacter tengcongensis
MEEIRMKLLGEKFPSMEVMTTHGVKRLPEDYAGKWFVLFSHPADFTPVCTTEFVEFARKAEEFKQLNTELIGLSVDQVFSHIKWVEWIKDNTGVQIPFPVIADELGRVSNQLGMIHPGKGTNTVRAVFIVDDKGVIRLIMYYPQEVGRNVDEILRALKALQTADQYGVALPEKWPNNYLIKDHVIVPPSTDEASANERKEKIKAKEIEAFDWWFVHKPLK

SEQ ID NO: 21342 - protein, 217 aa, Ralstonia metallidurans
MAIRLGEEAPDFTADTTEGKIHFHEWIGDSWAILFSHPKDFTPVCTTELGYMAKLKPEFDKRNTKIIGLSIDPVGDHSRWVKDIEETQGATVNYPMIGDHDLKVAKLYDMIHPEASGGPRTAADNATIRAVFMIGPDKKVKAMLVYPMSAGRNFDEVLRLLDSLQLNAKHTVATPVNWKPGDDVIIPTSVSDDDAKKKYPQGFKTLKPYLRTVAQPK

SEQ ID NO: 21343 - protein, 212 aa, Ralstonia metallidurans
MALRLGDIAPDFEQESSEGRIRFHDWLGDGWGVLFSHPADYTPVCTTELGLTARLKEEFAKRNVKAIALSVDSVESHHGWIQDINDTQSTTVNFPILADGDRKVSELYDMIHPNANETLTVRSLFVIDPKKKVRLIITYPASTGRNFNEILRVIDSLQLTDNHSVATPGNWQDGDDVVIVPSLKDEEVIRQKFPKGYKAVRPYLRLTPQPNK

SEQ ID NO: 21344 - protein, 246 aa, Burkholderia fungorum
MFVRHIPSLPYALSLQSAVGECSRGNVQTFRRCMMSLRLGDIAPDFEQQSSVGPIRFHEWLGDSWGVLFSHPADFTPVCTTELGLTAKLASEFEKRNVKTIALSVDSAESHKEWIKDINETQAANVGFPILADGDRKVSELYDMIHPNANETLTVRSLFVIDPKKKVRLIITYPASTGRNFDEVLRVIDSLQLTDSHSVATPGNWKQGDDVVIVPSLKDEEIIKQKFPKGYKALRPYLRMTPQPNK

SEQ ID NO: 21345 - protein, 224 aa, Burkholderia fungorum
MSVIYQVLKESIMSLRLGDIAPDFERQSSVGPIRFHEWLGDSWGVLFSHPADFTPVCTTELGLTAKLAGEFEKRNVKTIALSVDSAESHKEWIKDINETQAANVGFPILADGDRKVSELYDMIHPNANETLTVRSLFVIDPKKKVRLIITYPASTGRNFDEVLRVIDSLQLTDSHSVATPGNWKQGDDVVIVPSLKDEEIIKQKFPKGYKALRPYLRMTPQPNK

SEQ ID NO: 21346 - protein, 234 aa, Burkholderia fungorum
MDNIEEDFRAQRPPFLYEPAPDFEARSTMGMVSSADYRGKWLLFFSHPADFTPVCTSELIAFARIAPRFKELGCELLALSIDGLYSHLAWLRSIQERFNMDIPFPVVEDPSMAVAKAYGMLPPKAVSSSTVRGMFLIDPEGIIKAISWYPISTGRSVEEAFRLFQAVRMTWQENLYAPADWQPGSPCVVPPPKTIEDASKRLSEGDVLDWYYQTRQIAQDAPPERAPVKRGRRA

SEQ ID NO: 21347 - protein, 212 aa, Pseudomonas putida KT2440
MSLKLGDIAPDFEQDSSEGKIRFHEWLGNSWGVLFSHPADFTPVCTTELGLTAKLKDEFAKRGVKAIALSVDPVDSHHKWIDDINETQNTVVNFPIIADADRKVSDLYDLIHPNASDTLTVRSLFIIDPNKKVRLTITYPASTGRNFNEILRVIDSLQLTDNHKVATPGNWQDGDEVVIVPSLKDEEEIKQRFPKGYRAVKPYLRLTPQPNR

SEQ ID NO: 21348 - protein, 181 aa, Pyrobaculum aerophilum str. IM2
MKIPEDLCFNTDHGPKCFKDYKGKWLLLFSHPADFTPVCTTEFVAFSRKYEEFKKRGVELLGLSVDTNYSHIEWKRQIEQAFGVKVPFPIIADVDMKVASIFNAVPPGQNLTVRTVALIDPDLKLAWFAAYPYTNGRNIDEILRVIDAIQFSYKYGYATPADWKPGDPVIVPPPPTTEGAA

SEQ ID NO: 21349 - protein, 249 aa, Anopheles gambiae str. PEST
AHPVCAPFVIVRFRTKSISPVPASRKMSLNLGDPFPNFTADTTIGPIDFHQWIGDGWAILFSHPADYTPVCTTELAAVAKLVPEFTKRNVKPIALSCDTVESHRGWIEDIKAYGQLAAADPFPFPIIDDSKRELAVKLNMLDRDEIGSAGLPLTCRAVFVIDAGKKLRLSILYPATTGRNFAEILRTIDSIQLTDKRRVATPADWMPGDSCMVQPTVPADQLATLFPAGVDSVTLPSGKQYLRKTECPN

SEQ ID NO: 21350 - protein, 248 aa, Anopheles gambiae str. PEST
RSARAISTVLCFKPRAHESRQPRPFTIMRIGATIPNFQADSTKGPIDFYEWIGDSWCVLFSHPADFTPVCTTELGRIAVHQEHFEKRNVKVLAHSVDDLKCHVDWVNDIKSYCPDIIGNFPYPIIADPSRDLAVRFGMLDEKDKDNVELAQTVRALFIISPDKRVRLTMHYPTSTGRNVDEILRVIDSLQLTDRLKVIATPANWTPGTKVMILPSVSEEDADKLFPNGIERVSMPSGNVYVRTTTDYE

SEQ ID NO: 21351 - protein, 216 aa, Pyrococcus furiosus DSM 3638
MIVIGEKFPEVEVKTTHGVIKLPDHFTKQGKWFMLFSHPADFTPVCTTEFYGLQIRLEKFRELGVEPIGLSVDQVFSHLKWMEWIKEKLGVEIEFPVIADDRGDLAEKLGMIPSGSTITARAVFIVDDKGIIRAIVYYPAEVGRDWDEILRLVKALKISTEKGVALPHKWPNNELIGDKVIVPPASSVEQIKEREEAKAKGEIECYDWWFCYKKLE

SEQ ID NO: 21352 - protein, 219 aa, Methanosarcina acetivorans C2A
MPLIGDDAPSFTAVTTQGMINFPEDYKGKWVILFSHPADFTPVCTTEFMTFASMQEEFREMNTELIGLSIDSVFSHIAWLRRIEEKIEYKGMKNLEVKFPVIEDLKMEVAKKYGMLQPKTSTTQAVRAVFIIDPEAKIRTILYYPQSTGRNMQEIKRIVIALQKNSAEKVATPANWQPGDDVIIPPPNSMEAVKERLGTEEEGKCCLDWFLCLKKDSKK

SEQ ID NO: 21353 - protein, 160 aa, Methanosarcina acetivorans C2A
MAKTSLESGQPAPDFCLPDQEGNRTCLEKLRGKWVVLYFYPRDNTPGCSLEAKNFSCLKKDFEAENAVILGVSRDSEESHRKFIEKKELKIKLLSDEHAEVHGKYDVLHPKHFRGKDVISAVRTTFLINPEGIILKVWDNVKASGHAEKVLSELQKLKET

SEQ ID NO: 21354 - protein, 219 aa, Methanosarcina mazei Goe1
MPLIGDDAPSFTAVTTQGIIKFPDDYKGKWVILFSHPADFTPVCTTEFMTFASMQEEFRSMNTELIGLSIDSVFSHIAWLKRIEEKIEYKGMKNLEIKFPVIEDLKMDVAKKYGMVQPKASTTQAVRAVFIIDPEAKIRTILYYPQSTGRNMQEIKRIVVALQKNAAEKVATPANWQPGEDVIIPPPSSMEAVKERMGKEEEGKRCLDWFMCLKKDTQK

SEQ ID NO: 21355 - protein, 160 aa, Methanosarcina mazei Goe1
MPKTSLESGQVSPDFCLPNQEGNQICLENFKGQWAVLFFYPRDNTPGCSLEARSFSDLKKDFEAENAIILGVSRDGKESHRKFIEKKELKITLLSDEKAEIHEKYDVMHPKNFRGNEVISTVRTTFLINPEGKIEKVWNNVKAAGHAEKVLSELKTLKGK

SEQ ID NO: 21356 - protein, 211 aa, Chlorobium tepidum TLS
MPLLGDDFPELKVQTTHGPMNIPGDLKGSWFVLFSHPADFTPVCTTEFVAFQQRVEAFEKIGCKLIGMSVDQVFSHIKWVEWIKENLDVDITFPIVAANDRIANKLGMLHPGKGTNTVRAVFVGDPNGKVRLVLYYPQEIGRNMDEILRAVKVLQISDSNKVAMPADWPNNLLIKDHVIIPPANNVEDAKKRKEQQYDCYDWWFCHKPLDK

SEQ ID NO: 21357 - protein, 211 aa, Thermosynechococcus elongatus BP-1
MSLKLGDVVPNFTQASSMGNINFYEWAGDSWVVLFSHPADYTPVCTTELGEVARLRPEFEKRNVKVLALSVDSVESHLGWIKDIEEVNNVKVDYPILADEDKKVSTLYDMIHPNSLNNLTVRTVFIIDPQKRLRLTMTYPASTGRNFAEILRVIDSLQLTDNYSVATPANWQEGQECVIVPSLSDEEAKQKFPKGFNAVKPYLRLTPQPNK

SEQ ID NO: 21358 - protein, 212 aa, Trichodesmium erythraeum IMS101
MTLRLGDKVPDFTQDSSEGQISFYDWAGDSWVVLFSHPADFTPVCTTELGAVARLKPEFDKRGVKVIALSVDDAESHKGWVGDINETQKTTVNYPILADVDKKVSDLYDMIHPNSLNNLTIRSVFIIDSEKKLRLTFTYPASTGRNFNEILRVIDSLQLTDNHQVATPVDWKDGDDCVIVPSLKDPEVLKEKFPKGYTEVKPYLRMTPQPNK

SEQ ID NO: 21359 - protein, 258 aa, Pseudomonas syringae pv. syringae B728a
MRGFFCLFLIFLAGLLGALFILFNFSRQGAQWCYTKTFPIQTRSNTMTLRLGDIAPDFEQESSEGRIRFHEWLGDSWGVLFSHPADFTPVCTTELGFTAKLKDEFAKRGVKAIALSVDPVDSHIKWIDDINTTQNTLVNFPILADADRKVSDLYDLIHPNANDTLTVRSLFVIDPNKKVRLTITYPASTGRNFHEILRVIDSLQLTDNYKVATPANWVDGDDVVIVPSIKDEAEIKQRFPKGYKAVTPYLRLTPQPNR

SEQ ID NO: 21360 - protein, 212 aa, Pseudomonas fluorescens PfO-1
MSLRLGDIAPDFEQDSSAGKIRFHEWLGDSWGVLFSHPADFTPVCTTELGFTAKLKDEFTKRGVKAIALSVDPVDSHHKWIEDINETQNTIVNFPILADADRKVSDLYDLIHPNANDTLTVRSLFVIDPNKKIRLTITYPASTGRNFHEILRVIDSLQLTDNYKVATPANWQDGEEVVIVPSLKDEDEIKQRFPKGYRAVKPYLRLTPQPNK

SEQ ID NO: 21361 - protein, 231 aa, Desulfovibrio desulfuricans G20
MVSTRKPLLSSLEDTTMEEGKFVLIGDALPEMHVTTTRGPMTLPGDLKGKWFVLFSHPADYTPVCTTEFVAFQKRYDEFRKLNCELVGLSIDQVFSHIKWVDWIKEKIGVEIEFPIIADDMGQVASRLGMIHPGKGTNTVRAVFIVDDKGIVRIIFYYPQELGRNMDEILRAVKGMQVSDAQSVAIPAGWPENEIVRDHVIVPPPKSVQEAQKRLTEGHECYDWWFCHKKL

SEQ ID NO: 21362 - protein, 212 aa, Pseudomonas aeruginosa PAO1
MSLRLGDIAPDFEQDSSEGRIRLHEWLGDSWGVLFSHPADFTPVCTTELGFTAKLKDQFAQRGVKVLALSVDPVESHLKWIDDINETQDTRVNFPIIADADRKVSELYDLIHPNANDTLTVRSLFIIDPSKKVRLIITYPASTGRNFNEILRVIDSLQLTDEHKVATPANWEDGDEVVIVPSLKDEEEIKRRFPKGYRAVKPYLRLTPQPNR

SEQ ID NO: 21363 - protein, 223 aa, Clostridium tetani E88
MKDCKEEKHKCLNIGMKAPDFCATTTFGSIRLSDFRGKWVILFSHPGDFTPVCTTEFIGFAQCYPYFKKRNVQLLGLSIDSNPSHLAWVYNIYINTGIQIPFPIIADRDGSISRMYGMVSPYISSTETVRSVFIIDEDGIIRTILTYPLTNGRNIGEILRMVCALQTTDEEKVVTPANWIPGRPVMVPPPKTYNELINRRKDNPELCCIDWYWCYKKQNKNFA

SEQ ID NO: 21364 - protein, 222 aa, Methanocaldococcus jannaschii
MCEGKMPVIGEKFPEVEVKTTHGAIKLPDYYVEKGKWFVLFSHPADFTPVCTTEFVGFQKRYDEFRKLNTELIGLSIDQVFSHLKWVEWIKEKLNVEIEFPIIADDRGELAEKLGMISPYKGNNTVRAVFVVDNKGIIRAIIYYPQEVGRNLDEIVRLVKALQVSDEKGVAMPANWPENDLIGDKVIIPPASSVEEIKQRKEACEKGEIECLDWWFCYKKLD

SEQ ID NO: 21365 - protein, 217 aa, Methanocaldococcus jannaschii
MPVIGEKFPEVEVKTTHGAIKLPDYYVEKGKWFVLFSHPADFTPVCTTEFVGFQKRYDEFRKLNTELIGLSIDQVFSHLKWVEWIKEKLNVEIEFPIIADDRGELAEKLGMISPYKGNNTVRAVFVVDNKGIIRAIIYYPQEVGRNLDEIVRLVKALQVSDEKGVAMPANWPENDLIGDKVIIPPASSVEEIKQRKEACEKGEIECLDWWFCYKKLD

SEQ ID NO: 21366 - protein, 232 aa, Methanosarcina barkeri
MKNMEEVENEQIHMPLIGDDAPSFTAVTTQGQINFPDDYKGKWVILFSHPADFTPVCTTEFMTFASMQEEFREMNTELIGLSIDSVFSHIAWLKRIEEKIEYKGMKNLEIKFPVIEDLKMDVAKKYGMIQPKTSTTQAVRAVFIIDPEAKIRTILYYPQSTGRNMQEIKRVVAALQKNTAEKVATPANWQPGDDVIVPAPSSMEALKERTGKLEENMYCLDWFLCFKKDSKK

SEQ ID NO: 21367 - protein, 212 aa, Pseudomonas syringae pv. tomato str. DC3000
MTLRLGDIAPDFEQESSEGRIRFHEWLGNSWGVLFSHPADFTPVCTTELGFTAKLKDEFAKRGVKAIALSVDPVDSHIKWIDDINTTQNTQVNFPILADADRKVSDLYDLIHPNANDTLTVRSLFVIDPNKKVRLTITYPASTGRNFHEILRVIDSLQLTDNYKVATPANWVDGDDVVIVPSIKDEAEIKERFPKGYKAVTPYLRLTPQPNR

SEQ ID NO: 21368 - protein, 215 aa, Archaeoglobus fulgidus
MAPLLGDNFPEIEVVTTHGRMKLPEAFKGKWFVLFSHPADFTPVCTTEFVAFQNRYDEFRKLNCELIGLSIDQVFSHIKWIEWIKEKLDIEIEFPVIADDTGRVAEMLGLIHPAKGTNTVRAVFIVDPEAVIRAVIYYPQELGRNMDEILRAVKALQVSDQNGVAMPANWPNNELVGDAVIIPPPISEAEAKERLEKAKAGDISCYDWWFCYKKI

SEQ ID NO: 21369 - protein, 222 aa, Aquifex aeolicus VF5
MEVVSLPRLGEPAPAFEAQTTFGPVKFPDDFKGQWVVLFSHPADFTPVCTTEFVAFAKNYEEFKKRNVQLIGLSVDSNFSHIAWVMNIKEKFGIEIPFPIIADHNMEVAKKYGMIHPAQSTTFTVRALFVIDDKGILRAMIYYPLTTGRNIREVIRLVDALQTADREGVATPADWVPEPQTWEFTEENTKVIVPPPTTYEDAVKRLQEGYECADWYICKKKV

SEQ ID NO: 21370 - protein, 195 aa, Archaeoglobus fulgidus DSM 4304
MKLPEAFKGKWFVLFSHPADFTPVCTTEFVAFQNRYDEFRKLNCELIGLSIDQVFSHIKWIEWIKEKLDIEIEFPVIADDTGRVAEMLGLIHPAKGTNTVRAVFIVDPEAVIRAVIYYPQELGRNMDEILRAVKALQVSDQNGVAMPANWPNNELVGDAVIIPPPISEAEAKERLEKAKAGDISCYDWWFCYKKI

SEQ ID NO: 21371 - protein, 219 aa, Bradyrhizobium japonicum USDA 110
MTLPIGTTAPDFEAETTEGKIKFHDWIGNSWALLFSHPKDFTPVCTTELGALAKLKPEFDKRGVKLMGLSVDPVDRHAKWSEDIKETQGAAPNYPMIGDTDFNVSKLYEMLPASTSGDPLTRTPADNQTVRNVFIIGPDKKIKLVLVYPMTTGRNFQEILRVVDSLQLTAKHRVATPADWTQGEDVIIAGSVSNDEAKTIYPQGWKEPKPYIRIVPQPK

SEQ ID NO: 21372 - protein, 215 aa, Sulfolobus solfataricus
MSEERIPLIGERFPEMEVITTQGRIKLPDDYKGRWFVLFSHPGDFTPVCTTEFYSFAKKYEEFKKLNTELIGLSVDSNISHIEWIMWIEKNLKVEIPFPIIADPMGNVAKRLGMIHAQSSTATVRAVFVVDDKGVVRLILYYPMEIGRNIDEILRAIRALQLVDKAGVVTPANWPNNELIGDKVINPAPRTIKDAKMRLGQPFDWWFTYKEVKTT

SEQ ID NO: 21373 - protein, 149 aa, Sulfolobus solfataricus
MNVGEEAPDFEAESTLGKIKLSDFRGKKVILYFYPKSFTSGCTRELQRFTELYDEFKKLNAEVIGVSVDKIDTQKKFAEKYGAKFPIVADDQKTISKLYSVLNERGTSAQRVTFIIDENGKIVNILKNLKKAEEHADKSLEIIKRQNST

SEQ ID NO: 21374 - protein, 203 aa, Thermoplasma acidophilum
MPVTLGQKAPDFTVNTSKGPVTLSSYRGKWVLLFSHPGDFTPVCTTEFIAFTERYKDFQALGVELLGLSIDSVYSHIAWIRDIKEHFGIEIPFPIIADIDKEVARQYNLIDEKSGATVRGVFIIDPNQIVRWMIYYPAETGRNIDEIIRVIKALQFNWERKLATPANWQPGQEGIEGAPSTVDASLKRDGEPGVKTWYLKFVK

SEQ ID NO: 21375 - protein, 199 aa, Thermoplasma acidophilum
MGQKAPDFTVNTSKGPVTLSSYRGKWVLLFSHPGDFTPVCTTEFIAFTERYKDFQALGVELLGLSIDSVYSHIAWIRDIKEHFGIEIPFPIIADIDKEVARQYNLIDEKSGATVRGVFIIDPNQIVRWMIYYPAETGRNIDEIIRVIKALQFNWERKLATPANWQPGQEGIEGAPSTVDASLKRDGEPGVKTWYLKFVK

SEQ ID NO: 21376 - protein, 233 aa, Thermoplasma acidophilum
MPDENKFPLIGEKFPEMTVETTHGSMKLPDQYKGRWFMLFSHPGDFTPVCTTEFYSFARRFEDFQKINTDLIGLSVDSTISHIEWVNWIRDNLKIEVPFPIIGDSMGRVATRLGMIQAESSTSTVRAVFIVDPNSTVRLIMYYPLEIGRNVDELLRAIKALQMSDKYRGAMPANWPYNELIGEKMLNPAPKNVKDATGRLKEFKGYAWWLTYKDVPDNEVQETKKIVKMREEK

SEQ ID NO: 21377 - protein, 238 aa, Thermoplasma acidophilum
MSGENMPDENKFPLIGEKFPEMTVETTHGSMKLPDQYKGRWFMLFSHPGDFTPVCTTEFYSFARRFEDFQKINTDLIGLSVDSTISHIEWVNWIRDNLKIEVPFPIIGDSMGRVATRLGMIQAESSTSTVRAVFIVDPNSTVRLIMYYPLEIGRNVDELLRAIKALQMSDKYRGAMPANWPYNELIGEKMLNPAPKNVKDATGRLKEFKGYAWWLTYKDVPDNEVQETKKIVKMREEK

SEQ ID NO: 21378 - protein, 215 aa, Thermotoga maritima
MEGRIPLIGEEFPRVEVKTTHGKKVLPDDFRGKWFVLFSHPADFTPVCTTEFVAFQKRYDEFRKLNTELIGLSIDQVFSHIKWIEWIKEKLGVEIEFPVIADDLGEVSRRLGLIHPNKGTNTVRAVFIVDPNGIIRAIVYYPQEVGRNIDEILRAVKALQTSDEKGVAIPANWPSNELINDSVIVPPASSVEEARKRLESKDFECYDWWFCYKKV

SEQ ID NO: 21379 - protein, 216 aa, Pyrococcus abyssi
MVVIGEKFPEVEVKTTHGVIKLPDHFTKQGKWFILFSHPADFTPVCTTEFYGMQKRLEEFRKLGVEPIGLSVDQVFAHIKWMEWIKENLGVEIEFPIIADDRGELAEKLGMIPSGATITARAVFIVDDKGIIRAIVYYPAEVGRDWDEILRLVKALKISTENGVALPHKWPNNELIGDKVIIPPASTVEEKKQREEAKAKGEIECYDWWFCYKKLK

SEQ ID NO: 21380 - protein, 212 aa, Ralstonia solanacearum
MSLRLGDIAPDFEQDSSEGRIQFHTWLGNSWGVLFSHPADFTPVCTTELGLTAKLKDAFAKRNVKVIALSVDPVDSHKKWIDDINETQNTRVNFPIIADADRKVSQLYDMIHPNASETFTVRSLFVIDPNKKVRLTITYPASTGRNFDEVLRVIDSLQLTDHHSVATPGNWKDGDDVVIVPSLKDEEVIKQKFPKGYKAVRPYLRLTPQPNK

SEQ ID NO: 21381 - protein, 212 aa, Azotobacter vinelandii
MSIRLGDIAPDFEQDSSTGRIRFHEWLGDGWGILFSHPADFTPVCTTELGFTAKLKDEFAKRNVKAIALSVDPVDSHLKWIGDIEETQGVQVGFPIIADADRKVSDLYDLIHPNANDTLTVRSLFIIDPNKKVRLIITYPASTGRNFHEILRVIDSLQLTDNYKVATPANWKEGDEVVIVPSLQDPEELKQRFPKGFRAVKPYLRLTPQPNR

SEQ ID NO: 21382 - protein, 216 aa, Arabidopsis thaliana
MPGITLGDTVPNLEVETTHDKFKLHDYFANSWTVLFSHPGDFTPVCTTELGAMAKYAHEFDKRGVKLLGLSCDDVQSHKDWIKDIEAFNHGSKVNYPIIADPNKEIIPQLNMIDPIENGPSRALHIVGPDSKIKLSFLYPSTTGRNMDEVLRALDSLLMASKHNNKIATPVNWKPDQPVVISPAVSDEEAKKMFPQGFKTADLPSKKGYLRHTEVS

SEQ ID NO: 21383 - protein, 216 aa, Arabidopsis thaliana
MPGITLGDTVPNLEVETTHDKFKLHDYFANSWTVLFSHPGDFTPVCTTELGAMAKYAHEFDKRGVKLLGLSCDDVQSHKDWIKDIEAFNHGSKVNYPIIADPNKEIIPQLNMIDPIENGPSRALHIVGPDSKIKLSFLYPSTTGRNMDEVLRALDSLLMASKHNNKIATPVNWKPDQPVVISPAVSDEEAKKMFPQGFKTADLPSKKGYLRRTEVS

SEQ ID NO: 21384 - protein, 216 aa, Brassica napus
MPGITLGDTVPNLEVETTHKNFKLHDYFADSWTVLFSHPGDFTPVCTTELGAMGKYAHEFEQRGVKLLGLSCDDIQSHKDWIPDIEAFTPGSKVTYPIIADPNKEIIPQLNMIDPIENGPSRALHVVGPDCKIKLSFLYPSTTGRNMDEVLRALDSLLMAAKHKNKIATPVNWKPDEPVVISPAVSDEEAKKLFPQGFKTAKLPSKKGYLRVADVS

SEQ ID NO: 21385 - protein, 214 aa, Brassica napus
MPGITLGNTVPRVETTHKNFKLHDYFADSWTVLFSHPGDFTPVCTTELGAMGKYAHEFEQRGVKLLGLSCDDVQSHKDWIPDIEAFTPGSKVTYPIIADPNKEIIPQLNMIDPIENGPSRALHIVGPDCKIKLSFLYPSTTGRNMDEVLRALHSLLMAAKHKNRIATPVNWKPDEPVVISPAVSDEEAKKLFPQGFKTAELPSKKGYLRVADVS

SEQ ID NO: 21386 - protein, 278 aa, Glycine max
  unsure (1)..(278): unsure at all Xaa locations
MASYLSRAAPRAFSSSLRAAAAARPGLRTAQRPAAPLFRRFLQTPAEQPRLRLGSTAPNFTAKTTQGDIEFHKWIGDSWAILFSHPADFTPVCTTELGAFAKLKPEFEKRGVKMVGLSADDLSSHDKWVADINEVSSTNLQFPIIADADRKVAFLYDMVTEDDMRDIATKGLPFTIRSVFIIDPAKKIRLMMIYPASTGRNSAEVLRVIDALQLADKKGIATPIDWTQGEDVIVPPSVSTADAKKKFGEVRELKPYLRYTKAXKKARTASRQGGGILE

SEQ ID NO: 21387 - protein, 219 aa, Glycine max
  unsure (1)..(219): unsure at all Xaa locations
MPGLTIGDTIPDLQVETNQGKIKLHQFCADGWTILFSHPGDFTPVCTTELGKMAQYAKEFYQRGVKLLGLSCDDVQSHNEWIKDIEAYTPGAKVNYPIIADPKREIIKQLNMVDPDEKDSTXXNLPSRALHIVGPDLKIKLSFLYPATTGRNMDEVLRVIESLQKASKFKVATPANWKPGDPVVITPDVTNEQAKEMFPQGFESVKLPSKKEYLRLTKV

SEQ ID NO: 21388 - protein, 110 aa, Glycine max
  unsure (1)..(110): unsure at all Xaa locations
MPGLTIGDTVPNLELDSTHGKIWIHDYVGNGYVILFSHPGDFTPVCTTELAAMANYAKEFEKRGVKLLGISCDDVQSHKEWTKDIEAYKAGXSKVTYPIMADPDRSAIKX

SEQ ID NO: 21389 - protein, 218 aa, Hordeum vulgare
MPGLTIGDTVPNLELDSTHGKIRIHDYVGNGYVILFSHPGDFTPVCTTELAAMANYAKEFEKRGVKLLGISCDDVQSHKEWTKDIEAYKPGSKVTYPIMADPDRSAIKQLNMVDPDEKDAQGQLPSRTLHIVGPDKVVKLSFLYPSCTGRNMDEVVRAVDSLLTAAKHKVATPANWKPGECVVIAPGVSDEEAKKMFPQGFETADLPSKKGYLRFTKV

SEQ ID NO: 21390 - protein, 220 aa, Oryza sativa
MPGLTIGDTVPNLELDSTHGKIRIHDFVGDTYVILFSHPGDFTPVCTTELAAMAAYAKEFDKRGVKLLGISCDDVQSHKDWFKDIEAYKPGNRVTYPIMADPSREAIKQLNMVDPDEKDSNGGHLPSRALHIVGPDKKVKLSFLYPACVGRNMDEVVRAVDALQTAAKTRLATPVNWKPGEPFVIPPGVSDDEAKEKFPQGFDTADLPSGKGYLRFTKVG

SEQ ID NO: 21391 - protein, 220 aa, Oryza sativa
MPGLTLGDVVPDLELDTTHGKIRLHDFVGDAYVIIFSHPADFTPVCTTELSEMAGYAGEFDKRGVKLLGFSCDDVESHKDWIKDIEAYKPCRRVGFPIVADPDREAIRQLNMIDADEKDTVGGELPNRALHIVGPDKKVKLSFLFPACTGRNMAEVLRATDALLTAARHRVATPVNWKPGERVVIPPGVSDEEAKARFPAGFETAQLPSNKCYLRFTQVD

SEQ ID NO: 21392 - protein, 222 aa, Oryza sativa
  unsure (1)..(222): unsure at all Xaa locations
MPGLTIGDTVPNLELDSTHGKIRIHDFVGDTYVILFSHPGDFTPVCTTELAAMAXAYAKEFDKRGVKLLGISCDDVQSHKDWFKDIEAYKPGNRVTYPIMADPSREAIKQLNMVDPDEKDSNGGHLPSRALHIVGPDKKVKLSFLYPACVGRNMDEVVRAVDALQTAAKXTRLATPVNWKPGEPFVIPPGVSDDEAKEKFPQGFDTADLPSGKGYLRFTKVG

SEQ ID NO: 21393 - protein, 142 aa, Oryza sativa
  unsure (1)..(142): unsure at all Xaa locations
MPGLTIGDTVPNLELDSTHGKIRMDDXWVGDTYVILFSHPGDFTPVCTTELAAMAGYAKEFDKRGVKLLGISCDDVQSHKDWIKDIEAYKPGNRVTYPIMADPSREAIKQLNMVDPDEKDSNGGHLPSRALHIVGPDKKVKX

SEQ ID NO: 21394 - protein, 243 aa, Triticum aestivum
  unsure (1)..(243): unsure at all Xaa locations
AGRARDTSILFILHTQXMSAPAPLRLGSTAPNFQAETTKGNIDFHEFIGDNWVILFSHPEDYTPVCTTELGAFAKLQPEFTKRNVKLIGLSANTIQSHEGWIKDIGEVTGGNVEFPIIGDKERKVSLLYDMIDQQDATNVDEKGIAFTIRSVFIIDPKKTIRTIFSYPASTGRNAAEVLRVIDSLQTGDKYRITTPINWVPGEDVIVHPSVKNEEAKTLFPEFRIVKPYLRFTPLAKEKVLPQ

SEQ ID NO: 21395 - protein, 208 aa, Triticum aestivum
  unsure (1)..(208): unsure at all Xaa locations
XGDTAPDFEXQKTTKGDIRFHEFIGDNWTILFSHPADFTPVCTTELGIVAALQDEWDARNVKVIGLSANGLEEHEKWIADINEVSQVKLNFPLIADADRKVSALYDMLDPNVDATFTIRSVFIIDPKKTIRLILTYPASTGRNFDEILRVVDSLQLGDKYRITTPGNWKKGDDVIVHPSVSNELAQELFPKGIKVIKPYLRLTPSPFX

SEQ ID NO: 21396 - protein, 218 aa, Triticum aestivum
MPGLTIGDTVPNLELDSTHGKIWIHDYVGNGYVILFSHPGDFTPVCTTELAAMANYAKEFEKRGVKLLGISCDDVQSHKEWTKDIEAYKAGSKVTYPIMADPDRSAIKQLNMVDPDEKDAEGQLPSRTLHIVGPDKKVKLSFLYPSCTGRNMDEVVRAVDSLLTAAKHKVATPANWKPGECVVIAPGVSDDEAKKMFPQGFETADLPSKKGYLRFTKV

SEQ ID NO: 21397 - protein, 218 aa, Triticum aestivum
MPGLTIGDTVPNLELDSTHGKIRIHDYVGNGYVILFSHPGDFTPVCTTELAAMANYAKEFEKRGVKLLGISCDDVQSHKEWTKDIEAYKPGSRVTYPIMADPDRSAIKQLNMVDPDEKDGQGQLPSRTLHMVGPDKVVKLSFLYPSCTGRNMDEVVRAVDSLLTAAKHKVATPANWKPGECVVIAPGVSDDEAKKMFPQGFETADLPSKKGYLRFTKV

SEQ ID NO: 21398 - protein, 218 aa, Triticum aestivum
MPGLTIGDTVPNLELDSTHGKIRIHDYVGNGYVILFSHPGDFTPVCTTELAAMANYAKEFEKRGVKLLGISCDDVQSHKEWTKDIEAYKPGSRVTYPIMADPDRSAIKQLNMVDPDEKDGQGQLPSRTLHIVGPDKVVKLSFLYPSCTGRNMDEVVRAVDSLLTAAKHKVATPANWKPGECVVIAPGVSDEEAKKMFPQGFETADLPSKKGYLRFTKV

SEQ ID NO: 21399 - protein, 135 aa, Triticum aestivum
  unsure (1)..(135): unsure at all Xaa locations
VLQNYLLLGYRWPYFKAGGTQGRIIFHKWKEGKWAILFSHPGDYTPVCTTXLGMTAKLQPEFSKKNTLVIGLSVDNVDDHHWWVKDIXSTQNCTVNYPIVADPDRTVAETYCMIHPNSPRKLTVRTVWIIYPNNX

SEQ ID NO: 21400 - protein, 246 aa, Zea mays
  unsure (1)..(246): unsure at all Xaa locations
TSPSPHTPRQKYHHHNQQXAEGRSEPLRLGSTAPNFKAETTAGPIDFHEFIGDSWAILFSHPADRTPVCTTELGAFAKLEPEFARRNTKLIGLSADSIESHDEWVKDIDEVTGSNLKFPIIGDKERKVALLYDMLDHQDATNVDQKGIAFTIRSVFIIDPKKTIRLILSYPASTGRNTAEVLRVLDSLQTGDKHRVTTPINWVPGDDVIVHPSVSNEQAKDLFPDFRIVKPYLRFTPLAKEKTSAA

SEQ ID NO: 21401 - protein, 233 aa, Zea mays
  unsure (1)..(233): unsure at all Xaa locations
PAGVPLFSSFYTHKMSAPAPLRLGSTAPNFQAETTKGNIDFHEFIGDNWVILFSHPEDYTPVCTTELGAFAKLQPEFTKRNVKLIGLSANTIQSHEGWIKDIGEVTGGNVEFPIIGDKERKVSLLYDMIDQQDATNVDEKGIAFTIRSVFIIDPKKTIRTIFSYPASTGRNAAEVLRVIDSLQTGDKYRITTPINWXSLGEDVIXPPLRQERGGPDSVPRVPHRQALPPIHPS

SEQ ID NO: 21402 - protein, 264 aa, Zea mays
  unsure (1)..(264): unsure at all Xaa locations
MPEGEAGGTRLATRRPCIAPGCHFSARPIARKPRHVDRRTPPWPGLTIGDTVPNLELDSTHGKIRIHDYVGDGYAIIFSHPADFTPVCTTEMAAMAGYAKEFEKRGVKLLGISCDDVESHRQWTKDVEAYDTTTKVTFPILADPARDAIRQLNMVDPDEKDAAGRSMPSRALHVVGPDKAVKLSFLYPATTGRNMDEVLRAVDSLLTAAKHGGXKVATPANWKPGECAVIAPGVSDEEARKMFPQGFETADLPSKRXYXRFTKV

SEQ ID NO: 21403 - protein, 229 aa, Zea mays
MPGLTIGDTVPNLELDSTHGKIRIHDYVGDGYAIIFSHPADFTPVCTTEMAAMAGYAKEFEKRGVKLLGISCDDVESHRQWTKDVEAYGGKQQQQQATTTKVTFPILADPARDAIRQLNMVDPDEKDAAGRSMPSRALHVVGPDKAVKLSFLYPATTGRNMDEVLRAVDSLLTAAKHGGKVATPANWKPGECAVIAPGVSDEEARKMFPQGFETADLPSKKGYLRFTKV

SEQ ID NO: 21404 - protein, 229 aa, Zea mays; identical to SEQ ID NO: 21403

SEQ ID NO: 21405 - protein, 171 aa, Zea mays
  unsure (1)..(171): unsure at all Xaa locations
MPGHTIGDTVPKLELGSTHGKIRIHDYVGDGYAIIFSHPADFTPVGTTEMAAMAGXYAKEFXKRDAKLLDISCDDGESHRQRTKDVQAYEAPPNVTLAMLSDPMRDVIRQLNMVDPDXEKDAXGIMRGRALHVERPDKAVMLSLLYPATTDRNMDEVLRAVNSLLTVGKHX

SEQ ID NO: 21406 - protein, 209 aa, Zea mays
  unsure (1)..(209): unsure at all Xaa locations
MPGLTISDTVPNLELDSTHGKIRIHDYVGDGYAIIFSHPADFTPVCTTEMAVMGGYAKEFEKRGXVKLLGISCDDVESHRQWTKDVEAYWPTTKVTCPILEDPARDAIRQLNMVDPDXKDAMGRIVTLQRLHXAPEQTWTGQSLQRSRTAPSSGQFTXXPTTCKEASLQRLASSCTSPSWTCQAICXGAPXTRLDRKPHSPAPFXTCLX

SEQ ID NO: 21407 - protein, 214 aa, Sulfolobus metallicus
MKLYQKFPETQVLTTQGVIDFYKDIFGKGKWLFLFAHPADFTPVCTTEFVEFSKAYNDFANLGVQLVGLSVDSVYSHIEWLKDIQEKYGIKVPFPVIADPDKKFARLLDIVDEASGQTIRGVFLVSPDGVIRFIAYYPLEAGRKISELLRITKAMIVNYKAKVVLPANWEPGQDVIVPPPNVFDEATMRMKMPKAKSWYLLFKDYNELPQDQKV

SEQ ID NO: 21408 - protein, 215 aa, Sulfolobus metallicus
MKLYQKFPETQVITTKGPLDFYRDVFEKGKWLFLFAHPADFTPVCTTEFVGFSKVYEEFKRLNVELVGMSVDSIYSHIEWLKDIQERYGIQVPFPLIADPDKRLARLLDIIDEASGVTIRAVFLVNPEGIIRFMAYYPIEYGRKIEELLRITKAALVNYKAKVSLPVDWEPGQEVIVPAPSTIDEAQIRMKLPNAKTWYLTFKKYDELPQDQRVV

SEQ ID NO: 21409 - protein, 203 aa, Thermoplasma volcanium
MPVVLGQKAPDFTVNTSKGPITLSNYRGKWVLLFSHPGDFTPVCTTEFIAFTERYEDFQKLGVELIGLSIDSVFSHIAWIRDIKEHFGIDIPFPIIADIDKEVAREYNLIDEKSGATVRGVFIIDPNQIVRWMIYYPAETGRNIEEIIRVIKALQFNWDRKLATPANWQPGQEGIEPAPTTVDSSFKRDNEQGVKTWYLKFVK

SEQ ID NO: 21410 - protein, 243 aa, Candida albicans
MREKKQTKKKKSFFFATYTTMSQQPHLRLGSTAPDFKADTTNGPISFHEYIGDSWAILFSHPAARTSVCSTELSAFARLEPEFTKRGVKLLAISADPVEANSDWIDDMEDFSGSRVKFPIIADAERKVATLYDMIDHQDATNLDDKGLQLTIRAVFIIDPSKKIRLIMTYPASTGRNTAEVLRVLDSLQLVDKQKVITPINWVPGDDVLVHMGVPDDEARVLFPKYRAIKPYIRLTPLEKEDK

SEQ ID NO: 21411 - protein, 250 aa, Aeropyrum pernix
MPGSIPLIGERFPEMEVTTDHGVIKLPDHYVSQGKWFVLFSHPADFTPVCTTEFVSFARRYEDFQRLGVDLIGLSVDSVFSHIKWKEWIERHIGVRIPFPIIADPQGTVARRLGLLHAESATHTVRGVFIVDARGVIRTMLYYPMELGRLVDEILRIVKALKLGDSLKRAVPADWPNNEIIGEGLIVPPPTTEDQARARMESGQYRCLDWWFCWDTPASRDDVEEARRYLRRAAEKPAKLLYEEARTHLH

SEQ ID NO: 21412 - protein, 224 aa, Toxoplasma gondii
MLVLGSTFPDVHADASGVPGDKIKLYDFLGDSWGLLMSHPHDFTPVCTTELAQAARMAPEFAKRNCKLIGFSCDDVSSHKGWAKDVMSVAKLSGDLPFPIIADPERKLATDLGIMDPEEKDKAGIPVTCRAAIYIGPDRRVKGLILYPATVGRNFKEVLRALDALQLAEKYPVATPEGWFPGDKVMVQPTLTDEEAKAKLPKGFEKKECPSGKNYLRYAPDPSA

SEQ ID NO: 21413 - protein, 216 aa, Plasmodium falciparum
MAYHLGATFPNFTATASNVDGVLTFYKYVGDNWAILFSHPHDFTPVCTTELAEFGKMHEEFLKLNCKLIGFSCNSKESHDQWIEDIKFYGNLDKWDIPMVCDESRELANQLKIMDEKEKDIKGLPLTCDVFSFISPDKKFKATVLYPATTGRNSQEILRVLKSLQLTNTHPVATPVNWKEGDKCCILPSVDNADLPKLFKNEVKKLMYHPKRQSSL

SEQ ID NO: 21414 - protein, 231 aa, Caenorhabditis elegans
MKLGDTVPNFTFETDLRKNQTLHNYIGEQWLMLFSHPADFTPVCTTELAELVKLAPEFRKRHVQILAISIDSSETHRDWAKDINSVAQLSNCGSHLPFEIIADTDRSICTELGMIDPDEMNSEGICLSARAVMLFGPDKKLKSKILYPATFGRNFVEILRMVDGVQLGTKAPVATPANWIAGDNVIAQPSLSQERVIQELCGGDPDKCKTVPLPSGKSYLRVIEGDAYLQN

SEQ ID NO: 21415 - protein, 235 aa, Brugia malayi
MSKGILLGDKFPDFQAETSESFISSFHDWIGKDSWAILFSHPRDFTPVCTTELARLVQLEPEFKKRNVKLIGLSCDSVQSHRKWADDIIELCRMKSGDSNTCCSGNKLPFPIIADDNRSLASKLGMMDPDECDEKGAALTARCLFIIGPEKTLKLSILYPATTGRNFDEILRVVDSLQLTATKLVATPVDWQNGDDCVVVPTINDNEAKKLFGEKINTVELPSGKRYLRMVAHPK

SEQ ID NO: 21416 - protein, 232 aa, Onchocerca volvulus
MCAPSGPGNKFPDFQAETNEGFISSFYDWIGKDSWAILFSHPRDFTPVCTTELARLVQLAPEFKKRNVKLIGLSCDSADSHSKWADDILALYKMKCVGCDSEKKLPYPIIADEDRSLATELGMMDPDERDEKGNTLTARCVFIIGSDKTLKLSILYPATTGRNFDEILRVVDSLQLTAVKLVATPVDWKDGDDCVVLPTIDDNEAKKLFGEKIHTIDLPSGKHYLRMVPHPK

SEQ ID NO: 21417 - protein, 161 aa, Onchocerca volvulus
EFKKRNVKLIGLSCDSADSHSKWADDILALYKMKCVGCDSEKKLPYPIIADEDRSLATELGMMDPDERDEKGNTLTARCVFIIGSDKTLKLSILYPATTGRNFDEILRVVDSLQLTAVKLVATPVDWKDGDDCVVLPTIDDNEAKKLFGEKIHTIDLPSGK

SEQ ID NO: 21418 - protein, 235 aa, Dirofilaria immitis
MTKGILLGDKFPDFRAETNEGFIPSFYDWIGKDSWAILFSHPRDFTPVCTTELARLVQLAPEFNKRNVKLIGLSCDSAESHRKWVDDIMAVCKMKCNDGDTCCSGNKLPFPIIADENRFLATELGMMDPDERDENGNALTARCVFIIGPEKTLKLSILYPATTGRNFDEILRVVDSLQLTAVKLVATPVDWKDGDDCVVLPTIDDTEAKKLFGEKINTIELPSGKHYLRMVAHPK

SEQ ID NO: 21419 - protein, 235 aa, Dirofilaria immitis
MTKGILLGDKFPDFRAETNEGFIPSFYDWIGKDSWAILFSHPRDFTPVCTTELARLVQLAPEFKKRNVKLIGLSCDSAESHRKWVDDIMAVCKMKCNDGDTCCSGNKLPFPIIADENRFLATELGMMDPDERDENGNALTARCVFIIGPEKTLKLSILYPATTGRNFDEILRVVDSLQLTAVKLVATPVDWKGGDDCVVLPTIDDTEAKKLFGEKINTIELPSGKHYLRMVAHPK

SEQ ID NO: 21420 - protein, 212 aa, Nostoc punctiforme
MALRLGDTVPNFTQASTHGDIDFYQWAGDSWVVLFSHPADFTPVCTTELGTVAKLKPEFDKRNVKAIALSVDDVESHKGWVGDIEETQSTTLNYPILADADRKVADLYDMIHPNANAAVTVRSVFVIDPNKKLRLSFTYPPSTGRNFDELLRVIDSLQLTDNYSVATPADWKDGEDVVIVPSLKDPEVLKEKFPKGYEEIKPYLRMTPQPNK

SEQ ID NO: 21421 - protein, 185 aa, Nostoc punctiforme
MISRRTFLNILFASCISVISWLNFIPAADALGGKLPAINQPAPEFTLPTNTGDGKISLSDLRGKWLVLYFYPKDFTSGCTIEARRFQQDLPQYLAKNTQIIGVSADDIDSHAKFCDSEGLKFPLLADTDGSVSKAYGSWLGFLSMRHSFIIDPQGVLRETFVKVNPTVHSSEVLARLEKLQSTAS

SEQ ID NO: 21422 - protein, 222 aa, Drosophila melanogaster
MSGKALNIGDQFPNFTAETSEGRIDFYDWMQDSWAILFSHPADFTPVCTTELSRVAALIPEFQKRGVKPIALSCDTVESHKGWIEDIKSFGKLSSFDYPIIADDKRELALKFNMLDKDEINAEGIPLTCRAVFVVDDKKKLRLSILYPATTGRNFDEILRVIDSLQLTQTKSVATPADWKQGGKCMVLPTVKAEDVPKLFPDGIETIELPSGKSYLRITPQP

SEQ ID NO: 21423 - protein, 222 aa, Drosophila melanogaster
MSGKALNIGDQFPNFTAETSEGRIDFYDWMQDSWAILFSHPADFTPVCTTELSRVAALIPEFQKRGVKPIALSCDPVESHKGWIEDIKSFGKLSSFDYPIIADDKRELALKFNMLDKDEINAEGIPLTCRAVFVVDDKKKLRLSILYPATTGRNFDEILRVIDSLQLTQTKSVATPADWKQGGKCMVLPTVKAEDVPKLFPDGIETIELPSGKSYLRITPQP

SEQ ID NO: 21424 - protein, 222 aa, Drosophila melanogaster
MSGKALNIGDQFPNFTAETSEGRIDFYDWMQDSWAILFSHPADFTPVCTTELSRVAALIPEFQKRGVKPIALSCDTVKSHKGWIEDIKSFGKLSSFDYPIIADDKRELALKFNMLDKDEINAEGIPLTCRAVFVVDDKKKLRLSILYPATTGRNFDEILRVIDSLQLTQTKSVATPADWKQGGKCMVLPTVKAEDVPKLFPDGIETIELPSGKSYLRITPQP

SEQ ID NO: 21425 - protein, 220 aa, Drosophila melanogaster
MRLGQTVPNFEADTTKGPIKFHEWQGNSWVVLFSHPADFTPVCTTELGRIAVHQPEFAKRNTKCLAHSVDALNSHVDWVNDIKSYCLDIPGDFPYPIIADPTRDLAVTLGMLDEEQKKDPEVGKTIRALFIISPDHKVRLSMFYPMSTGRNVDEILRTIDSLQLTDRLKVVATPANWTPGTKVMILPSVTDDEAHKLFPKGFDKVSMPSGVNYVRTTENY

SEQ ID NO: 21426 - protein, 220 aa, Drosophila melanogaster
MRLGQTVPNFEADTTKGPIKFHEWQGNSWVVLFSHPADFTPVCTTELGRIAVHQPEFAKRNTKCLAHSVDALNSHVDWVNDIKSYCLDIPGDFPYPIIADPTRDLAVSLGMLDEEQKKDPEVGKTIRALFIISPDHKVRLSMFYPMSTGRNVDEILRTIDSLQLTDRLKVVATPANWTPGTKVMILPTVTDDEAHKLFPKGFDKVSMPSGVNYVRTTDNY

SEQ ID NO: 21427 - protein, 220 aa, Drosophila melanogaster
MRLGQTVPNFEADTTKGPIKFHEWQGNSWVVLFSHPADFTPVCTTELGRIAVHQPEFAKRNTKCLAHSVDALNSHVDWVNDIKSYCLDIPGDFPYPIIADPTRDLAVTLGMLDEEQKKDPEVGKTIRALFIISPDHKVRLSMFYPMSTGRNVDEILRTIDSLQLTDRLKVVATPANWTPGTKVMILPTVTDEEAHKLFPKGFDKVSMPSGVNYVRTTENY

SEQ ID NO: 21428 - protein, 220 aa, Drosophila melanogaster
MRLGQTVPNFEADTTKGPIKFHEWQGNSWVVLFSHPADFTPVCTTELGRIAVHQPEFAKRNTKCLAHSVDALNSHVDWVNDIKSYCLDIPGDFPYPIIADPTRDLAVSLGMLDEEQKKDPEVGKTIRALFIISPDHKVRLSMFYPMSTGRNVDEILRTIDSLQLTDRLKVVATPANWTPGTKVMILPTVTDEEAHKLFPKGFDKVSMPSGVNYVRTTDNY

SEQ ID NO: 21429 - protein, 220 aa, Drosophila melanogaster
MRLGQTVPNFEADTTKGPIKFHEWQGNSWVVLFSHPADFTPVCTTELGRIAVHQPEFAKRNTKCLAHSVDALNSHVDWVNDIKSYCLDIPGDFPYPIIADPTRDLAVSLGMLDEEQKKDPEVGKTIRALFIISPDHKVRLSMFYPMSTGRNVDEILRTIDSLQLTDRLKVVATPANWTPGTKVMILPTVTDEEAHKLFPKGFDKVSMPSGVNYVRTTENY

SEQ ID NO: 21430 - protein, 155 aa, Drosophila melanogaster
MRLGQTVPNFEADTTKGPIKFHEWQGNSWVVLFSHPADFTPVCTTELGRIAVHQPEFAKRNTKCLAHSVDALNSHVDWVNDIKSYCLDIPGDFPYPIIADPTRDLAVTLGMLDEEQKKDPRWVRPSAPCSSSVRTIRCASPCFTPCPLVATLTRF

SEQ ID NO: 21431 - protein, 220 aa, Plasmodium yoelii yoelii
MGYHLGATFPNFTAKASGIDGDFELYKYIENSWAILFSHPNDFTPVCTTELAELGKMHEDFLKLNCKLIGFSCNSKESHDKWIEDIKYYGKLNKWEIPIVCDESRELANKLKIMDEQEKDITGLPLTCRCLFFISPEKKIKATVLYPATTGRNAHEILRVLKSLQLTYTTPVATPVNWNEGDKCCVIPTLQDDEISKHFKNEITKVEMPSKKKYLRFVNL

SEQ ID NO: 21432 - protein, 110 aa, Pseudopleuronectes americanus
LGMLDPDEIDKDGLPLTARCVFVIGPDKKLKLSILYPATTGRNFDELLRVIDSLQLTAQKKVATPVDWKPGQKVMVIPSLSDNEAAALFPNGVTTKELPSGKKYLRYTQP

SEQ ID NO: 21433 - protein, 224 aa, Homo sapiens
MPGGLLLGDVAPNFEANTTVGRIRFHDFLGDSWGILFSHPRDFTPVCTTELGRAAKLAPEFAKRNVKLIALSIDSVEDHLAWSKDINAYNCEEPTEKLPFPIIDDRNRELAILLGMLDPAEKDEKGMPVTARVVFVFGPDKKLKLSILYPATTGRNFDEILRVVISLQLTAEKRVATPVDWKDGDSVMVLPTIPEEEAKKLFPKGVFTKELPSGKKYLRYTPQP

SEQ ID NO: 21434 - protein, 224 aa, Homo sapiens
  unsure (1)..(224): unsure at all Xaa locations
MPGGLLLGDVAPNFEANTTVGRIRFHDFLGDSWGILFSHPRDFTPVXTTELGRAAKLAPEFAKRNVKLIALSIDSVEDHLAWSKDINAYNSEEPTEKLPFPIIDDRNRELAILLGMLDPAEKDEKGMPVTARVVFVFGPDKKLKLSILYPATTGRNFDEILRVVISLQLTAEKRVATPVDWKDGDSVMVLPTIPEEEAKKLFPKGVFTKELPSGKKYLRYTPQP

SEQ ID NO: 21435 - protein, 187 aa, Homo sapiens
MPGGRLLGDVAPNFEANTTAGRVRFQDFLGNSLGILFSHPRDFTPVCTTELGRAAKLAPEFAKRNVNKDINAYNGEESTEKLPFRIIHDKNRDLFILLGMLDPAEKDEKDMPVTARVVFVIGPDKKPKLSIIYLATTGRNFDEILRVVTSLQLTAEKRVATPVDWKCKSTQVDSVGLSGKSAAATEA

SEQ ID NO: 21436 - protein, 204 aa, Ferroplasma acidarmanus
MAVYLGQKAPGFLVNTTKGPLSLEDYKGNWVILFSHPADFTPVCTTEFMAFARRYDEFKKINTELIGLSVDSIYSHIEWMKNIKEKFGIEIPFPVIADINKDVAREYNMMDEKTGSTVRGVFIIDPNMIVRLMIYYPAETGRNIDEIMRTLKALQMNWDRKLAAPVNWQPGNDGIVSAPGTLDEAINREKNGSKTWYLTYEAVR

SEQ ID NO: 21437 - protein, 231 aa, Ferroplasma acidarmanus
MENRMPLIGEKFPEMDVVTTQGSKKLPDDYKGKWFVLFSHPGDFTPVCTTEFFSFAQRNDEFTKLNTELIGLSVDSKISHMEWINWIHDNLKIDVKFPIIADPMGNVAKSLGMIHAESATSTVRAVFIVDDKAVVRAILYYPLEIGRNISEILRMIKALQMVDKYKIATPANWPDNELMKGRFIIPPPATMNDIPERLKKYKGYAWWLTYRDAPEEEVKEAKEVSRMKEAN

SEQ ID NO: 21438 - protein, 224 aa, Sus scrofa
MPGGLLLGDEAPNFEANTTIGRIRFHDFLGDSWGILFSHPRDFTPVCTTELGRAAKLAPEFAKRNVKMIALSIDSVEDHLAWSKDINAYNGEEPKETLPFPIIDDKSRDLAIQLGMLDPAEKDEQGMPVTARVVFIFGPDKKLKLSILYPATTGRNFDEILRVIISLQLTAEKRVATPVDWKNGDSVMVLPNIPEEEAKKLFPKGVFTKELPSGKKYLRYTPQP

SEQ ID NO: 21439 - protein, 211 aa, Cytophaga hutchinsonii
MSLRLGDIAPDFKADTTEGPISFHEWLGDKWGVLFSHPADYTPVCTTELGATAKLKSEFEKRNVKVAALSVDGLESHKGWIKDINETQNTTVNFPIIADEDRKVAELYDMIHPNASEKFTVRSLFIIGNDKKIKLIITYPASTGRNFTEILRVIDSLQLTANYSVATPANWKDGEDVVITPAVKDEDIAAKFPKGYTRVKPYLRTTPQPNK

SEQ ID NO: 21440 - protein, 224 aa, Bos taurus
MPGGLLLGDEAPNFEANTTIGRIRFHDYLGDSWGILFSHPRDFTPVCTTELGRAAKLAPEFAKRNVKMIALSIDSVEDHLAWSKDINAYNGEEPTEKLPFPIIDDKNRDLAIQLGMLDPAEKDEKGMPVTARVVFIFGPDKKLKLSILYPATTGRNFDEILRVIISLQLTAEKRVATPVDWKNGDSVMVLPTIPEEEAKKLFPKGVFTKELPSGKKYLRYTPQP

SEQ ID NO: 21441 - protein, 251 aa, Nostoc sp. PCC 7120
MFSNREGQRVPQVTFRTRQNNEWVNVTTDDLFAGKTVAVFSLPGAFTPTCSSTHLPGYNELAKVFKDNGVDEIVCISVNDAFVMNEWAKTQEAENITLIPDGNGEFTEGMGMLVDKTDLGFGKRSWRYSMLVKDGVIEKMFIEPDVPGDPFEVSDAQTMLKHINPQAAKPKLVSLFTKVGCPFCARAKAALQENGIEYEEITLGKGITTRSLRAVTGATTVPQVFIDGVLIGGSEALTDYLSTIKQEKVGV

SEQ ID NO: 21442 - protein, 224 aa, Rhodobacter sphaeroides
MLPSNFSALSFATSAAPACPAPTTTMSGMTLHSIALRQIDWPGVRRDPITRGIGNATRWGQEMVISVGDRLPEATLVRIGAEGPEQVQLSERLKGRNVVIFAVPGAFTPTCHSAHVPSFIRTKDQFAGKGVDEIICVSVNDPFVMKAWGESTGASGAGITMLADADGAFTKALGLAFDAPPVGLIGRSRRYALQAKDGVVAVIHLEESPGVCETSGGEALLAAI

SEQ ID NO: 21443 - protein, 161 aa, Rhodopseudomonas palustris
MTIKVGDRLPDAQFRVMTEDGVQVKTTDDIFKGKKVALFAVPGAYTGTCHKMHLPSIFLNAYAMKDKGVDTIAIVSVNDAFVMSAWKRDTDQRNEAIFLGDGNADFTKAIGMEMDGSGFGLGTRSLRYSMVVEDGVVKTLNLEPNPGKVEVSGGDTLLGQL

SEQ ID NO: 21444 - protein, 170 aa, Rhodospirillum rubrum
MSVTFGLWREFMIAVGDALPSGTLHHKTAAGIEAVDPAEFLGAGKAVLFAVPGAFTPTCSDSHVPGYIAQAQALRDKGVTKVACVAVNDAFVLAAWSKALGAEGTVEMLADGNGDYARALGLELDLTAKGLGKRFQRCALVLDNGKVTHLAVDEGGALDVSSAEAVLALL

SEQ ID NO: 21445 - protein, 168 aa, Ralstonia metallidurans
MIAIGQRVPDATLYEFFETESEGCVLGPNAFSVAELVKGRKIVVFGLPGAFTPTCSAKHVPSYLKEYDALRAAGVDEIWCHSVNDAFVMGAWGREQKATGKVRMMGDGAAQWARALGLDQDLSQRGLGVRAKRYAMVVDDGVVTHLFIEEPGEFKVSSAEWVLQALRA

SEQ ID NO: 21446 - protein, 245 aa, Neisseria meningitidis MC58
MALQDRTGQKVPSVVFRTRVGDTWKDVSTDDLFKGKKVVVFSLPGAFTPTCSSSHLPRYNELFGAFKENGVDAIYCVSVNDTFVMNAWAAEEESDNIYMIPDGNGEFTEGMGMLVGKEDLGFGKRSWRYSMLVNDGVVEKMFIEPEEPGDPFKVSDADTMLQFVAPDWKAQESVAIFTKPGCQFCAKAKQALQDKGLSYEEIVLGKDATVTSVRAITGKMTAPQVFIGGKYIGGSEDLEAYLAKN

SEQ ID NO: 21447 - protein, 202 aa, Burkholderia fungorum
MGDCRRAAERVVGFMPVFHCDTTTCERASHRCKGLSMIQTGDKLPDATLFELIEDERAGCTIGPNSFDVREQTAGKRVVIFGLPGAFTPTCSAKHVPGYVEHAGQLRALGIDEIWCVSVNDAFVMGAWGRDQHASGKVRMMADGSAAFTRALGLEQDLSARGMGIRSQRYAMVVDDGVVKTLNVEAAGNSKSAMQGYSRHVS

SEQ ID NO: 21448 - protein, 188 aa, Branchiostoma belcheri tsingtaunese
MLIPVTICSLARRLPSAIGARCAIYTATAYNMPIKVGDKLPGIDLYENTPGNKVNVSELFAGKKGVLFAVPGAFTPGCSKTHLPGYVGKAGDLKAKGVQVIACVSVNDPFVMEAWGKDQKAEGKVRMLADTGAEFTKAIGLDLDATGLLGNIRSKRYSMLVEDGEVKQLNVEPDGTGLTCSLAEGLKL

SEQ ID NO: 21449 - protein, 166 aa, Pseudomonas putida KT2440
MIKTGDQLPDVTLYQYNNDAGACAIGPKAFSIRERCKHKKVLIFALPGAFTPTCSERHVPGYVAAAPALFAAGIDEILCVSVNDAFVMNAWGNSLQVGDAVKMIGDGNGEFSEALGLTQDLSARGLGRRSQRYAMLVDDQVVQYIAVESPGKFEVSDAASLLAVLR

SEQ ID NO: 21450 - protein, 175 aa, Anopheles gambiae str. PEST
MFALILALHCVCCMFCCEWQCFAEGDKIPSIDLFEDSPANKVNMADLCAGKKVILFAVPGAFTPGCSKTHLPGYVEKAGDLKSSGATEIVCVSVNDPFVMSAWGKQHNATGKVRMLADPAAAFTKALELGADLPPLGGLRSKRYSMVLEDGVVKSLNVEPDGTGLSCSLADKIKL

SEQ ID NO: 21451 - protein, 153 aa, Anopheles gambiae str. PEST
LLQEGDKIPSIDLFEDSPANKVNMADLCAGKKVILFAVPGAFTPGCSKTHLPGYVEKAGDLKSSGATEIVCVSVNDPFVMSAWGKQHNATGKVRMLADPAAAFTKALELGADLPPLGGLRSKRYSMVLEDGVVKSLNVEPDGTGLSCSLADKI

SEQ ID NO: 21452 - protein, 150 aa, Anopheles gambiae str. PEST
LPAGEFTFITAEGKQQRDSQSLFGGKRVVLFAVPGAFTPTCSNAHLPGYVVLADKFKEKGVDAICCLSVNDAFVMKAWQDAQNAEAITMLADGDGSWTRALGLAKETGAFGGVRAQRFALIANDGVVEQLFVEAPGKFEVSDAQSLLAAL

SEQ ID NO: 21453 - protein, 161 aa, Agrobacterium tumefaciens str. C58 (Cereon)
MTIKIGEKLPSATFKEKTADGPVETTTDALFGGKKVVLFAVPGAFTPTCSLNHLPGYLENRDAILAKGVDDIAVVSVNDWHVMGAWAQSSGGQGKIHFLADWDASFTKALGLDADLSGGGLGVRSKRYSMLVEDGVVKSLNVEENPGQATVSAAAAMIEQL

SEQ ID NO: 21454 - protein, 160 aa, Xanthomonas campestris pv. campestris str. ATCC 33913
MTIQVGDRIPEVVLKHLREGIEAVDTHTLFTGRKVVLFAVPGAFTPTCSAKHLPGYVEQFEAFRKRGIEVLCTAVNDPFVMQAWGRSQLVPDGLHLVPDGNAELARALGLEIDASGSGMGLRSRRYALYADDGVVKALFVEEPGEFKVSAADYVLQHLPD

SEQ ID NO: 21455 - protein, 160 aa, Xanthomonas axonopodis pv. citri str. 306
MTIHVGDRIPEVVLKRLRDGIEAVDTHSLFAGRKVLLFAVPGAFTPTCSAKHLPGYVEHFEQFRKRGIEVLCTAVNDPFVMQAWGRSQLIPDGLHLLPDGNAELARALGLEIDASGSGMGLRSRRYALYADDAVVKALFVEEPGEFKVSAADYVLQHLPD

SEQ ID NO: 21456 - protein, 160 aa, Caulobacter crescentus CB15
MAIKVGDTLPAATFMTSTAEGPAPISTDDIFKGKTVALFAVPGAFTPTCSAKHLPGFKEKADELKAKGVDSIVCVSVNDVFVMKAWGKDQGIDGEVLLIADGNGDFTKAIGLDFDGSKFGMGARSQRYSLVAKDGVVTQLHVEDAGQFKVSSAEYLLEQL

SEQ ID NO: 21457 - protein, 99 aa, Coccidioides posadasii
GYIQKLPQLKEKGVDVVPVLAFNDAWVISAWGKANGVTGNDILFLSDPEVKFSKSIGWNPGKRTGRYAMIIDHGQVTYAEIKPGREVPVPGADPVISKL

SEQ ID NO: 21458 - protein, 161 aa, Brucella suis 1330
MTIKVGDRLPAATFKVKTADGVTEMTTDDVFKGRKVVLFAVPGAFTPTCSLNHLPGYLENRDAILAKGVDQIAVVAVNDPFVMGAWAQSTGGEGKILFLADGSATFTKAAGLDIDLSGGGLGVRSKRYSAIVEDGVVKSLNIEEQPGQAVTSAASALLAQL

SEQ ID NO: 21459 - protein, 240 aa, Haemophilus somnus 129PT
MTMEGKKVPQVTFRTRQGDQWVDVTTADLFDNKTVVLFSLPGAFTPTCSATHLPRYNELACEFKALGVDDIICVSVNDTFVMNAWKADQESENVTVIPDGNGEFTSGMGMLVDKTELGFGKRSWRYSMLVKNGVVEKMFIEPQEPGDPFKVSDADTMIKYLNPNWTEKPSVSIITKPGCPFCAKAKTLLKEKGYTFEEIILGRDASTISVRAITGKTSVPQVFIGGQYIGGSDDLAQYFA

SEQ ID NO: 21460 - protein, 158 aa, Shewanella oneidensis MR-1
MIAQGQKLPAATLSQLTKDGMVNHQVTELFAGKKVVLFAVPGAFTPTCSEAHLPGYVVLADELKAKGVDLIACVSVNDAFVMKAWGEAQNASELLMLADGDASFTKALGLEMDTAGFGGVRSQRYAMIIDNGVVTLLNVEAPKSFEVSKAEVVLAALS

SEQ ID NO: 21461 - protein, 243 aa, Yersinia pestis CO92
MFTSQEGKKVPQVTFHTRQGDQWIDVTTDDLFSNKTVIVFSLPGAFTPTCSSSHLPRYNELAGVFKQHGVDSILCVSVNDTFVMNAWKSDQHAENITFVPDGNGEFTKGMNMLVEKADLGFGPRSWRYSMLVRNGVVEKMFVEPNKPGDPFEVSDADTMLKYLAPDFKVQESVAVFTKPGCPFCAKAKQMLQDHGLQYEEIVLGKDATTVSLRAVSGRSTVPQIFIGGRHIGGSDDLEKYLPA

SEQ ID NO: 21462 - protein, 157 aa, Vibrio vulnificus CMCP6
MIAQGQTLPNATLSQLTKEGMVHHPVLELFAGKKVVLFAVPGAFTPTCSEAHLPGYIVLADQLKAKGVDLIACVSVNDAFVMKAWGEAQNAEEILMLADGDASFTKALGLEMDTAGFGGLRSQRYAMIIDNGVVTTLNVEAPKSFEVSNAETILAAL

SEQ ID NO: 21463 - protein, 157 aa, Vibrio parahaemolyticus RIMD 2210633
MIQQGQALPSATVSELTADGMVNHDVTELFANKKVVLFAVPGAFTPTCSEAHLPGYVVLADQLKAKGVDLIACVAVNDAFVMNAWGEAQNASEILMLGDGDASFTKALGLEMDTGGFGGVRSQRYAMIIENGVVTTLNVEKPSEFEVSNAETILAAL

SEQ ID NO: 21464 - protein, 242 aa, Vibrio parahaemolyticus RIMD 2210633
MFVSKEGQNVPQVTFPTRQGDTWVNVTSDDLFKGKTVIVFSLPGAFTPTCSSSHLPRYNELFPVFKEHGVDEILCISVNDAFVMNAWKHDQEAEHITFIPDGNGEFTDGMGMLVDKNDIGFGKRSWRYSMLVKDGVIEKMFIEPNEPGDPFKVSDADTMLNYIAPEYRTQESITVFTKPGCPFCMKAKQNLIDHGLQYEEVILGKDATSVSLRAITGRTTVPQVFIGGKHIGGSEELETYLG

SEQ ID NO: 21465 - protein, 161 aa, Bradyrhizobium japonicum USDA 110
MAIQTGDKLPEAKFRVMTAEGPQVKTTDDIFKGKKVALFAVPGAYTGTCHKMHLPSIFLNAYAIKDKGVDTIAIISVNDAFVMNAWKRDTDQRDEAVFLADGNADFTKAIGMELDASANGLGIRSKRYSMLVEDGVVKKLNLEAMPGKVEVSGGDTLLGQL

SEQ ID NO: 21466 - protein, 191 aa, Brucella melitensis 16M
MLRHGKSKVSHKQQADQTAISIRPALRRKSMTIKVGDRLPAATFKVKTADGVTEMTTDDVFKGRKVVLFAVPGAFTPTCSLNHLPGYLENRDAILAKGVDQIAVVAVNDPFVMGAWAQSTGGEGKILFLADGSATFTKAAGLDIDLSGGGLGVRSKRYSAIVEDGVVKSLNIEEQPGQAVTSAASALLAQL

SEQ ID NO: 21467 - protein, 166 aa, Ralstonia solanacearum
MIQPGQPLPDATLYEYFEVEKDGCALGPNAFSAADLAQGKTILIFGLPGAFTPTCSARHVPGYLAHYDALRTKGVDEIWCVSVNDAFVMGAWARAQGTDGRVRMLADGSAEFTRRLGLEQDLSKRGMGVRSQRYAMIVKNGVVTVLQVEAPGQFAVSNAESMLARL

SEQ ID NO: 21468 - protein, 166 aa, Lipomyces kononenkoae
VTDKFPEDVKFLYIAYTPAKADITACGIPIPLDFDKEFRDKTVVIVAIPGAFTPTCTANHIPPFVEKFTALKSAGVDAVIVLSANDPFVQSAFGKALGVTDEAFIFASDPGAEFSKSAGLSLDLPPAFGTRTARYAIIVSNGVVKYVEKDSEGVAGSGVDAVLAAL

SEQ ID NO: 21469 - protein, 162 aa, Arabidopsis thaliana
MAPITVGDVVPDGTISFFDENDQLQTVSVHSIAAGKKVILFGVPGAFTPTCSMSHVPGFIGKAEELKSKGIDEIICFSVNDPFVMKAWGKTYPENKHVKFVADGSGEYTHLLGLELDLKDKGSGISSGRFALLLDNLKVTVANVESGGEFTVSSAEDILKAL

SEQ ID NO: 21470 - protein, 162 aa, Arabidopsis thaliana
MAPITVGDVVPDGTISFFDENDQLQTVSVHSIAAGKKVILFGVPGAFTPTCSMSHVPGFIGKAEELKSKGIDEIICFSVNDPFVMKAWGKTYQENKHVKFVADGSGEYTHLLGLELDLKDKGLGIRSRRFALLLDNLKVTVANVENGGEFTVSSAEDILKAL

SEQ ID NO: 21471 - protein, 162 aa, Arabidopsis thaliana
MAPITVGDVVPDGTISFFDENDQLQTVSVHSIAAGKKVILFGVPGAFTPTCSMSHVPGFIGKAEELKSKGIDEIICFSVNDPFVMKAWGKTYPENKHVKFVADGSGEYTHLLGLELDLKDKGLGIRSRRFALLLDNLKVTVANVESGGEFTVSSAEDILKAL

SEQ ID NO: 21472 - protein, 162 aa, Arabidopsis thaliana
MAPITVGDVVPDGTISFFDENDQLQTVSVHSIAAGKKVILFGVPGAFTPTCSMSHVPGFIGKAEELKSKVIDEIICFSVNDPFVMKAWGKTYTENKHVKFVADGSGEYTHLLGLELDLKDKGLGIRSRRFALLLDNLKVTVANVENGGEFTVSSAEDILKAL

SEQ ID NO: 21473 - protein, 162 aa, Arabidopsis thaliana
MAPIAVGDVVPDGTISFFDENDQLQTASVHSLAAGKKVILFGVPGAFTPTCSMKHVPGFIEKAEELKSKGVDEIICFSVNDPFVMKAWGKTYPENKHVKFVADGSGEYTHLLGLELDLKDKGLGVRSRRFALLLDDLKVTVANVESGGEFTVSSADDILKAL

SEQ ID NO: 21474 - protein, 162 aa, Arabidopsis thaliana
MAPIAVGDVVPDGTISFFDENDQLQTVSVHSLAAGKKVILFGVPGAFTPTCSMKHVPGFIEKAEELKSKGVDDIICFSVNDPFLMKAWGKTYPENKHVKFVADGSGEYTHLLGLELDLKDKGLGIRSRRFALLLDNLKVTVANLESGGGFTVSSADDILEAL

SEQ ID NO: 21475 - protein, 201 aa, Arabidopsis thaliana
MAMSILKLRNLSALRSAANSARIGVSSRGFSKLAEGTDITSAAPGVSLQKARSWDEGVSSKFSTTPLSDIFKGKKVVIFGLPGAYTGVCSQQHVPSYKSHIDKFKAKGIDSVICVSVNDPFAINGWAEKLGAKDAIEFYGDFDGKFHKSLGLDKDLSAALLGPRSERWSAYVEDGKVKAVNVEEAPSDFKVTGAEVILGQI

SEQ ID NO: 21476 - protein, 201 aa, Arabidopsis thaliana
MAMSILKLRNLSALRAAANSARIGVSSRGFSKLAEGTDITSAAPGVSLQKARSWDEGVSSKFSTTPLSDIFKGKKVVIFGLPGAYTGVCSQQHVPSYKSHIDKFKAKGIDSVICVSVNDPFAINGWAEKLGAKDAIEFYGDFDGKFHKSLGLDKDLSAALLGPRSERWSAYVEDGKVKAVNVEEAPSDFKVTGAEVILGQI

SEQ ID NO: 21477 - protein, 199 aa, Arabidopsis thaliana
MSILKLRNLSALRSAANSARIGVSSRGFSKLAEGTDITSAAPGVSLQKARSWDEGVSSKFSTTPLSDIFKGKKVVIFGLPGAYTGVCSQQHVPSYKSHIDKFKAKGIDSVICVSVNDPFAINGWAEKLGAKDAIEFYGDFDGKFHKSLGLDKDLSAALLGPRSERWSAYVEDGKVKAVNVEEAPSDFKVTGAEVILGQI

SEQ ID NO: 21478 - protein, 234 aa, Arabidopsis thaliana
MATSLSVSRFMSSSATVISVAKPLLSPTVSFTAPLSFTRSLAPNLSLKFRNRRTNSASATTRSFATTPVTASISVGDKLPDSTLSYLDPSTGDVKTVTVSSLTAGKKTILFAVPGAFTPTCSQKHVPGFVSKVGELRSKGIDVIACISVNDAFVMEAWRKDLGINDEVMLLSDGNGEFTGKLGVELDLRDKPVGLGVRSRRYAILADDGVVKVLNLEEGGAFTNSSAEDMLKAL

SEQ ID NO: 21479 - protein, 234 aa, Arabidopsis thaliana
MATSLSVSRFMSSSATVISVAKPLLSPTVSFTAPLSFTRSLAPNLSLKFRNRRTNSASATTRSFATTPVTASISVGDKLPDSTLSYLDPSTGDVKTVTVSSLTAGKKTILFAVPGAFTPTCSQKHVPGFVSKAGELRSKGIDVIACISVNDAFVMEAWRKDLGINDEVMLLSDGNGEFTGKLGVELDLRDKPVGLGVRSRRYAILADDGVVKVLNLEEGGAFTNSSAEDMLKAL

SEQ ID NO: 21480 - protein, 164 aa, Arabidopsis thaliana
MAPITVGDVVPDGTISFFDENDQLQTVSVHSIAAADGFLDFDLRIGVFGFSEVSMSHVPGFIGKAEELKSKGIDEIICFSVNDPFVMKAWGKTYQENKHVKFVADGSGEYTHLLGLELDLKDKGLGIRSRRFALLLDNLKVTVANVENGGEFTVSSAEDILKAL

SEQ ID NO: 21481 - protein, 553 aa, Arabidopsis thaliana
MAPIDVGDFVPDGSISFFDDDDQLQTVSVHSLAAGKKVILFGVPGAFPPTCSMNHVNGFIEKAEELKSNGVDEIICLSGDDPFMITACSENKHVKFVEDGSGEYIQLLGLELEVKDKGLGVRSRGFALLLDNLKVIVVNVGSGGDCSLFQLMKMTTTTMSNLPTDLLEEIISRVPRKYMRAVRLTCKRWNGMFKSQSFTKMHIGKEEAATRELRQTRMIVMMDYNVYLMGIAVNEIPSIETLGKLTCLDDSEQVKISQVFCCEGLLLCILKDDDTKIVVWNPYLGQTRWIQTRLICCVSGWKKYALGYGNNSENRSCRSPKILRVTDNFNIFSENIPLQYEIYDFDSDVWTTLDVSPHWFIMSERGLSLKGNTYWGAKERHAYGSIDHIICFDFTRERFGPLLPLPFSAWGAQFASLSSVREDKITALFQNCRAYKLELWITTKIDVNNATWSKFFTMDTPYLHEILSLKTFFIDEENKIVVVSNKERDTKGDLTHDSIDIINGEARCLWKLGLGKPADKNCWPLVCPYVPSVVQIKQHKGGKTKEQSDYKRH

SEQ ID NO: 21482 - protein, 160 aa, Mesorhizobium loti
MTISVGDKLPEATFKTMTADGAKAITSAEIFPGKKVVLFGVPGAFTPTCSNNHLPGYLENHDAILARGVDTIAVVSVNDVHVMGAWARFTGGEDKILFLADGSADFAKAVGLDNDLSAGGMGLRSKRFSMIVDDGKVTALNIETKPGVDESGAAHILGQL

SEQ ID NO: 21483 - protein, 182 aa, Mesorhizobium loti
MTVKKKVPFVTFRTRVRDESIEGPNPYRWEDKTSDDYFSGKRIILFSLPGAFTPTCSTLQLPDFEMLYDEFEKEGIDAIYCVSVNDAFVMNAWGKALGLKKVQLIPDGSGEFTRKMGMLVAKDNLGFGMRSWRYAAVINNGVVEQCFEENGFCDNSEADPYGVSSPQNVLETLRAAKAVTAA

SEQ ID NO: 21484 - protein, 182 aa, Mesorhizobium loti
MTVKKKVPFVTFRTRVRDDSIEGPNPYRWEDKTSDDYFRGKRIILFSLPGAFTPTCSTLQLPDFEMLYDEFEKEGIDAIYCVSVNDAFVMNAWGKALGLQKVQLIPDGSGEFTRKMGMLVAKDNLGFGMRSWRYAAVINNGVVEQWFEEDGFCDNCEADPYGVSSPQNVLETLRAAKAVTAA

SEQ ID NO: 21485 - protein, 161 aa, Sinorhizobium meliloti
MTIAVGDKLPNATFKEKTADGPVEVTTELLFKGKRVVLFAVPGAFTPTCSLNHLPGYLENRDAILARGVDDIAVVAVNDLHVMGAWATHSGGMGKIHFLSDWNAAFTKAIGMEIDLSAGTLGIRSKRYSMLVEDGVVKALNIEESPGQATASGAAAMLELL

SEQ ID NO: 21486 - protein, 162 aa, Glycine max
MAPIGVGSTLPDGQLAWFDESDQMQQVSIHSLAAGKKVILFGVPGAFTPTCSNQHVPGFITQAEELKAKGVDEILLVSVNDPFVMKAWAKTYPDNKHVKFLADGAAAYTKALGLELDLTEKGLGLRSRRFALLADDLKVTVANVEEGGQFTISGAEEILKAL

SEQ ID NO: 21487 - protein, 163 aa, Glycine max
  unsure (1)..(163): unsure at all Xaa locations
MAPIAVGDVIPDGILAYLDEENKPQTVSIHSLAAGKKVIIFGVPGAFTPTCSLKHVPGFIERAEELKGKGVDEIICISVNDPFVMKXSWAKTFPENKHVKFLADGAAKYTHALGLELDLTDKGLGVRSKRFALLVEDLKVKVANVESGGEFTISSAEEIIKAL

SEQ ID NO: 21488 - protein, 238 aa, Glycine max
  unsure (1)..(238): unsure at all Xaa locations
EEVRKHNTNFIAECYFEYQHQCAPIAVGNVIPDGILAYLDEENKPQTVSIHSLATGKKVIIFGVPXGAFTPTCSLKHVPGFIERAEELKGKGVDEIICISVNDPFVMNSWAKXTFPENKHVKFLADGAAKYTHALGLELDLTDKGLGVRSKRFALLVEDLKVKVANVESGGEFTISSAEEIMQGPLKPLNPLVGCLTVFNVWCETLLMQEYTRNIFLFIDVIVLCALGRAMIWCILWK

SEQ ID NO: 21489 - protein, 163 aa, Glycine max
MAPIAVGNVIPDGILAYLDEENKPQTVSIHSLATGKKVIIFGVPGAFTPTCSLKHVPGFIERAEELKGKGVDEIICISVNDPFVMNSWAKTFPENKHVKFLADGAAKYTNALGLELDLTDKGLGVRSKRFALLVEDLKVMVAWIIGSRVLYFGCAKHLLQNFV

SEQ ID NO: 21490 - protein, 172 aa, Glycine max
  unsure (1)..(172): unsure at all Xaa locations
MAPIAVGDVIPDGILAYLDEENKPQTVSIHSLAAGKKVIIFGVPGAFTPTCSLKHVPGFIERAEELKGKGVDEIICISVNDPFVMNSWAKTFPENKHVKFLANGGGEFTISSAEEIIKALXTLESSCLLFCRLXCVXVTLLMPEHTRILSLFIDVIVLCALERTMIWCILWK

SEQ ID NO: 21491 - protein, 118 aa, Glycine max
  unsure (1)..(118): unsure at all Xaa locations
MAPIAVGDVVPEGTISFFDENDQLQSASVHTLAAGKKVILFGVPGAFTPTCSMQHVPGFIEKAEELKSKGVDEIICFSVNDPFVMKAWGKTYPENKHVKFVADGSGEYTQLLGLELDX

SEQ ID NO: 21492 - protein, 193 aa, Glycine max
  unsure (1)..(193): unsure at all Xaa locations
MASALARRAGGSPAAALWAAARGFASVGSDIVSAAPGVSLQKARSWDEGVATKFSTTPLKDIFHGKKVVIFGLPGAYTGVCSQSHVPSYKNNIDKLKAKGIDSVICVAVNDPYVLNGWAEKLQAKDAIEFYGDLDGSFHKSLDLEIDLSAALLGXRSHRWSAFVDDGKIKAFNVEKAPSDFKVSGAEVILDQI

SEQ ID NO: 21493 - protein, 249 aa, Glycine max
  unsure (1)..(249): unsure at all Xaa locations
GLPILFILHSSLFTPNPSQTQTIHSFSSVTHLTMAASITLSRLVSSTLTTASFFPPITLPSKLSSLRLPTRRXXPKPLRFSSSTITATISVGDKLPEATFSYLDSSGEVQTTTVSELTKGKKAVLFAVPGAFTPTCSQKHVPGFVEKSGELRAKGIDTIACISVNDAFVMKAWKEDLKVNEEVLLLSDGNGTFTKAIGVELDLSDKPVGLGVRSRRYALLAEDGVVKLFNLEEGGAFTFSGAQDILDVL

SEQ ID NO: 21494 - protein, 128 aa, Glycine max
  unsure (1)..(128): unsure at all Xaa locations
XKKVIIFGVPGAFPPTYSFKHVPGFFXKPKKLKGKGVDQIICIRGNDPFVKNSWAKTFPKNKHVKFLADGAAKNTNALGFELDLPHKGLGVRSKRFALLVEPPKVKVANVXSGGKFPLSSAEKIIKAL

SEQ ID NO: 21495 - protein, 201 aa, Glycine max
  unsure (1)..(201): unsure at all Xaa locations
KFVMASAMVNRGGSRIIKSVSAAXXGTRFYAKVATGTDIVSAAPNVSLQKARTWDEGLASKFSTTPLKDIFKDKKVVIFGLPGAYTGVCSNKHVPPYKENIDKFKAKGIDSVICVAINDPYTMNAWAEKLQAKDAIEFYGDFDGSFHKSLELVTDLSGALLGTRSERWSAYVVDGKVKALNVEEAPSDVKVSGADTILGQI

SEQ ID NO: 21496 - protein, 203 aa, Glycine max
  unsure (1)..(203): unsure at all Xaa locations
PGDLVMASVMANRGGSRIIKSVSAAXXGTRFFAKVATGTDIVSAAPNASLQKARTWDEGLASKFSTTPLKDIFKDKKVVIFGLPGAYTGVCSNKHVPPYKENIDKFKAKGIDSVICVAINDPYTMNAWAEKLQAKDAIEFYGDFDGSFHKSLELVTDLSGALLGTRSERWSAYVVDGKVKALNVEEAPSDVKVSGADTILGQI

SEQ ID NO: 21497 - protein, 198 aa, Oryza sativa (japonica cultivar-group)
MASALLRKATVGGSAAAAAARWASRGLASVGSGSDIVSAAPGVSLQKARSWDEGVATNFSTTPLKDIFHGKKVVIFGLPGAYTGVCSQAHVPSYKNNIDKLKAKGVDSVICVSVNDPYALNGWAEKLQAKDAIEFYGDFDGSFHKSLDLEVDLSAALLGRRSHRWSAFVDDGKIKAFNVEVAPSDFKVSGAEVILDQI

SEQ ID NO: 21498 - protein, 225 aa, Oryza sativa (japonica cultivar-group)
MAAPTAAALSTLSTASVTSGKRFITSSFSLSFSSRPLATGVRAAGARAARRSAASASTVVATIAVGDKLPDATLSYFDPADGELKTVTVAELTAGRKAVLFAVPGAFTPTCSQKHLPGFIEKAGELHAKGVDAIACVSVNDAFVMRAWKESLGLGDADVLLLSDGNLELTRALGVEMDLSDKPMGLGVRSRRYALLADDGVVKVLNLEEGGAFTTSSAEEMLKAL

SEQ ID NO: 21499 - protein, 162 aa, Capsicum annuum
MAPIAVGDVIPDGTVSYFDEQDQLQSVSVHSLAKGKKVIMFAVPGAFTPTCSTKHVPGFIEKADLLKSKGVEEILCVSVNDPFVMKAWAKTFPENKHVKFLADGAGKYTHALGLELDLSEKGLGVRSRRYALLVDDLKVKVANVESGGEFTVSGADEILKAL

SEQ ID NO: 21500 - protein, 162 aa, Oryza sativa
MAPVAVGDTLPDGQLGWFDGEDKLQQVSVHGLAAGKKVVLFGVPGAFTPTCSNQHVPGFINQAEQLKAKGVDDILLVSVNDPFVMKAWAKSYPENKHVKFLADGLGTYTKALGLELDLSEKGLGIRSRRFALLADNLKVTVANIEEGGQFTISGAEEILKAL

SEQ ID NO: 21501 - protein, 162 aa, Oryza sativa; identical to SEQ ID NO: 21500

SEQ ID NO: 21502 - protein, 162 aa, Oryza sativa; identical to SEQ ID NO: 21500

SEQ ID NO: 21503 - protein, 198 aa, Oryza sativa; identical to SEQ ID NO: 21497

SEQ ID NO: 21504 - protein, 225 aa, Oryza sativa
MAAAASTLASLSATAAAAAGKRLLLSSPSRSLSLSPVMPHLRAGILSAAPRRAVSASAPAAATIAVGDKLPDATLSYFDSPDGELKTVTVRDLTAGKKVVLFAVPGAFTPTCTQKHVPGFVAKAGELRAKGVDAVACVSVNDAFVMRAWKESLGVGDEVLLLSDGNGELARAMGVELDLSDKPAGLGVRSRRYALLAEDGVVKVLNLEEGGAFTTSSAEEMLKAL

SEQ ID NO: 21505 - protein, 226 aa, Oryza sativa
  unsure (1)..(226): unsure at all Xaa locations
MAAPTAAALSTLSTASVTSGKRFITSSFSLSFSSRPLATGVRAAGARAARRSAASASTVVATIAVGDKLPDATLSYFDPADGELKTVTVAELTAGRKAVLFAVPGAFTPTCSQKHLPGFIEKAGELHAKGVDAIACVSVNDAFVMRAWKESLGLGDADVLLLSDGNLELTRXALGVEMDLSDKPMGLGVRSRRYALLADDGVVKVLNLEEGGAFTTSSAEEMLKAL

SEQ ID NO: 21506 - protein, 167 aa, Triticum aestivum
  unsure (1)..(167): unsure at all Xaa locations
MPELKVGADFPEGVFFSYVQPTPEIAEFSTCGAPTNYNASQEFKSKKVVLISVPGAFTPTCSASHVPSYVENIEQIKAKGVDQVIVVAVNDAFVMHGWAKANGITDDKILFMSDHNAKFSTSIGWNLGERTGRFAVVIDHGKITYASSXXEPGSIEKSGALGVLPHL

SEQ ID NO: 21507 - protein, 162 aa, Triticum aestivum
MAPIGVGSTLPDGQLAWFDENDQMQQVSIHSLAAGKKVILFGVPGAFTPTCSNQHVPGFITQAEELKAKGVDEILLVSVNDPFVMKAWAKTYPDNKHVKFLADGAAAYTKALGLELDLTEKGLGLRSRRFALLADDLKVTVANVEEGGQFTISGAEEILKAL

SEQ ID NO: 21508 - protein, 162 aa, Triticum aestivum; identical to SEQ ID NO: 21486

SEQ ID NO: 21509 - protein, 123 aa, Triticum aestivum
  unsure (1)..(123): unsure at all Xaa locations
MAPIAVGNVIPDGILAYLDEENKPQTVSIHSLATGKKVIIFGVPGAFTPTCSLKHVPGFIERAEELKGKGVDEIIXISVNDPFVMNSWAKTFPENKHVKFLADGAAKYTNALGLELDLTDKGL

SEQ ID NO: 21510 - protein, 241 aa, Triticum aestivum
MADSPPVHPVTGKKTYSAAPSRAPSQLSSAARQRNPIQDNNTHSQPSVAMAALARRAGGSPAAALWAAARGFASVGSDIVSAAPGVSLQKARSWDEGVATKFSTTPLKDIFHGKKVVIFGLPGAYTGVCSQSHVPSYKNNIDKLKAKGIDSVICVAVNDPYVLNGWAEKLQAKDAIEFYGDLDGSFHKSLDLEIDLSAALLGRRSHRWSAFVDDGKIKAFNVEKAPSDFKVSGAEVILDQI

SEQ ID NO: 21511 - protein, 232 aa, Triticum aestivum
  unsure (1)..(232): unsure at all Xaa locations
PPSMATSALATLSATAAAAGARRVLLSRGPASSLSFASRRLAPAASAPGPCPARRRGSXSATASPAATTTIAVGDRLPDATLSYFDAPDGELKMVTVRDLTAGKKVVLFAVPGAFTPTCTQKHLPGFVARAGELRAKGVDTVACVSVNDAFVMRAWKESLGVGDEVLLLSDGNGELTRAMGVELDLSDKPVGLGVRSRRYALLADDGVVKVLNLEEGGAFTNSSAEDMLKAL

SEQ ID NO: 21512 - protein, 251 aa, Triticum aestivum
  unsure (1)..(251): unsure at all Xaa locations
TPPPRSSQGRTDSISSNTSPRPSSMATASLSALSSAAAAAGKRFVISSPSLSFASRRIAAPARLRAAAVPGARRFAASAASASTVVATIAVGDKLPDATLSYFDPADGELKTVTVGELTAGKKVVLFAVPGAFTPTCSQKHLPGFIEKAGELRAKGVDTVACVSVNDAFVMKAWKESLGLGXXDVQLLSDGNLELTRALGVEMDLSDKPMGLGVRSRRYALLADDGVVKVLNLEEGGAFTTSSAEEMLKAL

SEQ ID NO: 21513 - protein, 218 aa, Triticum aestivum
  unsure (1)..(218): unsure at all Xaa locations
LPNIAQQLSTCTHSNRTIYLTNRLNTHLAMSLRAPLRRVAFARPTSSIAVAARSFHSTPRASVRVGQEIPNTDVLLEDSPGNKVNLAEEFKTSNGYIVGVPAAFSGTCSSKHIPSYINHPKLKQAGQVFVVSVNDPFVMKAWSDQLDPAKRIRFLGDPTGEFTKALDLGFEAYAVFGGMRGKRYALKVEDGKVSKAYVEPDNTGSAVSMADQVLDXVL

SEQ ID NO: 21514 - protein, 167 aa, Zea mays; identical to SEQ ID NO: 21506
  unsure (1)..(167): unsure at all Xaa locations

SEQ ID NO: 21515 - protein, 162 aa, Zea mays; identical to SEQ ID NO: 21486

SEQ ID NO: 21516 - protein, 162 aa, Zea mays
MAPIAVGDALPDGQLGWFDENDQLQQVSVHALAAGKKVILFGVPGAFTPTCSNQHVPGFITQAEQLKAKGVDEILLISVNDPFVMKAWAKTYPENKHVKFLADGSGAYTKALDLELDLTDKGLGVRSKRFALLADDLTVTVANIEEGGQFTISGAEEILKAL

SEQ ID NO: 21517 - protein, 162 aa, Zea mays; identical to SEQ ID NO: 21516

SEQ ID NO: 21518 - protein, 163 aa, Zea mays
  unsure (1)..(163): unsure at all Xaa locations
MAPIAVGDALPDGQLGWFDENDQLQQVSVHALAAGKKVILFGVPGAFTPTCSNQHVPGFITQAEQLKAKGVDEILLISVNDPFVMKAWAKTYPENKHVKFLADGSGAYTKALDLELDLTDKGXLGVRSKRFALLADDLTVTVANIEEGGQFTISGAEEILKAL

SEQ ID NO: 21519 - protein, 193 aa, Zea mays
MAATLARRAGRSAATTLWGAARGFASVGSDIVSAAPGVSLQKARSWDEGVATKFSTTPLKDIFYGKKVVIFGLPGAYTGVCSQAHVPSYKKNIDKLKAKGIDSVICVAVNDPYVLDGWAKKLDAKDTIEFYGDFDGSFHKSLDLEIDLSAALLGRRSHRWSAFVDDGKIKSFNVEEAPSDFKVSGAEVILDQI

SEQ ID NO: 21520 - protein, 248 aa, Zea mays
IQKPPAPGQFLDRIATHPISMATSALAALSATAAAAGKRILLSRPASSSSLSFASRRLAAGVLGAPIRAVASSASAAPAAAAKTIAVGDRLPDATLSYFDTSSPDGELKTVTVRDLTAGKKVVLFAVPGAFTPTCTQKHLPGFVAKAGELRAKGVDTVACVSVNDAFVMRAWKESLGIGDEVLLLSDGNGELARAMGVELDLSDKPVGLGVRSRRYALLAEDGVVKVINLEEGGAFTNSSAEDMLNAL

SEQ ID NO: 21521 - protein, 161 aa, Zea mays
  unsure (1)..(161): unsure at all Xaa locations
XKXIQKPPAPGQFLDRIATHPISMAIRDLTAGKKVVLFAVPGAFTPTCTQKHLPGFVAKAGELRAKGVDTVACVSVNDAFVMRAWKESLGIGDEVLLLSDGNGELARAMGVELDLSDKPVGLGVRSRRYALLAEDGVVKVINLEEGGAFTNSSAEDMLNAL

SEQ ID NO: 21522 - protein, 291 aa, Zea mays
  unsure (1)..(291): unsure at all Xaa locations
IQKPPAPGQFLDRIATHPISMATSALAALSATAAAAGKRILLSRPASSSSLSFASRRLAAGVLGAPIRAVASSASAAPAAAAKTIAVGDRLPDATLSYFDTSSPDGELKTVTVRDLTAGKKVVLFAVPGAFTPTCTQKHLPGFVAKXAGELRAKGVDTVACVSVNDAFVMRAWKESLGIGDEVLLLSDGNGELARAMGVELDLSDKPVGLGVRSRRYALLAEDGVVKVINLEEGGAFTNSSAEDMLNAQLNSRRHGWFVSSGKSWFLFPENNRDGNGGLCYCRHCCDRRCY

SEQ ID NO: 21523 - protein, 193 aa, Zea mays
  unsure (1)..(193): unsure at all Xaa locations
XRPSRHPPHLHXXTSALAALSAPAAAAKTIAVGDRLPDATLSYFDTSSPDGELKTVTVRDLTAGKKVVLFAVPGAFTPTCTQKHLPGFVAKAGELRAKGVDTVACVSVNDAFVLFAWKESLGIGDEVLLLSDGNGELARAMGVELDLSDKPVGLGVRSRRYALLAEDGVVKVINLGEGGAFTNSSAEDMLNAL

SEQ ID NO: 21524 - protein, 128 aa, Zea mays
  unsure (1)..(128): unsure at all Xaa locations
MAPIAVGDVVPDGTISFFDENDQLQTASVHSLAAGKKVILFGVXXGAFXSTCSMKHVPGFIEKAEELKSKGVDEIICFSVNDPFVMKAWGKTYPENKHVKFVADGSGEYTHLLGLELDLKDKGLGVRX

SEQ ID NO: 21525 - protein, 196 aa, Zea mays
  unsure (1)..(196): unsure at all Xaa locations
MAATLARRAGRSAATTLWGAARGFASVGSDIVSAAPGVSLQKARSWDEGVATKFSTTPLKDIFYGKKVVIFGLPGAYTGVCSQAHVPSYKKNIDKLKAKGIDSVICVAVNDPYVLDGWAKKLDAKDTIEFYGDFDGSFHKSLDLEIDLSAALLGRRSHRLXWTQLAXDYQTAAFILQLXRIVLCSLILSYLSHCLI

SEQ ID NO: 21526 - protein, 162 aa, Populus tremula x Populus tremuloides
MAPIAVGDVLPDGKLAYFDEQDQLQEVSVHSLVAGKKVILFGVPGAFTPTCSLKHVPGFIEKAGELKSKGVTEILCISVNDPFVMKAWAKSYPENKHVKFLADGSATYTHALGLELDLQEKGLGTRSRRFALLVDDLKVKAANIEGGGEFTVSSAEDILKDL

SEQ ID NO: 21527 - protein, 159 aa, Novosphingobium aromaticivorans
MTIAVGDKLPDVKIVKATAEGPEAVQSAEYFKGKKVALFSVPGAFTPTCSAKHLPGYVEKAADLKAKGIDEVACTAVNDPFVMKAWGAANGSSDVTMLADGNGDLAEALGLTMDGSGFGLGKRGQRFSMVVNDGVVEQLFVEAPGDFKVSSAEHMLENL

SEQ ID NO: 21528 - protein, 156 aa, Schizosaccharomyces pombe
MVAVGSTLPKVTLWENKPEEVVEFPSQGKFIIVGVPGAFTPPCSSQVPGYIANEKQFAAKGISGIYVVAVNDVFVTKAWKKSFDGGEQSGVHFVADWNGEFTKAFDAGFDASGLLGPLRSKRYAAVVENGKVVKVFIENEVTDVDISSADKVLSSL

SEQ ID NO: 21529 - protein, 156 aa, Schizosaccharomyces pombe
MVAVGSTLPKVTLWENKPEKVVEFPSQGKFIIVGVPGAFTPPCSSQVPGYIANEKQFAAKGISGIYVVAVNDVFVTKAWKKSFDGGEQSGVHFVADWNGEFTKAFDAGFDASGLLGPLRSKRYAAVVENGKVVKVFIENEVTDVDISSADKVLSSL

SEQ ID NO: 21530 - protein, 167 aa, Penicillium citrinum
MSLKAGDSFPEGVTFSYIPWAEDASEITSCGIPINYNASKEFANKKVVLFALPGAFTPVCSANHVPEYIQKLPELRAKGVDQVAVLAYNDAYVMSAWGKANGVTGDDILFLSDPEAKFSKSIGWADEEGRTYRYVLVIDNGKIIYAAKEAAKNSLELSRADHVLKQL

SEQ ID NO: 21531 - protein, 168 aa, Aspergillus fumigatus
MSGLKAGDSFPSDVVFSYIPWSEDKGEITACGIPINYNASKEWADKKVILFALPGAFTPVCSARHVPEYIEKLPEIRAKGVDVVAVLAYNDAYVMSAWGKANQVTGDDILFLSDPDARFSKSIGWADEEGRTKRYALVIDHGKITYAALEPAKNHLEFSSAETVLKHL

SEQ ID NO: 21532 - protein, 162 aa, Brassica rapa subsp. pekinensis
MAPIAVGDVVPDGSISFFDENDQLQTVSVHSLAAGKKVILFGVPGAFTPTCSMKHVPGFIEKAEELKSKGVDEIICFSVNDPFVMKAWGKTYPENKHVKFVADGSGEYTKLLGLELDLKDKGLGVRSRRFALLIDNLKVTVANVESGGEFTVSSADDILKAL

SEQ ID NO: 21533 - protein, 138 aa, Neurospora crassa
MSALKAGDSFPEAFANKKVVLVAVPGAFTPTCQQQHVPSYLAKLEEFKSKGVDQIIFIASNDAWVMAAWGKANGVKDESILFMSDADCKFSKSIGWTQGDRTKRYAIVIDHGKVTYAELDEVPKSIANTGADGVLAKL

SEQ ID NO: 21534 - protein, 196 aa, Neurospora crassa
MFARTALRATASASPIARVSASAAPVAAASRFFSSSPARLVKIGELLPEGELLQEGSPGNKVDLRKEAESARNMLIIGVPAAFSPACSASHIPSYIQHPKTQEFDVKAVVSVNDAFVMKAWKENLDPAGESGIRFLADPSGSFTKALDLTFDSKAIFGNDRSKRYAMIVEDGKVTKIAVEPDNTGTAVSLADKVLG

SEQ ID NO: 21535 - protein, 167 aa, Candida boidinii
MAPIKRGDRFPTTDDVYYIPPEGGEPGPLELSKFVKTKKFVVVSVPGAFTPPCTEQHLPGYIKNLPRILSKGVDFVLVISQNDPFVLKGWKKELGAADAKKLVFVSDPNLKLTKKLGSTIDLSAIGLGTRSGRLALIVNRSGIVEYAAIENGGEVDVSTAQKIIAKL

SEQ ID NO: 21536 - protein, 167 aa, Candida boidinii
MAPIKRGDRFPTTDDVYYIPPEGGEPGAFELSKFVKTKKFVVVSVPGAFTPPCTEQHLPGYIKNLPRILSKGVDFVLVITQNDPFVLKGWKKELGAADARKLIFVSDPNLKLTKKLGSTIDLSSIGLGTRSGRLALIVNRSGIVEYAAIENGGEVDVSTAQKIIAKL

SEQ ID NO: 21537 - protein, 167 aa, Candida boidinii
MAPIKRGDRFPTTDDVYYIPPEGGEPGAFELSKFVKTKKFVVVSVPGAFTPPCTEQHLPGYIKNLPRILSKGVDFVLVITQNDPFVLKGWKKELGAADAKKLIFVSDPNLKLTKKLGSTIDLSSIGLGTRSGRLALIVNRSGIVEYAAIENGGEVDVSTAQKIIAKL

SEQ ID NO: 21538 - protein, 166 aa, Malassezia furfur
EIGSTIPNATFAYVPYSPELEDHKVCGMPTSFQSHERWKGKKVVIVAVPGAFTPTCTANHVPPYVEKIQELKSKGVDEVVVISANDPFVLSAWGITEHAKDNLTFAQDVNCEFSKHFNATLDLSSKGMGLRTARYALIANDLKVEYFGYDEGEPKQSSAATVLSKL

SEQ ID NO: 21539 - protein, 166 aa, Malassezia furfur
EIGSTIPNATFAYVPYSPELEDHKVCGMPTSFQSHERWKGKKVVIVAVPGAFTPTCTANHVPPYVEKIQELKSKGVDEVVVISANDPFVLSAWGITEHAKDNLTFAQDVNCEFSKHFNATLDLSSKGMGLRTARYALIANDLKVEYFGIDEGEPKQSSAATVLSKL

SEQ ID NO: 21540 - protein, 177 aa, Malassezia furfur
MPGDPTATAKGNEIPDTLMGYIPWTPELDSGEVCGIPTTFKTRDEWKGKKVVIVSIPGAYTPICHQQHIPPLVKRVDELKAKGVDAVYVIASNDPFVMAAWGNFNNAKDKVVFATDIDLAFSKALGATIDLSAKHFGERTARYALIIDDNKIVDFASDEGDTGKLQNASIDTILTKV

SEQ ID NO: 21541 - protein, 175 aa, Plasmodium falciparum
MDRYINIDVRNMNNISDTDGSPNDFTSIDTHELFNNKKILLISLPGAFTPTCSTKMIPGYEEEYDYFIKENNFDDIYCITNNDIYVLKSWFKSMDIKKIKYISDGNSSFTESMNMLVDKSNFFMGMRPWRFVAIVENNILVKMFQEKDKQHNIQTDPYDISTVNNVKEFLKNNQL

SEQ ID NO: 21542 - protein, 244 aa, Nostoc punctiforme
MVANRRGQRVPNVTFHTRKDNQWVDVTTDQLFANKTVVVFSLPGAYTPTCSSTHLPGYNELAGIFKENGVDDIICISVNDAFVMNEWSKDQEAENITLIPDGNGEFTEGMGMLVDKSDLGFGKRSWRYSMLVRDGVINQMFIEPDEPGDPFKVSDAETMLRYINPQAVKPEVVSLFAKVGCPFCARAKAMLKEHGINYEEITLGKDITTRSLRAVTGATTVPQVFIDGKLIGGSEALEAYFAAK

SEQ ID NO: 21543 - protein, 157 aa, Vibrio cholerae
MIQIGQTLPDVQLSQRTSEGTLTHSVTTLFANKKVVLFAVPGAFTPTCSEAHLPGYVVLADKFKEKGVDMIACVSVNDAFVMKAWGEAQNASEIAMLADGDASFTKALGLEMDTGNFGGVRSQRYAMVIENNVVTLLNVEPPKTFELSKAETVLASL

SEQ ID NO: 21544 - protein, 247 aa, Vibrio cholerae
MRNTMFTSKEGQTIPQVTFPTRQGDAWVNVTSDELFKGKTVIVFSLPGAFTPTCSSTHLPRYNELFPVFKEHGVDSILCVSVNDTFVMNAWKDDQNADNITFIPDGNGEFTDGMGMLVDKNDLGFGKRSWRYSMLVKDGVVEKMFIEPNEPGDPFKVSDADTMLKYIAPQYKVQESVTIFTKPGCPYCAKAKQALIDAGLQYEELILGKDATTVSLRAVSGRTTVPQVFIGGKHIGGSDDLEVYLNQ

SEQ ID NO: 21545 - protein, 185 aa, Pyrocoelia rufa
MRLLGVIKTLGRIVSIVPQRLILRSYLITAAMPIKEGESLPNIDLFEETPANKVNLNELSAGKKIIVFAVPGAFTPGCSKTHLPGYVKKAEELKLQGISEIACVAVNDPFVMSAWGKEHNVNGKIRMLADTQATFTKSIDLGQDLAPLGGYRSKRYSMVVENGKVQSLQVDPMVPDIMLVVELSV

SEQ ID NO: 21546 - protein, 241 aa, Haemophilus influenzae Rd
MSSMEGKKVPQVTFRTRQGDKWVDVTTSELFDNKTVIVFSLPGAFTPTCSSSHLPRYNELAPVFKKYGVDDILVVSVNDTFVMNAWKEDEKSENISFIPDGNGEFTEGMGMLVGKEDLGFGKRSWRYSMLVKNGVVEKMFIEPNEPGDPFKVSDADTMLKYLAPQHQVQESISIFTKPGCPFCAKAKQLLHDKGLSFEEIILGHDATIVSVRAVSGRTTVPQVFIGGKHIGGSDDLEKYFA

SEQ ID NO: 21547 - protein, 190 aa, Drosophila melanogaster
MRVLSCKFLGRVVNSALPQQIISLRSLSKTSAAMVKVGDSLPSVDLFEDSPANKINTGDLVNGKKVIIFGVPGAFTPGCSKTHLPGYVSSADELKSKQGVDEIVCVSVNDPFVMSAWGKEHGAAGKVRLLADPAGGFTKALDVTIDLPPLGGVRSKRYSLVVENGKVTELNVEPDGTGLSCSLANNIGKK

SEQ ID NO: 21548 - protein, 241 aa, Haemophilus influenzae
  unsure (1)..(241): unsure at all Xaa locations
XSSXEGKKVPQVTFRTRQGDKWVDVTTSELFDNKTVIVFSLPGAFTPTCSSSHLPRYNELAPVFKKYGVDDILVVSVNDTFVXNAWKEDEKSENISFIPDGNGEFTEGXGXLVGKEDLGFGKRSWRYSXLVKNGVVEKXFIEPNEPGDPFKVSDADTXLKYLAPQHQVQESISIFTKPGCPFCAKAKQLLHDKGLSFEEIILGHDATIVSVRAVSGRTTVPQVFIGGKHIGGSDDLEKYFA

SEQ ID NO: 21549 - protein, 245 aa, Plasmodium yoelii yoelii
MKRIIFLIFPILLNVYLCFKNLAHNKPLNFVSKRWNFNNRFSHKLGESKNIDLANDIKENDLIPNVKVMVDVGNIGIVNNFGEEEKKSSGEESPFRSIDTHELFKSKRILLISLPGAFTPLCTSKMIPEYEKEYDNFIRENKFDDIYCITNNDIYVLKSWFKSMDIKKIKYISDGNSSFTESMNMLVDKSNYFMGMRPWRYVAIVENNILIKIFQENEKQHNIQTDPYDISSVDHVKEFLKHNKI

SEQ ID NO: 21550 - protein, 172 aa, Malassezia sympodialis
MSATTGSQAPNTTFTYIPWAPELDSGKVCGVPQTFKAHDRWKGKKVVVVAIPGAFTPACHQNHIPGFVEKINELKAKGVDEVVVIAVNDAFVMSGWGVTVGGKDQIVYACDNDLAFSKALGGTLDLTSGGMGVRTARYAVVLDDLKITYFGMDEGNMGAPEKSSVDAVLAQL

SEQ ID NO: 21551 - protein, 219 aa, Bos taurus
MRLGWLRVLGCRPGSVVSRATIVEGASTTAAGTRGCLEGILEWTFGGVRGFRSAAVAMAPIKVGDAIPSVEVFEKGPGNKVNLAELFKGKKGVLFGLPGAFTPGCSKTHLPGFVEQADALKAKGIQVVACLTVNDVFVTEEWARTHKAEGKVRLLADPSGTFGKETDLLLDDSLLFLFGNHRLKRFSMVIEDGIVKSLNVEPDGTGLTCSLAPNILSQL

SEQ ID NO: 21552 - protein, 151 aa, Clostridium acetobutylicum
MEIREGMKAPDFSLKGSDGKEHKLSDYIGKKVILYFYPKDNTQGCTKEACEFRDSSNKISDLNAVVLGVSKDSIKSHNNFIDKFKLPFVLLSDEEEVVCKLYDVIKEKSMYGRKYMGVERSTFIIDENGIVKSIFRKVRVNGHVENIIKSL

SEQ ID NO: 21553 - protein, 156 aa, Tropheryma whipplei str. Twist
MGGIVSNQVLPKGSFAPDFELVDQNGATVVLSEVAAKKDVVLFFFPLAFSGICTDELIQVRDSLDSFKSFEVFALSVDSKFTLRAYSESQGFSFALLSDFWPHGGVAKQFGAFLEDVGVASRSTFIVGKDLKIKASFFSGIHEPRDFSEIRAALAS

SEQ ID NO: 21554 - protein, 156 aa, Rickettsia montanensis
MTLELGKKVPDLSLHIGKDNVIKLSDLKGKFVILYFYPKDDTPGCTIEAQDFNKLKPEFDKLNTVIIGVSKDKLDSHDKFKEKYSLGFDLASDANSNLCEQLGVWIEKSMFGKKYMGIDRATFLLDKEGIVKHIWRSVNAKNHAQEVLEKLRTMLS

SEQ ID NO: 21555 - protein, 177 aa, Prochlorococcus marinus subsp. pastoris str. CCMP1378
MKSLFGLFVILISLIFNLKSAIAFDYAPEIGDSAPSFHLEGINKSIKSKKIWDSNELIGKWIVLYFYPKDFTAGCTLEAKGFSQLKNDFSKYNAEIIGISADNQDSHDSFCSEKSINYTLLSDPNGTISAKYGSWIPPYSDRNTFLISPEGKITYRWISVLPINHAKEVLNILKKNI

SEQ ID NO: 21556 - protein, 212 aa, Halobacterium sp. NRC-1
MQRGWGSERLAPRLSPGRAGSVISNDTDTPSMRCEGARAPAFELPGVSDGTQTRLGLTDALADNRAVVLFFYPFDFSPVCATELCAIQNARWFDCTPGLAVWGISPDSTYAHEAFADEYALTFPLLSDHAGAIADAFGVLQASAEDHDRVPERAVFLIDADRVIRYAWASSDLSESPDLGAVKAAIDDLQPDTAGVAPRTISDAHDDGTTDG

SEQ ID NO: 21557 - protein, 156 aa, Rickettsia rickettsii
MTLELGKKLPDLSLHIGQDNVIKLSDLKGKFVILYFYPKDDTPGCTIEAQDFNKLKPEFDKLNTVIIGVSKDKLDSHDKFKEKYSLGFDLASDANSNLCEQLGVWIEKSMFGKKYMGIDRATFLLDKEGIVKHIWRSVNAKNHAQEVLEKLRTMLS

SEQ ID NO: 21558 - protein, 195 aa, Ferroplasma acidarmanus
MLQIGEAAPEFDTETYFPEKKEIKKIKLSDYRGKWVILTFYPGDFTFVCATDIEALMGSYDKFLKEGAQVFGISEDSVFSHKAWCDTSPRVSKSKIPLIDDYTKEIAKNYGFLDSKGYQAQRGLVIIDPEGKIQYEAMFNDGLGKDVRHIYGAFMGLKVLHDTPEGEGHMCAIPADWTPGESPLDINVVRDIGKL

SEQ ID NO: 21559 - protein, 155 aa, Streptomyces coelicolor A3(2)
MSERLQPGDPAPAFTLPDADGNEVSLSDHQGRKVIVYFYPAALTPGCTKQACDFTDNLELLTGAGYDVIGISPDKPEKLAKFREAESLKVTLLADPDKKVLDAYGAFGEKKNYGKTYMGVIRSTIVVDEQGKVERALYNVRATGHVAKIIKDLGI

SEQ ID NO: 21560 - protein, 155 aa, Streptomyces coelicolor A3(2)
MSALPAVGDTVEDFTLPDETGTPRRLSELLADGPVVLFFYPAALTTGCTAEACHFRDLAAEFAAVGARPVGVSGDPVERQQEFAGRHTLGMPLLSDTDGAVRERFGVKRGFSLAPTKRVTFVVGQDRTLLEVVRSEIRMNTHADRALAALRAHRP

SEQ ID NO: 21561 - protein, 153 aa, Nostoc sp. PCC 7120
MPVKVGDSAPDFTLPAQNGSSVSLSDFRGKKAVVLYFYPKDDTPGCTAESCAFRDRYEVFQTAGAEIIGVSGDSNESHQKFASKYNLPFTLLSDKGDQVRKLYGATAAFGLFPGRVTYVIDQQGVVQYVFDSMFNFQGHVEEALKTLQQLASK

SEQ ID NO: 21562 - protein, 145 aa, Nostoc sp. PCC 7120
MPLAVGTDAPAFTVKDTNGNTVSLSDFAGKTVVLYFYPKDDTPGCTKQACSFRDAQSDYKNKDVVVLGVSADDEGSHQAFTQKYNLNFPLLADTNKTLISAYDVDGGGYAKRVTYVIGPDGKIVHVDASVNTTTHAGDVLAALGL

SEQ ID NO: 21563 - protein, 159 aa, Nostoc sp. PCC 7120
MSNIPQAGQPAPDFSTPDQNGNLVSLNDFQGQWVVIYFYPKDDTPGCTTEAKDFTGLHQEFNQLGAKILGVSPDSGKAHCKFIDKHNLSINLLSDPEHQLIEAYGAWRLKKFMGKEYMGVARSTFLISTDGIIAYAWPNVKTKGHAQAVLNKLQELINS

SEQ ID NO: 21564 - protein, 153 aa, Rhodobacter sphaeroides
MTDAGQTAPDFTLPRDGGSTVSLSGLRPGKVVVYFYPKDDTSGCTLEAQEFTALAPQFAEIGTTVIGISKDSVKSHDKFCAKHGLGIVLASDEGATTAEDYGVWKEKNMYGKTYMGIERSTFLIDGEGRIARVWRKVTARGHAAEVLEAARSL

SEQ ID NO: 21565 - protein, 241 aa, Rhodopseudomonas palustris
MFDPSKATKGRRMPKPTPKKPSKKTAKPAVEKTSKVTTKAAAKTTAAKTTAVKKAAAKSPAAKTPAAKTAATKAAAKTSATKSSATKPAGLAEGSVAPDFKLPRDGGGEISRADFAGRKLVLFFYPKANTPGCTREAIDFTRLAADFKACGTAVLGVSADSVKAQDSFRDKHQLATPLLSDPTHAMLEAYGAWGEKSLYGRKLQGIIRTTVLIDADGCVARVWRNVKVDGHAHQVLAAAQS

SEQ ID NO: 21566 - protein, 192 aa, Rhodopseudomonas palustris
MTKQPDLLKVDWSAIPAPDDDGAAAHLPGARIQPVALPATDGSSVTLSSLPGRTVLFIYPRTGVPGQISLVDDWDMIPGARGCTPQTCSFRDLFTDLKTAGADAVFGLSTQSSAYQSEMATRLHLPFPVLSDESLELTRALNMPTMQVAGMTLLKRMALIIDDGRISHVFYPVFPPDRNAGDVLEWLKANPR

SEQ ID NO: 21567 - protein, 1031 aa, Rhodospirillum rubrum
  unsure (1)..(1031): unsure at all Xaa locations
MDRGSDGGNDGQRRLAAQRDLAAFKAGDMKAGRQDFDPAQRHLAIKQSARRQGYRHHRQPGDQPVVGVAHHHADHPQIQRTLPATPGEFGAVDHHLEITLGVGKGVFDIRGQQGQRQRPLLQPPTEKGQKGERQQSQRAQNAEQHPHPTMNHGLFLRDNAYRHPLTAATPLPSVLGNNGAKMQEFLFPSATARFPLPADQGRLDRGLERWRALARDDSEGIAPSFVKNFLDDPRGNALLAAVFGNSPYLSAALIREPAFVETLALRGPDQVFPDLLEGMARAIAATSEATVVMQVLRVTKRRAALCIALADIARWWSLEQVTAALSALAERSLRAVVAHLLTRRAASGDLVLPHPEDPERDSGFFILGMGKLGGGELNYSSDIDLIVLFDAEKARYQGKRSLKECYVGLTRDLVRMMEERTAEGYVFRTDLRLRPDPGSTAVAISTEAAEIYYETMGQNWERAAMIKARPVAGDLVAGQAFLTHLRPFVWRKYLDFNAIQDIHSIKRQIDAVRGGAEIGVAGHNIKLGRGGIREIEFFAQTQQLIWGGRTPKLRSKSTCEALADLVEVGLVEAPAADELTEAYRYLRTLEHRLQMIDDEQTQTLPLEPDKLRHLALFMGEADAEALGVAVTTRLRRVESHYAGLFEDAPSLSQGGNLVFTGGEDDPETLATLRRMGFSNPEGISATIRGWHHGRYAATRSTRTRERLTELMPDLLXXXXXXXXXXXXXXXXXXXXWDVKLAPGGLVDIDFLAQFLQLRHAPRTPEVLAADTVGALRRLSEAGYLDPAICRFLCAHHRRNLGIQATLRHSIAGPPRDSDLTPGLKAKLARATGWDDFETLRAHMADDGARVRQIFTEIVDPTRPPPPPPLEKGPPMTEIPVAPGTAAPDFSLPTDGGGTLSLADLRGKKLVLYFYPKDATSGCTTEALGFKEQAEAFAEAGAVIVGVSKDSVKSHDGFKAKQGLPFTLASDAEGAVCQSYGVWVEKSMYGRTYMGIDRSTFLIDGEGIIRKIWRKVKVAGHVAAVLEEARAL

SEQ ID NO: 21568 - protein, 154 aa, Sulfolobus tokodaii
MKVGDKAPLFEGITDTGEKFSLADYIGKYNIVLYFYPKDDTPGCTREACAFRDNWNLLQGYDVVVIGISSDDVESHKKFKQKYNLPFILVSDPDKKIRELYGAKGFILPARITFVIDKKGIIRHIYNSQLNPENHVKEALKTLEMLKKEEESVS

SEQ ID NO: 21569 - protein, 155 aa, Sulfolobus tokodaii
MVEIGELAPDFELPDTELKKVKLSALKGKVVVLAFYPAAFTQVCTKEMCTFRDSMAKFNQVNAVVLGISVDPPFSNKAFKEHNKLNFTILSDYNREVVKKYNVAWEFPALPGYVLAKRAVFVIDKEGKVRYKWVSDDPTKEPPYDEIEKVVKSLS

SEQ ID NO: 21570 - protein, 184 aa, Synechocystis sp. PCC 6803
MTSKKFSWPKTIIALLLTLGLWLGLADLPTYALGGIQPELDQPAPLFTLPSTTGEGEVNLTDYRGQWVVLYFYPQDFTPGCTLEAQRFQRDLTKYQALNAQVIGVSVDDLDSHEAFCDAEGLKFPLLADSDGAVIKTYGSWLSGMALRHTYVIDPEGILRERFLGVRPATHSEEVLARLAELQA

SEQ ID NO: 21571 - protein, 160 aa, Synechocystis sp. PCC 6803
MATALETNQPAPTFSAPNAEGKTISSDDFLGQWLVLYFYPKDNTPGCTTEAIDFSEKLPEFTDLNAVVVGVSPDSEKSHGKFIDKHNLTVQLLSDPEHELAAAYGAWGPKKFMGKECEGILRSTFLINPQGNIAHIWPNVRVKGHAEKVLEKLQQLNSAD

SEQ ID NO: 21572 - protein, 157 aa, Thermoanaerobacter tengcongensis
MVEVGKKAPDFVLPDADGRQVSLSDFLGKNVVLYFYPKDNTPGCTKEAVAFRDSIKTIEDKNAVVIGISLDDEASHRKFIEKYSLPFVLLSDKEAKVSTEYGVYKEKNMYGKKKMGIERSTFIIDSKGIVRKIFRKVKVDGHVDQVLKALDEIKEGV

SEQ ID NO: 21573 - protein, 245 aa, Ralstonia metallidurans
MPHLQYPHGRGPQGCGGAAGGAGCLTCRSSASGNLMCQRVPPGPGFPPGSVYATLEVRRTAPICTRHGRKARGRHRAAAVTDDARHPRRATSMTVSLNKAIPDFQAPATGGDFRLADQRGKTTVLYFYPKDNTPGCTTEAMNFRDQYDDFEKAGAAVYGISRDSMKSHENFKAKLELPFELISDADEAICQLFDVIKMKKMYGKDVRGIERSTFILDAKGVLRHEMRGIKVPNHVDEVLEIVKGM

SEQ ID NO: 21574 - protein, 146 aa, Neisseria meningitidis MC58
MDVKYEFTLPSSSGADFHSAEHLPLVVYFYPKDSTLGCTTEGLDFNARLEQFEALGYTVVGISRDGVKAHQNFCAKQGFRFELLSDKDETVCRLFDVIKLKKLYGKESLGIERSTFVLNKDGEIAHEWRKVKVAGHAQEVLETLSR

SEQ ID NO: 21575 - protein, 167 aa, Neisseria meningitidis Z2491
MAIAAVRLRAVLNNGNIGSRTMDVKYEFTLPSSSGADFHSAEHLPLVVYFYPKDSTPGCTTEGLDFNARLEQFEALGYTVVGISRDGVKAHQNFCAKQGFRFELLSDKDETVCRLFDVIKLKKLYGKESLGIERSTFVLNKDGEIAHEWRKVKVAGHAQEVLETLSR

SEQ ID NO: 21576 - protein, 175 aa, Deinococcus radiodurans
MTDSDSQSPDTQPEVARLQPGDTFPDFSLPDAAGDLHSLGQYDGKYVVLYVYPKDDTPGCTREACDFRDHQLLRQHGAVILGVSRDDAASHQQFADKYSLPFPLLSDPDAEFLRAIGSYGPKTMYGKTSEGVKRQTFLIGPDGKLVKSWLAVQVDGHADAVAAAIDKDLQKKGQA

SEQ ID NO: 21577 - protein, 153 aa, Burkholderia fungorum
MPIAVDQPIPDFTAPATGGEITLSKLRGKKVVLYFYPKDNTPGCTTEGLQFRDLYPKFRKAGAEIIGVSRDSLRSHDNFKAKLELPFPLISDPEETLCALFNVIKMKKMYGKEVRGIERSTFLIDAGGVLRQEWRGVKVPGHVDDILEAVQEL

SEQ ID NO: 21578 - protein, 255 aa, Burkholderia fungorum
MSWRRGAAQVGRTVSAVSAAAACASFGRVLTYLVSTWSNSEVGPRSRERSGPGFVGRTACMNAWRNRQMKKKFISAVLAGAVSVGFAMHSLTASATLKPGDAAPAFTAQASLGGKTYTYSLADELKKGPVVLYFYPAAFTKGCTIEAHEFAEAVDEYKKYGATVIGVSHDNIDTLTKFSVSECRSKFPVAADADSKVIGEYDAGMPMHASMANRVSYVIAPDGKIIYEYTSLSPEKHVENTLKAVKEWAATHKQP

SEQ ID NO: 21579 - protein, 80 aa, Bacillus subtilis
MTIEIGQKAPDLELKGDHGETVKLSDYKGKYIVLYFYPKDMTPGCTTEACDFSGQSRKLRRTGCRHYRRQPGQPGKTRKI

SEQ ID NO: 21580 - protein, 156 aa, Escherichia coli O157:H7 EDL933
MNPLKAGDIAPKFSLPDQDGEQVNLTDFQGQRVLVYFYPKAMTPGCTVQACGLRDNMDELKKAGVDVLGISTDKPEKLSRFAEKELLNFTLLSDEDHQVCEQFGVWGEKSFMGKTYDGIHRISFLIDADGKIEHVFDDFKTSNHHDVVLNWLKEHA

SEQ ID NO: 21581 - protein, 159 aa, Xylella fastidiosa Ann-1
MNIGDTLNHSLLNHPLMLSGGTCKTLSDYTNQWLVLYFYPKDNTPGCTTEGLEFNLLLPQFKQINATVLGVSRDSVKSHDSFCAKQGFTFPLVSDSDAILCKAFDVIKEKTMYGRQIIGIERSTFLIGPTHRIVEAWRQVKVPGHAEEVLTKLKAHAEQ

SEQ ID NO: 21582 - protein, 153 aa, Magnetococcus sp. MC-1
MVLEIGASIPSLSLPDQSGEERSLKELLGEKGAVIYFYPKDNTPGCTTEAQDFEALKGEFAAKGYTIIGISKDSVKSHTNFISKYDLSFTLLADVEVKGCEAFGVWQEKKNYGKTYMGIVRSTFVVDGDGVVSHVYKKVQVKEHAQKVLAALG

SEQ ID NO: 21583 - protein, 151 aa, Staphylococcus aureus subsp. aureus Mu50
MLQKGEQFPIFKLENQDGTVITNDTLKGKKAIIYFYPRDNTPTCTTEACDFRDNLEMFNDLDVAVYGISGDSKKKHQNFIEKHGLNFDLLVDEDFKLAKETGVYQLKKSFGKESMGIVRTTFIIDEQGKVLDVIEKVKVKTQIEELKNILG

SEQ ID NO: 21584 - protein, 157 aa, Pseudomonas putida KT2440
MAVALDQPVADFQAQATSGQTVSLAELKGQQVVVYFYPKDSTPGCTTEGQGFRDQHDAFAAANTVIFGVSRDGIKSHENFKAKQGFPFELISDKDEALCQLFDVIKLKKLYGKEYMGVDRSTFLIDKDGVLRQEWRGVKVPGHVDAVLAAAQALNKA

SEQ ID NO: 21585 - protein, 162 aa, Propionibacterium freudenreichii subsp. shermanii
MSTLAPGDPAPEFALPDADGNIVRLSDHAARTVVVYFYPAALTPGCTVQAIDFTASLDEFTQSGVDVIGISPDTTDKLAKFRMRKNLRVTLLADPQHTAIDAYGVWGTKMIFGKPIDGIIRSTFVVDVDADGRGTVREALYDVRAAGHVDRLRKKLGIPAAV

SEQ ID NO: 21586 - protein, 152 aa, Staphylococcus epidermidis ATCC 12228
MISKGEQFPSFSLENQDGNFISNETIKGRKTILYFYPRDNTLTCTTEACEFRDHIEDFNQLDVDIYGISADSKKKHQNFIKKHQLNFDLLVDKDYQLANKVGVYQLKKSFGKENMGIVRTTFILDENGNIIDVIEKVKVKTQIETIKNILEG

SEQ ID NO: 21587 - protein, 161 aa, Mycobacterium leprae
MTETTRLAPGDQAPAFSLPDADGRIVSLGDYRGQRVTVYFYPAALTPGCTKQACDFRDNLHDLNDAGLDVVGISPDPLTKLAEFRDAEALTFPLLSDHDCKVLSAWGAYGKKQIYGKTVLGVIRSTFVVDEKGKIVLAQYNVKATGHVAKLRRDLSLLECC

SEQ ID NO: 21588 - protein, 155 aa, Agrobacterium tumefaciens str. C58 (Cereon)
MTDLTIGSPAPDFTLPRNGEGTVTLSKLQGKAVILYFYPKDDTSGCTVEAIDFSALGGEFEAANAVVIGISPDSVKSHDKFAAKHSLSVMLASDEERKVLEAYGVWKEKSMYGKKYMGVERTTVLIAPDGKIAEIWNKVKVAGHAQAVLEAAKKL

SEQ ID NO: 21589 - protein, 159 aa, Xylella fastidiosa Temecula1
MNIGDTLNHSLLNHPLMLSGGTCKTLSDYTNQWLVLYFYPKDNTPGCTTEGLEFNVLLPQFKQINATVLGVSRDSVKSHDSFCAKQGFTFPLVSDSDALLCKAFDVIKEKTMYGRQIIGIERSTFLIGPTHRIVEAWRQVKVPGHAEEVLTKLKAHAEQ

SEQ ID NO: 21590 - protein, 149 aa, Pyrococcus furiosus DSM 3638
MKIGDKAPDFVLKDQHGKEFKLSDFRGKKILLSFHPLAWTKICEKQMKALEENYEKFESLNVIPVGISVDPIPSKKAWAEHMGLKKLRILSDFWPHGEVAKLYGVFREKDGFSERANILIDEEMKIIFYKVYPIRELPDLNEIFDILKI

SEQ ID NO: 21591 - protein, 157 aa, Yersinia pestis KIM
MMSPLKAGDIAPKFSLPDQDGEQISLADFQGQRVLVYFYPKAMTPGCTVQACGLRDNMDELKSAGVEVLGISTDKPEKLSRFAEKELLNFTLLSDEHHEVAEQFGVWGEKSFMGKTYNGIHRISFLIDADGKVEHVFDNFKTNNHHDIVMDYLRQNA

SEQ ID NO: 21592 - protein, 227 aa, Magnetospirillum magnetotacticum
MVGGADRAAPDHRRGLRRGQRAQGPKGCPGPRRRFDRFQESGRPHGRLRLGRSSGLLAPRRSTRRRPQGTGDRIMTTALGTSAPDFIMECDDGKAALADYKGKVLVLYFYPKDDTSGCTSEAKAFRDAMPEYQAAGVEILGVSKDSVASHAKFRTKHSLPFRLGSDPEGTVCEAYGVWKKKSMYGREYMGIERSTFLIDQNGVLRAEWRKVKVTGHVDAVLKAAKEL

SEQ ID NO: 21593 - protein, 155 aa, Magnetospirillum magnetotacticum
MPLEPGDAAPLFSLPGAGGETISLETLRGHKIVLYFYPKDDTSGCTLEAQGFNAQAEAFAEAGARVIGVSPDSVKSHDKFRAKYGLTFPLASDETKSMLEAYGVWVEKSMYGRKYMGVERTTLLIDREGGIARIWRKVKVPGHVEEVLEAVRALA

SEQ ID NO: 21594 - protein, 159 aa, Leptospira interrogans serovar lai str. 56601
MSELKTGAKAPGFSALNEKGEKVKLSDLSGPKGTVLYFYPKDQTPGCTTEACDFRDNFSRIKKTGFNVVGVSKDSVKSHQKFIEKQELNFTLISDEDGKICEDYGVWQMKKFMGREFMGIVRTTFLIGADGKILKVYPKVSVKGHVDEILSDIKTLEKK

SEQ ID NO: 21595 - protein, 163 aa, Leptospira interrogans serovar lai str. 56601
MEEIEMSDPLLGTNLPEISLESTEGKRVKLPEDIQGSWTLLYFYPKDDTPGCTKQACNYRDNMGEFKKIGAKVYGISLDALDSHGQFIQKYSLNFPLLSDPDHKLSEALGVYGDQEWKGKVFKGLSRDSFLVSPDGKIQKVWRKVDPTTTVQDTLQEISKSIV

SEQ ID NO: 21596 - protein, 160 aa, Xanthomonas axonopodis pv. citri str. 306
MTDAVFELPAATFDLPLALSGGTQTTLRDYAGKWLVLYFYPKDSTPGCTTEGLDFNALLPQFKKAGAMVLGVSRDSVKSHDNFCAKQGFTFPLISDSDEALCRAFDVIKEKNMYGKQVLGIERSTFLLSPEGHVVLEWRKVKVAGHAEAVLAAVKAHAKQ

SEQ ID NO: 21597 - protein, 153 aa, Caulobacter crescentus CB15
MLQPGDKAPDFDLPTDTGRVSLSALKGKNVVLYFYPKDDTAGCTSEALQFSSEVEEFQKLGAVIIGVSKDSAASHAKFRAKHDLTIELAADTLGDVVESYGAWVEKSMYGRKYMGIDRSTFLIDREGVIREIWRKVKVPGHIKAVMNAAKAIK

SEQ ID NO: 21598 - protein, 173 aa, Bacillus anthracis str. A2012
MKKNRLLFRVIILLILSGAVGFTLYQGFFADKEKMQIGKEAPNFVVTDLEGKKIELKDLKGKGVFLNFWGTWCKPCEKEMPYMNELYPKYKEKGVEIIALDADETDIAVKNFVNQYGLKFPVAIDKGQKIIGTYGVGPLPTSFLIDKDGKVVEQIIGEQTKEQLEGYLKKITP

SEQ ID NO: 21599 - protein, 151 aa, Campylobacter jejuni subsp. jejuni NCTC 11168
MSLNIGDKAPQFELLNQDGVKIALKDFIGKKVILYFYPKDNTPGCTTEACDFSANYDKFGGKNAVIIGISPDSVASHEKFISKFDLKHILLSDSEKEVAKAYGALGLKKNYGKEYEGLIRSTFVIDETGKIAQIYSNVRVKDHALKVLESL

SEQ ID NO: 21600 - protein, 156 aa, Chlorobium tepidum TLS
MALLQAGQKAPEFTAKDQDGKEVSLRDYTGRKVVLYFYPKDDTPGCTKEACAFRDNLPNFEKVDAVVLGVSVDGQKAHRKFADKYELPFTLLVDDEKKIVEAYGVWGLKKFMGREYMGTNRVTYLIDEQGTIEKVWSKVKPETHTAEVLDWLQQKT

SEQ ID NO: 21601 - protein, 148 aa, Chlorobium tepidum TLS
MIEEGKIAPDFTLPDSTGKMVSLSEFKGRKVLLIFYPGDDTPVCTAQLCDYRNNVAAFTSRGITVIGISGDSPESHKQFAEKHKLPFLLLSDQERTVAKAYDALGFLGMAQRAYVLIDEQGLVLLSYSDFLPVTYQPMKDLLARIDAS

SEQ ID NO: 21602 - protein, 155 aa, Clostridium perfringens str. 13
MSIEINKLAPDFKLMGSDGKEHSLSDYKGKNIVLYFYPKDNTAGCTTEACDFRDNIQNFHDLNAIILGVSRDSLASHDKFITKLSLPFVLLSDPDETVCKLYDVIKEKNMCGKKYMGVERSTFLINKEGILIEEFRKVRVKGHIEKVLDKLKEIN

SEQ ID NO: 21603 - protein, 190 aa, Corynebacterium efficiens YS-314
MKTRYCGPILLNSSPERTPIPENTTAPAIVEVMTDARRLDVGDTPPAFTLPNDSGSTTSLSDFAGERVVVYFYPKANTPGCTKEACDFRDSLAQLNDLGVKVIGISPDPVDKLVKFREDHDLNFPLLSDEDKAVMTAWGAFGEKKNYGKIVQGVIRSTFVIEPDGTVGLAKYNVRATGHVARILRDLEAA

SEQ ID NO: 21604 - protein, 155 aa, Corynebacterium glutamicum ATCC 13032
MKRLDVGDTPPAFSLPNDSGSTTSLSDFAGKQVLVYFYPKANTPGCTKEACDFRDSLSNLNDLDIAVVGISPDPVDKLVKFREDHELNFPLLSDEDKSVMTAWGAFGEKKNYGKIVQGVIRSTFLINADGTVGMAKYNVRATGHVERIVREITAA

SEQ ID NO: 21605 - protein, 158 aa, Corynebacterium glutamicum ATCC 13032
MTEVKRLDVGDTPPAFSLPNDSGSTTSLSDFAGKQVLVYFYPKANTPGCTKEACDFRDSLSNLNDLDIAVVGISPDPVDKLVKFREDHELNFPLLSDEDKSVMTAWGAFGEKKNYGKIVQGVIRSTFLINADGTVGMAKYNVRATGHVERIVREITAA

SEQ ID NO: 21606 - protein, 145 aa, Thermosynechococcus elongatus BP-1
MALAVGTPAPPFTAKDTQGNTISLSDFAGKTVVLYFYPKDDTPGCTKEACSFRDNYAAYQGKNIVVLGVSADDETSHQKFTAKFNLPFPLLADVDRSIIKAYDVDGGGYAKRVTYVIDGNGIISHVYTSVKTDTHATDILADLGL

SEQ ID NO: 21607 - protein, 156 aa, Thermosynechococcus elongatus BP-1
MSLTAGAIAPPFELADATGQLVRLADFQGQWVILYFYPRDNTPGCTTEACAYRELSATLGDRNVVILGISPDSVTSHAKFQQKLDLPFRLLADVDAKVAQAYGSYGPKKFMGKEYLGVYRDTFLIDPTGKIAAIYRRVKPAAHVAQVLADLERLQG

SEQ ID NO: 21608 - protein, 179 aa, Thermosynechococcus elongatus BP-1
MFLRSVLVALLSLILFLSPSAPSWALGGELPPLNAPAPDFSLPSSVNGQLISLKDYRGKWVVLYFYPKDFTSGCTLEAQRFQRDIEQFHAHNAEVIGVSADSVDSHQDFCDSEGLTFPLLSDPDGQVSKAYGSWLGFVSLRHSFIIDPEGILRERYRKVNPAIHSQEVLARLEELQQQG

SEQ ID NO: 21609 - protein, 158 aa, Buchnera aphidicola str. Sg (Schizaphis graminum)
MTTLKPGDIAPKFILPNCIDKSIKLSDFLGKKVLVYFYPKAMTPGCTVQACNIRDNLELFKSKKVEVLGISPDNTNKLLTFVEKKMLNFTLLSDKQNIVSKKFGVWGEKIFMGKKYFGIYRTSFLINSSGFIDKIFFKFKCKDHHKIILTYLNSKKSD

SEQ ID NO: 21610 - protein, 134 aa, Thermobifida fusca
MTLSEVLKDHDRVVVYFYPAAMTPGCTTQACDFRDNLHDFNKAGLTVLGISPDSLTRLAKFAEQEGLTFPLLSDPDRSVMTSYGAFGEKKNYGRIVQGVIRSTFVISAGRTVERAYYNVRATGHVERLKRDLGL

SEQ ID NO: 21611 - protein, 150 aa, Clostridium thermocellum ATCC 27405
MLEVGTKAPDFELPDQNGKMHKLSDYRGKKVILYFYSKDNTAGCTKQACGYSERYPQFVEKGAVVLGVSKDTVASHKKFEEKHGLAITLLSDPECKAIEAYDVWKEKKVCGKVCMGVVRTTYLIDEEGIIVKANDKVKAEDDAERMLAEL

SEQ ID NO: 21612 - protein, 158 aa, Microbulbifer degradans 2-40
MALPKVGAKAPAFTLRNQAGEKVRLSSFAGEKNVVVYFYPKAMTPGCTVQACGLRDSKKELEDVDAVVFGISPDPVSRLEKFIEKQELNFDLLSDEDHAIAEKYGVWGLKKFMGREFMGILRTTFIVGKDGKIKHVFDKVKTKTHHDDVLAVLKDLAD

SEQ ID NO: 21613 - protein, 185 aa, Microbulbifer degradans 2-40
MNRLMAFLFIVFSIQAFAQEQIEVGVKVGEKAPELSVVDAQGKPQTLASLTGEQGLVVVFFRSADWCPFCKRHLIEIKDWVKPLGEKGFNVVGVSYDSPATLAAFSKAKDINFTLLADQNVATVKAYNIVNSGYKPGDDNYGIPYPGAVIIDKAGVVRYSYFYEGYKKRVQWQTIEPALNTLTAK

SEQ ID NO: 21614 - protein, 154 aa, Trichodesmium erythraeum IMS101
MKIQVGDQAPEFTLPSQEGTEVSLSDFRGKKNVVLYFYPKDDTPGCKIQACTFRDQYTIFKNVDAEIIGISGDSKQSHKQFSTKYSLPFTLLCDTDNKVRQLYDVPPTLWILPGRATYVIDKEGIIRYICDSTFDFEVHSKEALKALRKLRVTV

SEQ ID NO: 21615 - protein, 149 aa, Trichodesmium erythraeum IMS101
LPELDQPAPEFTLPTNIGDREISLSDYRGQWVVLYFYPKDFTSGCTIEARRFQQDLPKYRERNTQILGVSADDINSHQEFCDSEGLKFPLLADTDGTVSKAYGSWLNFFSMRHTFIINPGGILQEIFLGVKPTIHSQEVLSSLDNLQQI

SEQ ID NO: 21616 - protein, 183 aa, Trichodesmium erythraeum IMS101
MRSRRHFQTIFLVICLALITWLNFIPNAWALGGKLPELDQPAPEFTLPTNIGDREISLSDYRGQWVVLYFYPKDFTSGCTIEARRFQQDLPKYRERNTQILGVSADDINSHQEFCDSEGLKFPLLADTDGTVSKAYGSWLNFFSMRHTFIINPGGILQEIFLGVKPTIHSQEVLSSLDNLQQT

SEQ ID NO: 21617 - protein, 154 aa, Brucella suis 1330
MAHPQVGDMAPDFTLPSDHGEITLSSLKGHPVVVYFYPKDDTSGCTREAIAFSQLKAEFDRIGVRVIGLSPDSATKHARFRTKHALTVDLVADEDRVALEAYGVWVEKSMYGRKYMGVERTTFLIGADGRIAQVWNKVKVDGHAQAVLEAARRL

SEQ ID NO: 21618 - protein, 182 aa, Bifidobacterium longum DJO10A
MMGIMTTTVDSSDSMPERLQEGSVAPDFTLPAVIPGFTESGSINLSDVLDAGRRVVLYFYPAAMTPGCTTEACDFRDNLARLASKNVTVLGVSKDSLDKLRKFAQRDHLTFPLLSDPDLTVHKLYGAYGEKKLYGKVHVGVIRSTLVINPDGSVAIARYNVRAKGHVDSLLKALEKLEKLEK

SEQ ID NO: 21619 - protein, 158 aa, Haemophilus somnus 129PT
MKTLKAGDFAPHFSLLNQNNEQVSLENFHGKKVLVYFYPKALTPGCTTQACGLRDSKAELENKGVVILGISPDSPKKLANFIEKKALNFDLLSDEQHIVAEQFGVWGEKKFMGRTFDGIHRISFLIDEQGKIEQVFDKFKTTDHHQIVLDYLNSLEQR

SEQ ID NO: 21620 - protein, 157 aa, Pseudomonas syringae pv. syringae B728a
MTVTVDHPVPDFQAPATSGQTVELSALKGQQVVIYFYPKDNTPGCTTQGQDFRDHIAQFQAANTVVLGVSRDSLKTHENFKAKQSFPFELISDKDEAVCQLFDVIKLKKLYGKEYLGVDRSTFLIDKEGVLRQEWRGVKVPGHVAEVLAQAEALNKG

SEQ ID NO: 21621 - protein, 157 aa, Pseudomonas fluorescens PfO-1
MAVVIDQPVTDFEAPATSGQTVSLSALKGKQVVIYFYPKDSTPGCTTEGQGFRDQYTAFKAANTEIFGISRDSLKSHENFKCKQEFPFELISDKDEAVCQLFDVIKLKKLYGKEYLGVDRSTFLIDKNGVLRQEWRGVKVPGHVDAVLAAAQALNKA

SEQ ID NO: 21622 - protein, 195 aa, Bifidobacterium longum NCC2705
MMGIMTTTVDSSDSMPERLQEGSAAPDFTLPAVIPGFTESGSINLSDVLDAGRRVVLYFYPAAMTPGCTTEACDFRDNLARLESQNVVVLGVSKDSLDKLRKFAERDHLTFPLLSDPDLTVHKLYGAYGEKKLYGKVHVGVIRSTLVINPDGSVAIARYNVRAKGHVDSLLKALEKVGEAGEVVRSRCSDTVVRA

SEQ ID NO: 21623 - protein, 163 aa, Desulfovibrio desulfuricans G20
MSVTPAGMPAEGSPAPDFALADKDGTTHTLQSFNGRWLVLYFYPRANTPGCTREGKDFTDLLPRFEALGCTVAGVSPDSLKSLCNFAQKQELAVTLLSDKEKDAASAYGVYRMKKSYGKESPGIVRSTFLIDPAGILRRVWSPVTVDGHAAAVLDALELLADS

SEQ ID NO: 21624 - protein, 157 aa, Pseudomonas aeruginosa PAO1
MPVAIDKPVPDFTAPATSGKEVTLSALKGKQVVLYFYPKDSTPGCTTEGQGFRDQYAAFQKANTEVFGISRDGLKSHENFKCKQEFPFELISDKDEAVCQLFDVIKLKKLYGKEYMGVDRSTFLIDRDGVLRQEWRGVKVPGHVDAVLAAAQALNGA

SEQ ID NO: 21625 - protein, 156 aa, Shewanella oneidensis MR-1
MNTLTAGAKAPLFTLQDQQGNTVSLQECLTRGPVLVYFYPKASTPGCTVQACGLRDSKAELDSHSVTALGISPDPVAKLAKFAEKQSLNFTLLSDEDHSVADAFGVWGEKKFMGKIYDGIHRLSFLINTDGTIAHVFDKFKTSDHHQVVLAQIAGQ

SEQ ID NO: 21626 - protein, 215 aa, Shewanella oneidensis MR-1
MLSLLQRFLLTISLLLGSFSTLAQTIAKDEYSVSPLLNGEQIPAITLQDMNGQNVDLVKLTAQKPTIFFFYRGGWCPFCNNQMGQLKAIEPKLIEMGFQLVGISPDTPAQLKASSAKNELKYLLLSDEKMLASQAFGLAFYTSKQVTESYTNRLQLENPLWTTPEGDKGLVLPVPAIYIADKKGLIHFQYINPNYKVRPAPKLILTAASLVGSPE

SEQ ID NO: 21627 - protein, 157 aa, Yersinia pestis CO92
MMSPLKAGDIAPKFSLPDQDGEQISLADFQGQRVLVYFYPKAMTPGCTVQACGLRDNMDELKSAGVEVLGISTDKPEKLSRFAEKELLNFTLLSDEHHEVAEQFGVWGEKSFMGKTYNGIHRISFLIDADGKVEHMFDNFKTNNHHDIVMDYLRQNA

SEQ ID NO: 21628 - protein, 156 aa, Vibrio vulnificus CMCP6
MNMLQAGSPAPEFSLPDQNGNLVSLKDLKGKKVLFYFYPKAMTPGCTVQAQGLRDVHSELAKHNVVVLGVSIDPVKRLGKFIERDSLNFTLLSDEDHAVAEQFGVWGEKKFMGKVYDGLHRISFLINEEGVIEHVFDKFKTKDHHEVVLNYLEQSK

SEQ ID NO: 21629 - protein, 157 aa, Pseudomonas syringae pv. tomato str. DC3000
MAVTVDQPVPDFQAPATSGQTVELSAFKGQQVVIYFYPKDNTPGCTTQGQDFRDHIAQFQAANTVVLGVSRDSLKTHENFKAKQSFPFELISDKEEALCQLFDVIKLKKLYGKEYLGVDRSTFLIDKEGVLREEWRGVKVPGHVADVLAKAQALNKG

SEQ ID NO: 21630 - protein, 156 aa, Vibrio parahaemolyticus RIMD 2210633
MNTLTAGSPAPAFSLLDQDGNTVTLDDFKGKKVLFYFYPKAMTPGCTTQAKGLRDVKAELDAHNVVVLGVSIDPVKRLGKFIERDELNFTLLSDEDHAVAEQFGVWGEKKFMGKVYDGLHRISFLINEEGVIEHVFNKFKTKDHHEVVLNYLNENA

SEQ ID NO: 21631 - protein, 157 aa, Bacillus subtilis subsp. subtilis str. 168
  unsure (1)..(157): unsure at all Xaa locations
MTIEIGQKAPDLELKGDHGETVKLSDYKGKYIVLYFYPKDMTPGCTTEACDFSGQSRKLRRTGCRHYRRQPGQPGKTRKIXEKHNLPFLLLVDDEHKLAEAFDVWKLKKNFGKEYMGIERSTFLIDKEGRLIKEWRKVKVKDHVAEALQTLKDMSEK

SEQ ID NO: 21632 - protein, 161 aa, Aquifex aeolicus VF5
MLKEGDKVPSFCLPGIDEEVNEREICIDEFKGKKVILYFYPKDNTPGCTQEACDFRDNLNLLKEMGYVVIGVSPDSTASHKKFKEKYGLNFILLSDKDKKVAEMFGVYGEKKAYGKVTKGIIRSTFLIDEEGRIIKEWRNVKAKGHVAKVIETLKSLEEKQ

SEQ ID NO: 21633 - protein, 167 aa, Aquifex aeolicus VF5
MKEFLIKILVLLGLAQPGNAIQEGQPAYLFSLNNHEDKVVNLSDYKGKWVVLYFYPKADTPGCTTQAKEYTKLMPEFEKLNVKVFGISTDSVEKIRRFREKYGLTVEFLSDPEGIVAKAYGVTLIAGLCSRDTVIINQNLIVEKIYRGVSPSADPHKVLEYIKQRAS

SEQ ID NO: 21634 - protein, 228 aa, Bradyrhizobium japonicum USDA 110
MSKKSQKKSSKTPSGTTAAKKKASKTRAATQTKSAKTQRTPASKSTGSIAKAASHGAASKQLNSSRSAPASAARQVLAEGQKAPAFRLPRDGGGAVTLSDYAGRKLVLFFYPRADTPGCTREAIDFTRLADAFAAAGTAVIGISADSLKAQEKFRDKHSLGIPLISDEKHEMLEAYGAWGEKSMYGKSFLGILRTTVLVGSDGKVARIWRNVRVDGHADQVLEAATSL

SEQ ID NO: 21635 - protein, 154 aa, Brucella melitensis 16M
MAHPQVGDMAPDFTLPSDHGEITLSSLKGHPVVVYFYPKDDTSGCTREAIAFSQLTAEFDRIGVRVIGLSPDSATKHARFRTKHALTVDLVADEDRVALEAYGVWVEKSMYGRKYMGVERTTFLIGADGRIAQVWNKVKVDGHAQAVLEAARRL

SEQ ID NO: 21636 - protein, 151 aa, Bacteroides thetaiotaomicron VPI-5482
MKNIGDKAPEVLGINEKGEEIRLSAYKGKKIVLYFYPKDSTSGCTAQACSLRDNYSELRKAGYEVIGVSVDSEKSHQKFIDKNNLPFTLIADTDKKLVEEFGVWGEKKLYGRAYMGTFRTTFLINEEGIIERIITPKEVKTKEHASQILNQ

SEQ ID NO: 21637 - protein, 154 aa, Bacillus cereus ATCC 14579
MITMITVGEMAPEFTLEGSNGEEVRLADFRGKNVVLYFYPKDMTPGCTTEACDFRDAYGVFQEKDTVILGVSPDSANRHLKFIEKHELPFTLLVDEDHKVAELYDVWKLKKNFGKEYMGIERSTFLINKDGELVKEWRKVKVKGHIEDVLSYIK

SEQ ID NO: 21638 - protein, 173 aa, Bacillus cereus ATCC 14579
MKKNRLLFRVIILLILCGAVGFTLYQGFFANKEKMQIGKEAPNFIVTDLEGKKIELKDLKGKGVFLNFWGTWCKPCEKEMPYMNELYPKYKEKGVEIIALDADETDIAVKNFVNQYGLKFPVAIDKGQKIIGTYGVGPLPTSFLIDKDGKVVEQIIGEQTKEQLEGYLKKITP

SEQ ID NO: 21639 - protein, 151 aa, Coxiella burnetii RSA 493
MSIEVGQKAPIFTLPTDEGEMLSLDDLKGKKVILYFYPKDDTPGCTKEACGFRDVWSQLSKAGVVVLGISKDSVKAHQSFKQKYNLPFTLLSDKDNTVCEQYGVMVDKNRFGKKYKGIERTTFLIDEEGVISAVWPKVKVDGHVAEVVGRL

SEQ ID NO: 21640 - protein, 155 aa, Streptomyces avermitilis MA-4680
MSERLQPGDTAPAFTLPDADGNEVSLADHKGRKVIVYFYPAALTPGCTKQACDFTDNLELLAGAGYDVIGVSPDKPEKLAKFREQENLKVTLVGDPDKQVLEAYGAFGEKKLYGKTVVGVIRSTVVVDEEGKVERALYNVKATGHVAKIIKDLGI

SEQ ID NO: 21641 - protein, 155 aa, Streptomyces avermitilis MA-4680
MTRRVDVGDKVEDFVLPDETGTPRQLSDLVADGPVVLFFYPAALTAGCTAEACHFRDLAAEFAAAGARPVGISGDPVDRQQEFAGQHTLGFPLLSDEDGTIRERFGVKRGFSLAPTKRVTFVIAEDRTVLEVVRSELRMSAHADRALTALRAHRS

SEQ ID NO: 21642 - protein, 153 aa, Sulfolobus solfataricus
MVKVGDKAPLFEGIADNGEKISLSDYIGKHNIVLYFYPKDDTPGCTREACAFRDNWDLLKDYDVVVIGVSSDDINSHKRFKEKYKLPFILVSDPDKKIRELYGAKGFILPARITFVIDKKGIIRHIYNSQMNPANHVNEALKALKQIKEEEIS

SEQ ID NO: 21643 - protein, 156 aa, Sulfolobus solfataricus
MVEIGEKAPEIELVDTDLKKVKIPSDFKGKVVVLAFYPAAFTSVCTKEMCTFRDSMAKFNEVNAVVIGISVDPPFSNKAFKEQNKINFTIVSDFNREAVKAYGVAGELPILKGYVLAKRSVFVIDKNGIVRYKWVSEDPTKEPNYDEIKDVVTKLS

SEQ ID NO: 21644 - protein, 153 aa, Thermoplasma acidophilum
MELLNVGDIAPDFETVDQYGKTVKLSSYRGKPVVLYFYPKDNTPGCTTEACNFRDNFNSFKDSGVEVIGVSVDSPESHKKFAEKYNLNFTLASDKSKDIVKKYGVLGLATAKRVTYIIDPDGKIAYVYPKVTPKDHALEVMNKLKDLGLVKNN

SEQ ID NO: 21645 - protein, 157 aa, Thermoplasma acidophilum
MAVKVGDKAPDFEAPDTNLKMRKLSDFKGQKVVLAFFPGAITSVCTKEMCTFRDSMANFNKVNAKVIGISVDSPFSLAEFAKKNNLTFDLLSDSNREISKKYGVLHENFVNVPGLTASKRSVFVIDKDGIVRYAWVSDDPGKEPNYKEVQDFVSKLN

SEQ ID NO: 21646 - protein, 157 aa, Thermotoga maritima
MLKSGDKAIDFELVNTDLKMVKLSDFSGKNVVLAFYPGAFTSVCEKELCTFRDSLSKFNRLNAVVLGISVDSPFANKAFAEKNHITFDLLSDFGGRVASQYGGVHENFLNIPGYTAAKRAVYVVDGGGTIVYSWVSEDPGKEPPYEEIEEALERLSK

SEQ ID NO: 21647 - protein, 154 aa, Ralstonia solanacearum
MPVTLDQPLPDFSAPATSGLTFSLAGQRGKVVVLYFYPKDNTPGCTTEAMNFRDQYDAFEAADAVVFGISRDSLKSHENFKAKLELPFELLSDADEAVCALFDTIKMKKMYGKDVRGIERSTFLIDRKGVLRQEWRGVKVPNHVDEVLGAVRAL

SEQ ID NO: 21648 - protein, 158 aa, Azotobacter vinelandii
MPVVLEQPVPDFQAQATGGQTVSLAALRGRQVVLYFYPKDSTPGCTTEGQGFRDRHDEFQAANTLVFGVSRDGLKSHENFKSKQAFPFELISDKEEQLCRLFDVIKLKKLYGKEYLGIDRSTFLIDEDGVLRQEWRGVKVPGHVDAVLAAARALQQSR

SEQ ID NO: 21649 - protein, 216 aa, Arabidopsis thaliana
MAASSSSFTLCNHTTLRTLPLRKTLVTKTQFSVPTKSSESNFFGSTLTHSSYISPVSSSSLKGLIFAKVNKGQAAPDFTLKDQNGKPVSLKKYKGKPVVLYFYPADETPGCTKQACAFRDSYEKFKKAGAEVIGISGDDSASHKAFASKYKLPYTLLSDEGNKVRKDWGVPGDLFGALPGRQTYVLDKNGVVQLIYNNQFQPEKHIDETLKFLKAA

SEQ ID NO: 21650 - protein, 155 aa, Mesorhizobium loti
MADLDVGDLAPQFDLPQDGGGSFSLAASAGKPVVLYFYPQDDTTSCTQEAISFSQLKPEFEKAGAVVIGLSPDNVKKHDKFKSKYNLTVDLAADEERKVIEAYHLWVEKSMYGRKYMGVERATFLIDRDGRIARIWRKVRVKGHAEDVLEAVRAL

SEQ ID NO: 21651 - protein, 155 aa, Sinorhizobium meliloti
MAGLGQGDVAPEFELPRDGGGSISLAALRGKPIVLFFYPKDDTKACTEEAISFSALAKEFQEAGIALVGISPDSAKSHDRFTQKHGLTVALGADEDKAAANAYGVWVEKSMYGRKYMGVERTTFLIDRQGVISRVWEKVKVPGHADEVLAAAKTL

SEQ ID NO: 21652 - protein, 153 aa, Dictyostelium discoideum
MTKLKVGDQAPDFTASDKDGKSYSLKDFADKVLVLYFYPKDSTPGCTKEACSFRDNYEQFTEAGAVVVGVSSDDAESHSKFSAKYRLPFTLLTDNKGEMAKKYGVKKELLLIPGRSTFIIDKNQKIALIHSSLLNAESHITESLKVIEQLKSQ

SEQ ID NO: 21653 - protein, 263 aa, Oryza sativa
  unsure (1)..(263): unsure at all Xaa locations
PLLWTPSTAAFRRGALSATTTPTPARAALPSTTGRNRIVCGKVTTTNNYPSSCRSRRSTMMHAAAWLLLQQLSPAAARVARAVDDDSSVQVSKGSAAPNFTLRDQDGRAVSLSKFKGRPVVVYFYPADETPGCTKQACAFRDSYEKFKKAGAEVIGISGDDXRLQKEFKKKYKLPFTLLSDEGNKVRKEWGVPADLFGTLPGRQTYVLDKNGVVQYIYNNQFQPEKHIGETLKILQSLXFSSSSSSFFNYNLSCMIHHSIPRN

SEQ ID NO: 21654 - protein, 219 aa, Triticum aestivum
  unsure (1)..(219): unsure at all Xaa locations
MAFAASTACCKPSVLLAPRASSSSSSSQARLCRPSTSAAFHGLRAPASAFALTPAPRRRAASTGIVCGKVSKGSVPPNFTLKDQDGKTVSLSKFKGKPVVLYFYPADETPGCTKQACAFRDSYEKYKKAGAEVIGISGDDAASHKAFAKKYRLPFTLLSDEGNKVRKEWGVPSDLFGTLPGRQTYVLDKKGVVQYIYNNQFQPEKHIGETLKIIQNLXI

SEQ ID NO: 21655 - protein, 252 aa, Triticum aestivum
  unsure (1)..(252): unsure at all Xaa locations
MAFAASTACCKPSVLLAPRASSSSSSSQARLCRPSTSAAFHGLRAPASAFALAPAPRRRAAYAGIVCGKVNFTLKDHDGTPVSLSKIKGKPVVLYFXPVVLYFYPADEAPGCTKQACAFRDGXXRETIGSSRDYAASHKAFAKKYRLPFKQLTDDRXTMLSDEGNKVRKEWGXVPSDLFGRVPGRQTYVLHKKGVVQYIYNNQFQPEKHIGETLKIIQNLXLIDRFEDRTTIFLPFPMPNISAPPVSTLHTC

SEQ ID NO: 21656 - protein, 138 aa, Triticum aestivum
  unsure (1)..(138): unsure at all Xaa locations
XTKQACASRDSYKKYKKAGAEVIGISGDDAASHKAFAKKYRLPFTLLSDEGNKVRKEWGVPSDLFGTLPGRQTYVLDKKGVVQYIYNNQFQPEKHIGETLKIIQNLXLIDRFEDRTTIFLPFPMPNISAPPVSTLHTC

SEQ ID NO: 21657 - protein, 256 aa, Zea mays
  unsure (1)..(256): unsure at all Xaa locations
MAFTPATACCKASLALAPRASPRGPAACAQAALLCTPSTSVFRGLRAPXIRRAGPAPAPLGGVHGHSLXARHAKGSVPPNFTLKDQNGKPVSLNKFKGKPXSWVYFYPADETPGCTKQACAFRDSYEKFKKAGXAEVIGISGXTTAASHKAFAQKYRLPFTLLSDEGNRVRKEWGVPSDLFGTLPGRQTYVLDKQGVVQYVYNNQFQPEKHIGXETLKILQTLXSDQPPHCSGPCSAIRRCKSTGLCSSVVYVTKS

SEQ ID NO: 21658 - protein, 140 aa, Zea mays
  unsure (1)..(140): unsure at all Xaa locations
MASSSSFFTFSSQTTLHSHPSQKXTFLTKTQFPVPTKSSESNFFGLRLSPSTSRSPLSPCSFKSSIFAKVNKGQSAPDFTLKDQNGKPVSLKKYKGKPVVVYFYPADETPGCTKQACAFRDSYEKFKKAGAEVXGISGDX

SEQ ID NO: 21659 - protein, 86 aa, Zea mays
  unsure (1)..(86): unsure at all Xaa locations
FIDKGTPVPKKWGVPLALFGTLPGAQKYVLDKKGVVQYVYNTQFQPEKPIGETLKIFQPLXSDHPPPCFGPCFAFVAVKGPAYVVV

SEQ ID NO: 21660 - protein, 157 aa, Novosphingobium aromaticivorans
MSERIGVGEAFPDIAMTTPDGGSVKASDFAGRKLVVFFYPKDDTPGCTTENKDFSSLHADFEAAGIAVLGVSKDPPKKHLKFAEKHALTAPLASDAEEGGVSDALGIWTEKSMYGRTYMGMERTTYLVGADGKIAQIWNKVKVKDHAAQVLAAAKAL

SEQ ID NO: 21661 - protein, 184 aa, Novosphingobium aromaticivorans
MTKLALTAVTAAFALILSAPASAELPTGARAPDFAAPGALAGKPFSFKLHQALKKGPVVLYFYPKAFTQGCTLEAHAFAEASADFRAAGATVIGMSNDDVATLQKFSTEACRDKFAVASASANLIKAYDVDLKKPDGTSTGLTKRTSYVIGRNGRIVMVHSDMDYRDHVRLTLAAVRKLKGGKG

SEQ ID NO: 21662 - protein, 195 aa, Schizosaccharomyces pombe
MDAPRRSSRLAAKIANVLDSKGTIIPEAAPVMLKKPAKDESVDSTIQVGDVIPDITLPDEDGTSIRLRDITANKGLVIFAYPKASTPGCTKQGCGFRDNYPKIQASDYEVLGLSFDTSKAQKAFKDKQNFPYHLLSDPKGELIKKLGAEKPGGGKLFRSHWIFEKGTGKCIVKEIDISPLVSVDKAFAVITDSEP

SEQ ID NO: 21663 - protein, 215 aa, Saccharomyces cerevisiae
MGEALRRSTRIAISKRMLEEEESKLAPISTPEVPKKKIKTGPKHNANQAVVQEANRSSDVNELEIGDPIPDLSLLNEDNDSISLKKITENNRVVVFFVYPRASTPGCTRQACGFRDNYQELKKYAAVFGLSADSVTSQKKFQSKQNLPYHLLSDPKREFIGLLGAKKTPLSGSIRSHFIFVDGKLKFKRVKISPEVSVNDAKKEVLEVAEKFKEE

SEQ ID NO: 21664 - protein, 152 aa, Thermoplasma volcanium
MELLKVGDQAPDFETVDQSGSKVRLSDFKGQPVVLYFYPKDNTPGCTTEACNFRDNFNSFKEAGIKVIGVSVDSPESHKRFAEKYQLNFTLASDKEKEICKKYGVLGLATAKRVTYIIDRDGKIVYVYPKVTPKDHAVEVMNKIKELGLIPS

SEQ ID NO: 21665 - protein, 154 aa, Thermoplasma volcanium
MYMELLKVGDQAPDFETVDQSGSKVRLSDFKGQPVVLYFYPKDNTPGCTTEACNFRDNFNSFKEAGIKVIGVSVDSPESHKRFAEKYQLNFTLASDKEKEICKKYGVLGLATAKRVTYIIDRDGKIVYVYPKVTPKDHAVEVMNKIKELGLIPS

SEQ ID NO: 21666 - protein, 157 aa, Thermoplasma volcanium
MSPKVNEKAPDFEAPDTALKMRKLSEFRGQNVVLAFFPGAFTSVCTKEMCTFRDSMANFNKFKAKVIGISVDSPFSLAEFAKKNNLTFDLLSDSNREISKKYDVLHQNFAGVPGLTASKRSVFIIDGDGIVRYAWVSDDPGKEPDYKAIQEFLSKMN

SEQ ID NO: 21667 - protein, 163 aa, Aeropyrum pernix
MPGVGEQAPDFEGIAHTGEKIRLSDFRGRIVVLYFYPRAMTPGCTREGVRFNELLDEFEKLGAVVIGVSTDSVEKNRKFAEKHGFRFKLVSDEKGEIGMKYGVVRGEGSNLAAERVTFIIDREGNIRAILRNIRPAEKHADLALEEVKKLVLGKKAERAGEVI

SEQ ID NO: 21668 - protein, 110 aa, Aeropyrum pernix
MLSVGDPAPDIEIQLIDGSTIRLSQLRGRSVVLYFYPKAFTPGCTREAIGFNGLYEEFKKLGAEVIGVSMDPPGRNRRFAQNYGVRFRLASDVEGEAFKSFWGAQRPRTD

SEQ ID NO: 21669 - protein, 164 aa, Aeropyrum pernix
MKGLVELGEKAPDFTLPNQDFEPVNLYEVLKRGRPAVLIFFPAAFSPVCTKELCTFRDKMAQLEKANAEVLAISVDSPWCLKKFKDENRLAFNLLSDYNREVIKLYNVYHEDLKGLKMVAKRAVFIVKPDGTVAYKWVTDNPLNEPDYDEVVREANKIAGELVA

SEQ ID NO: 21670 - protein, 182 aa, Prochlorococcus marinus subsp. pastoris str. CCMP1378
MLRHLVHLLSHETRFLVFYIHSYLIMSMALKVGDKAPEFNLKDSFEKDVSLKDFKGKRIILYFYPKDNTPGCTKEACNFKENWDLLKQNNFVVLGISKDSAASHQKFIEKFDLPFVLLTDPEPYKTSSDYDSYGLKKFMGKEYMGMMRNTFLIDVDGKVEKIYLKVKAAIMADHIISDLGLR

SEQ ID NO: 21671 - protein, 152 aa, Nostoc punctiforme
MPIKVGDTAPNFTLPAQNGSTVSLQDFRGTKAVVLYFYPKDDTPGCTAESCAFRDQYEVFKSVGAEVVGVSADSSESHQKFAAKYNLPFTLLTDKGDQVRKLYGATAAFGLFPGRVTYVIDQQGVVQYVFDSMLNFKGHVEEALKTLQQIAK

SEQ ID NO: 21672 - protein, 145 aa, Nostoc punctiforme
MPLAVGTDAPAFTAKDTNGNTVSLSDFAGKTVVLYFYPKDDTPGCTKQACSFRDAQSEYQGKDIVVLGVSADDEVSHQAFTQKYNLNFPLLADYDKSLITAFDVDGGGYAKRVTYVIDPNGKITHVDNAVNTTTHASDILAALGL

SEQ ID NO: 21673 - protein, 159 aa, Nostoc punctiforme
MTNIPQIGQPAPDFSTPDQNGNSVTLDDFSSQWVILYFYPKDDTPGCTTEAKDFTELYQDFSALGAKILGVSPDLGKSHCKFISKHNLSITLLSDPEHILTEAYGAWRLKKFMGKEYMGVARSTFLISPDKIIAYTWPNVKAKGHAQAVLTKLQELAAT

SEQ ID NO: 21674 - protein, 154 aa, Halobacterium sp. NRC-1
MLSEGTTAPDFSLANQDDETVSLSSFAGQHVVVYFYPRADTPGCTSEACEFRDNWGRYDDAGVPVVGISDDPVSELAAFKDKYNLPFDLLSDAGGEVATAYESYDEQEITGELMDVTLRNTYVIGPDGTITAAFEGVDPEGHADEVLAAIEDAA

SEQ ID NO: 21675 - protein, 155 aa, Vibrio cholerae
MNTLTAGTPAPAFSLPDQNGNPVTLADFAGKKVLLYFYPKAMTPGCTVQAQGLRDIQAELQGHNVVVLGVSTDPVKRLGKFIERDNLNFSLLSDEDHQVAEQFGVWGEKKFMGKVFDGLHRISFLINEQGVIEQVFDKFKTSNHHEVVLAYLSGK

SEQ ID NO: 21676 - protein, 155 aa, Haemophilus influenzae Rd
MNPLSVGNQAPAFTLLNQQEKFVSLSDFRGKKVLIYFYPKALTPGCTTQACGLRDSKSELDVLGLVVLGISPDAPKKLAQFIEKKELNFTLLSDPDHQVAEQFGVWGEKKFMGRTYDGIHRISFLINESGTIMQVFDKFKIKDHHQMIIDYLRSL

SEQ ID NO: 21677 - protein, 153 aa, Prochlorococcus marinus str. MIT 9313
MALQVGDKAPAIDLVDQNGNKRRSNDLKGKVLVLFFYPKDDTPGCTAEACSFRDNYSVFENLGSEVWGVSGDDDISHRQFAERHGLPYALLSDKDNTLRRAFEVPRTLGMLPSRVTYVIDGQGTIRHIFNNLLDGPAHMREACRVVEEIKKKR

SEQ ID NO: 21678 - protein, 160 aa, Prochlorococcus marinus str. MIT 9313
MEAASMTLKIGDPAPDFNLPNQDGTLVQLASLRGQRVVIYFYPKDDTPGCTKEACNFRDQWERFEANDIKVLGISKDGATSHTKFIKKYQIPFTLLSDAEPCPVASSYESYGLKKFMGREYMGMMRHSFVVDPKGNLELIYLKVKAATMADQILKDLGLD

SEQ ID NO: 21679 - protein, 187 aa, Prochlorococcus marinus str. MIT 9313
MKRSELLRVITGAAVLSISQCLGRPSQALAMEGKLPALDAQAPDFELEAAAQEGALAEKLQRDAFLGSWLVLYFYPRDFTSGCTLEARGFQRDLSDFKAAGAAVVGVSADGTEEHVSFCSSEGLGYTLLSDPGGVVSERYGSWSSPFSQRHTFLIDPDGILRARWKDVSPSRHSQDVLRALKELQQS

SEQ ID NO: 21680 - protein, 155 aa, Pasteurella multocida
MKTLSIGESAPQFSLLNQCKENISLNQFAGKKVLVYFYPKALTPGCNTQACGLRDSKTELEKHGVVILGISPDSPEKLSKFSEKKALNFHLLADEDHQVAEQFGVWGEKKFLGKTYDGIHRISFLIDEQGNVEQVFRQFKTSNHHQVVLDYLTQK

SEQ ID NO: 21681 - protein, 156 aa, Rickettsia conorii
MTLELGKKLPDLSLHIGQDNVIKLSDLKGKFVILYFYPKDDTPGCTIEAQDFNKLKPEFDKLNTVIIGVSKDKLDSHDKFKEKYSLGFDLASDANSNLCEQLGVWIAKSMFGKKYMGIDRATFLLDKEGIVKHIWRSVNAKNHAQEVLEKLRTMLS

SEQ ID NO: 21682 - protein, 157 aa, Mycobacterium tuberculosis H37Rv
MTKTTRLTPGDKAPAFTLPDADGNNVSLADYRGRRVIVYFYPAASTPGCTKQACDFRDNLGDFTTAGLNVVGISPDKPEKLATFRDAQGLTFPLLSDPDREVLTAWGAYGEKQMYGKTVQGVIRSTFVVDEDGKIVVAQYNVKATGHVAKLRRDLSV

SEQ ID NO: 21683 - protein, 154 aa, Mycobacterium tuberculosis H37Rv
MKTGDTVADFELPDQTGTPRRLSVLLSDGPVVLFFYPAAMTPGCTKEACHFRDLAKEFAEVRASRVGISTDPVRKQAKFAEVRRFDYPLLSDAQGTVAAQFGVKRGLLGKLMPVKRTTFVIDTDRKVLDVISSEFSMDAHADKALATLRAIRSG

SEQ ID NO: 21684 - protein, 151 aa, SYNECHOCOCCUS SP. WH 8102
MAIGVGDSLPSFCLDDQDGVQRTPETARGRWLVLFFYPKDDTPGCTAEACGFRDSSAAFQELGAEVWGISGDDAISHRRFATRHGLNFPLLVDRNNSLRRSLGVPKALGLVPGRVTYVVDGEGVIRHVFSNLLDGPAHVREAERVISSLQG

SEQ ID NO: 21685 - protein, 230 aa, SYNECHOCOCCUS SP. WH 8102
MVPATAPWLDQPRSSRRGSAASRAGSGGTQRPETWPCHPSNPLPQARVPHRTGDPDVPGSATVPLRFGSQAAAAPVALQIGDPAPDFSLPNQDGDLVQLSSLRGQRVVIYFYPKDDTPGCTKEACNFRDRWDRFEQHGIKVLGISKDNATSHTKFISKHELPFTLLTDVEPCEVASSYESYGLKKFMGREYMGMMRHTFVVDADGKLERIYLKVKSATMADTILSDLELA

SEQ ID NO: 21686 - protein, 186 aa, SYNECHOCOCCUS SP. WH 8102
MRRRDLFIKSGLLLTALSITPTKAWSLGGVVLEQGAEVPSFDLPGSSRREPDRDRWSSDDLRGRWLAVYFYPRDFTGGCTIEARGFESLHSDFLAAGAEVVGISADSVDDHASFCESEGLSFPLLSDPDGAVSKAYGSWMAPYSLRHTFLIDPSGILRQRWVAVRPSGHAQEVLDAITDLQNNTSI

SEQ ID NO: 21687 - protein, 152 aa, Helicobacter pylori 26695
MEKLEVGQLAPDFRLKNSDGVEISLKDLLHKKVVLYFYPKDNTPGCTLEAKDFSALFSEFEKKNAVVVGISPDNAQSHQKFISQCSLNVILLCDEDKKAANLYKAYGKRMLYGKEHLGIIRSTFIINTQGVLEKCFYNVKAKGHAQKVLESL

SEQ ID NO: 21688 - protein, 152 aa, Helicobacter pylori J99
MEKLEVGQLAPDFRLKNSDGVEISLKDLLHKKVVLYFYPKDNTPGCTLEAKDFSALFSEFEKKNAVVVGVSPDNSQSHQKFISQCSLNVILLCDEDKKVANLYKAYGKRMLYGKEHLGIIRSTFIINTQGVLEKCFYNVKAKGHAQKVLESL

SEQ ID NO: 21689 - protein, 154 aa, Bacillus halodurans
MLEGKQAPDFSLPASNGETVSLSDFKGKNIVLYFYPKDMTPGCTTEACDFRDRVEDFKGLNTVILGVSPDPVERHKKFIEKYSLPFLLLADEDTKVAQQYDVWKLKKNFGKEYMGIERSTFVIDKDGTVVKEWRKVRVKDHVEEALAFIKENLE

SEQ ID NO: 21690 - protein, 156 aa, Salmonella enterica subsp. enterica serovar Typhi
MNPLKAGDIAPKFSLPDQDGEQVNLTDFQGQRVLVYFYPKAMTPGCTVQACGLRDNMDELKKAGVDVLGISTDKPEKLSRFAEKELLNFTLLSDENHQVCEQFGVWGEKSFMGKTYDGIHRISFLIDADGKIEHVFNDFKTSNHHDVVLNWLKENA

SEQ ID NO: 21691 - protein, 153 aa, Nitrosomonas europaea
MSDDLIPDFELASTGNKQFRLSDVKSRYLVIFFYPKDDTPGCTSESQQFRDLYPEFVQIGCEIVGISRDNLKSHDKFRGKYDLPYDLLSDSDEVVCELFGVMKMKNMYGKQVRGIERSTFVLDRDGKVYKAWRGVKVPGHAEEVLAFIKSVTA

SEQ ID NO: 21692 - protein, 163 aa, Ferroplasma acidarmanus
MALKIGDKAPDFKANDELGKTVSLADFRGKSPVVLYFYPKAETPGCTAEAKCFRDNWDAIKPLGAIVLGVSSDSEEKQKSFKDHYKLQFTLLSDKNKSIREAYDAKGFLIPARITYIIDKQGIIRGVHNSQMDPKSHIDFAIKTLKEISSTQEKNSPEASAQE

SEQ ID NO: 21693 - protein, 149 aa, Ferroplasma acidarmanus
METLKIGEQAPDFETIDQDGKNVKLSDFKDSVVVLYFYPKDNTPGCTMEAKNFRDNIDMFTEKGVKVFGVSVDSSESHKKFQEKYNLNFTLLSDKQKDIVKKYGVLGLATAKRVTYIIKDGKIVYVYPKVSPGEHAKEVYEKLQELKLI

SEQ ID NO: 21694 - protein, 159 aa, Ferroplasma acidarmanus
MNDMVEEGELAPDFEALDTGLKSKKLSDYKGNVTVLAFFPGAFTSVCTKEMCTFRDSMANFNKFNAKVVGISVDSPFSLKEFATKNKLQFDLLSDGNREISGKYGALYKSFLNINGLTASKRSVFVLDKTGKIVYKWVSEDAGKEPDYKKIEEVISKYN

SEQ ID NO: 21695 - protein, 149 aa, Cytophaga hutchinsonii
MTLTAGDKAPVFKGTDQDGNTISLKDFAGKKVVLYFYPKDNTPGCTKQACDLRDNYNALLKAGYVVIGVSTDSEKSHQKFIKKFELPFPLIADEDKTIHEQYGVWGEKSMYGKTYMGTLRTTFVIDEKGKIEEVISKVKTDDHTAQILK

SEQ ID NO: 21696 - protein, 171 aa, Cytophaga hutchinsonii
MRKLVLICTLLFFISSSVYAQTQLKAGDKAPAFSAKDQNGKIVSLTSFKGRKLVLYFYPKDNTPGCTKEACNLRDYKDTLAAQGYTILGVSTDDAFSHQQFIKQYNLPYDLLVDSDAAINKAYGVWVQKEREGKVFYGTARTTFIINESGVITKVIDAVKVDAHAEQILTK

SEQ ID NO: 21697 - protein, 134 aa, Burkholderia fungorum
MEDFVHDPFAARGALERWFGDFSSSRFQPRIDVVDEGKILRVTIELPGMEREDLSVSVEDGALVLRGEKKQDVHSEEDGCYRLERAYGVFTRTIPMPDNADPDHALAKFDKGVLTLTVPKREQLRSASRTIDIG

SEQ ID NO: 21698 - protein, 185 aa, Burkholderia fungorum
MNIELSKWNPFKFLRKAQNGREKPSSNPPTTKNWLTEWPDASRLFSSDPWRVMRELLHDPFAGGALERWFGDFSSSWFQPRIDVVDDGDVLRITAELPGMDRGDLQTSIEEGVLVLRGEKKQDTRSEENGCYRLERSYGAFTRTIPLPDGVDVDKVDAKFDKGVLTVRLPKTDSARPTIRKVEIK

SEQ ID NO: 21699 - protein, 137 aa, Enterococcus faecium
MANVPSIRDMFPDFNDVFSPAFNDFLGVSSYPKVDLVENEKEYKLTADMPGCDKEDTTVEYSDNTLTISANHESHTEDKEDGNYVRKERHSVSYKRSFYLPNVDEEKITGTFKNGVLKLVLPKTAYQPKETKKIELN

SEQ ID NO: 21700 - protein, 169 aa, Magnetospirillum magnetotacticum
MSVRDLIPWGRSNGNQVPSVLRDGDRDPFLSLHREVNRLFDDVFRGFGSNLPSLVGASAFSGGWPNVEISDGEKEIKVTAEVPGLEEKDIEVLLDDGVLTLKGEKRSETEDKDRQFSERFYGRFERRIPLGYEVKDDKVDARFRNGVLTVTLPKSEKAQSQVKRIAIKS

SEQ ID NO: 21701 - protein, 142 aa, Chlorobium tepidum TLS
MALTLYGKDPLKMFEDVFNERLTPFISSMGSMMAPAFKVDISEDEKAIYLSADIPGVKKEDVKVSIEDDVISISAERTQEEEEKKKNYHRVERSWGSLSRSFTIGDNVDSDNITANYDNGVLKVVIPKKEPEQKKSKEIAVS

SEQ ID NO: 21702 - protein, 184 aa, Thermobifida fusca
MRYVVDASTAGPQWAARSSRILSAPNRKVIAMALPVTRRRERLIPTQWGAFPEFEELYDRMGRLLESAFGEPIISPTTWTPFADLLEDDKSYIVEAEVPGMSKDDINIQVSGNELIISGKVEEQEKEGVRAHRRMRRYGEFEYRTVLPGEIDAEGVRAKLDNGVLTVTAPKSAHERPRHVAIES

SEQ ID NO: 21703 - protein, 140 aa, Archaeoglobus fulgidus DSM 4304
MGMLIDPFEELRRMQERFNRLLEEFGRFPEVKEFRVTMPVDVIDEGEQIRVVADLPGFSKEDLEIYFEDGDLVIKAEKKEEFEEKKGEYLRRERRMGKVYRRIALPAGLDIDAVKAKYNNGVLEITIPKLKKDRKAVQIE

SEQ ID NO: 21704 - protein, 238 aa, Funaria hygrometrica
MASSTAKSGFHTFMEALTGAGREPVTAVSCRPPCYGFRRLAVVSSSQQENASENSDRSLTQLPRQDGGSRSPGPRRPMGLRRGDTRRDLTSSLFDIWDPFIGDRSLKQMLNTVDRLFADPFFGSPPSATALDLRTPWDVKEDADAYKLRFDMPGLSKEEVKVSVEDGDLVIRGEHNAEDQKEDSWSSRSYGSYNTRMALPEDALFEDIKAELKNGVLYVVVPKSKKDAQKKVLDINVQ

SEQ ID NO: 21705 - protein, 243 aa, Funaria hygrometrica
MAARTLSRVVASPARSFLSTFRDTFLMQGRSPLPRQAPFSVAQRMAVSGSAQTVSDDDYESRSQLEKMQNESNASQKRSQGGLRRVVPRDLAASFFDVWDPFLGNKSLRQMLNTVDRLFDDPFFSAAPSRPTGIALDFRTPWDVKEDNESFRLRFDMPGLGKDEVKVYVEDGDLVIKGAHRAEEQKENNWSSRSYGSYNTRMTLPENVKIDEVKAELKNGVLQVVVPKSKEEPKKNVIDINVE

SEQ ID NO: 21706 - protein, 157 aa, Chlamydomonas reinhardtii
MALSNYVFGNSAADPFFTEMDRAVNRMINNALGVAPTSAGKAGHTHAPMDIIESPTAFELHADAPGMGPDDVKVELQEGVLMVTGERKLSHTTKEAGGKVWRSERTAYSFSRAFSLPENANPDGITAAMDKGVLVVTVPKREPPAKPEPKRIAVTGA

SEQ ID NO: 21707 - protein, 227 aa, Arabidopsis thaliana
MASTLSFAASALCSPLAPSPSVSSKSATPFSVSFPRKIPSRIRAQDQRENSIDVVQQGQQKGNQGSSVEKRPQQRLTMDVSPFGLLDPLSPMRTMRQMLDTMDRMFEDTMPVSGRNRGGSGVSEIRAPWDIKEEEHEIKMRFDMPGLSKEDVKISVEDNVLVIKGEQKKEDSDDSWSGRSVSSYGTRLQLPDNCEKDKIKAELKNGVLFITIPKTKVERKVIDVQIQ

SEQ ID NO: 21708 - protein, 160 aa, Malus x domestica
MSLIPNSRRGSSSVFDPFSLNLWDPFKDFPFPSSSSLSAFPEFSRENSAFVNTRVDWKETPEAHVFKADVPGLKKEEVKVEVEDDRVLKISGERNVEEEDKNDKWYRVERSSGKFLRRFQLPENAKVDQIKAAMENGVLSVTVPKAELKNVDVRAIEISG

SEQ ID NO: 21709 - protein, 169 aa, Mesorhizobium loti
MSVRDLIPWSRGGGPAPSIYRGDDMDPFLSLHRNVNRLFDEVFRGFDTPSVLGRMAPLNGTWPGVEFSETDEEIRLTAEIPGLDENDVEVMLDDGVLTLRGEKKAETEDKDRQFSERYYGRFERRFGLGREVEDDKVAATFKNGVLTVTLPKTKRAQANAKRIAINGNK

SEQ ID NO: 21710 - protein, 168 aa, Sinorhizobium meliloti
MNVRDLIPWGRAQGQVPASYRDNDRNPFLALHREMNRLFDDAFRSFETRLPISGFSGFAGGWPSVEVSDRDKEIKVTAELPGLDEKVVELSLSDGVLSLRGEKRAETEDQENQFSERYYGRFERRIALGYEVDESKVNATFRNGVLTVTLPKTEQAQSKAKRIAINGR

SEQ ID NO: 21711 - protein, 231 aa, Glycine max
MAQALSTSSLLLSQKTGSYVKPQNNVIVPCMASFPSRKEFPRLGRVRAQASGDNKDNSVEVQHVSKGDQGTAVEKKPRRTAMDISPFGILDPWSPMRSMRQILDTMDRVFEDTMTFPGRNIGGGEIRAPWDIKDEEHEIRMRFDMPGLAKEDVKVSVEDDMLVIKGGHKSEQEHGGDDSWSSRTYSSYDTRLKLPDNCEKDKVKAELKNGVLYITIPKTKVERKVIDVQVQ

SEQ ID NO: 21712 - protein, 181 aa, Glycine max
GGDNKDNSVEVQHVSKGDQGTAVEKKPRRTAMDISPFGILDPWSPMRSMRQILDTMDRVFEDTMTFPGRNIGGGEIRAPWDIKDEEHEIRMRFDMPGLAKEDVKVSVEDDMLVIKGGHKSEQEHGGDDSWSSRTYSSYDTRLKLPDNCEKDKVKAELKNGVLYITIPKTKVERKVIDVQVQ

SEQ ID NO: 21713 - protein, 158 aa, Medicago sativa
MSLIPSFFGGRRSNVFDPFSLDVWDPFKDFPFNNSALSASFPRENSAFVSTRVDWKETPEAHVFKADLPGMKKEEVKVEIEDDRVLQISGERSVEKEDKNDQWHRLERSSGKFMRRFRLPENAKMDQVKAAMENGVLTVTVPKEEVKKPEVKTIDISG

SEQ ID NO: 21714 - protein, 232 aa, Pisum sativum
MAQSVSLSTIASPILSQKPGSSVKSTPPCMASFPLRRQLPRLGLRNVRAQAGGDGDNKDNSVEVHRVNKDDQGTAVERKPRRSSIDISPFGLLDPWSPMRSMRQMLDTMDRIFEDAITIPGRNIGGGEIRVPWEIKDEEHEIRMRFDMPGVSKEDVKVSVEDDVLVIKSDHREENGGEDCWSRKSYSCYDTRLKLPDNCEKEKVKAELKDGVLYITIPKTKIERTVIDVQIQ

SEQ ID NO: 21715 - protein, 235 aa, Lycopersicon esculentum
MAYTSLTSSPLVSNVSVGGTSKINNNKVSAPCSVFVPSMRRPTTRLVARATGDNKDTSVDVHHSSAQGGNNQGTAVERRPTRMALDVSPFGVLDPMSPMRTMRQMIDTMDRLFEDTMTFPGRNRASGTGEIRTPWDIHDDENEIKMRFDMPGLSKEDVKVSVENDMLVIKGEHKKEEDGRDKHSWGRNYSSYDTRLSLPDNVVKDKIKAELKNGVLFISIPKTEVEKKVIDVQIN

SEQ ID NO: 21716 - protein, 234 aa, Lycopersicon esculentum
MAYTSLTSSPLVSNVSVGGTSKINNNKVSAPCSVFVPSMRRPTTRLVARATGDNKDTSVDVHHSSAQGGNNQGTAVERRPTRMALDVSPFGVLDPMSPMRTMRQMIDTMDRLFEDTMIPGRNRASGTGEIRTPWDIHDDENEIKMRFDMPGLSKEDVKVSVENDMLVIKGEHKKEEDGRDKHSWGRNYSSYDTRLSLPDNVVKDKIKAELKNGVLFISIPKTEVEKKVIDVQIN

SEQ ID NO: 21717 - protein, 205 aa, Nicotiana sylvestris
LTCSAASPLSNVVNVSAASSRSNNRVTAPCSVFFPSACNVKRPASRLVAQATGDNKDTSVDVHVSSGQGGNNNQGSTSVQRRPRKMALDVSTFGLLDPMSPMRTMRQMMDTMDRLFEDTMTFPGSNRASTGEIRAPWDIKDDENEIKMRFDMPGLSKEDVKVSVENDVLVIKGEHKKEESGDDNSWGRNYSSYDTRLSLPDNVEK

SEQ ID NO: 21718 - protein, 240 aa, Nicotiana tabacum
MACKTLTCSAASPLVVNGVTASSRSNNRVAAPFSVFFPSTCNVKRPASRLVVEATGDNKDTSVDVHVSSGQGGNNNQGSTSVDRRPRKMSLDVSPFGLLDPMSPMRTMRQMMDTMDRLLEDTMTFPGRNRSSAVGEIRAPWDIKDDENEIKMRFDMPGLSKDEVKVSVEDDLLVIKGEYKKEETGDDNSWGRNYSSYDTRLSLPDNVEKDKIKAELKNGVLFISIPKTKVEKKVIDVQIN

SEQ ID NO: 21719 - protein, 204 aa, Nicotiana tabacum
LTCSAASPLVVNGVTASSRSNNRVAAPFSVFFPSTCNVKRPASRLVVEATGDNKDTSVDVHVSSGQGGNNNQGSTSVDRRPRKMSLDVSPFGLLDPMSPMRTMRQMMDTMDRLLEDTMTFPGRNRSSAVGEIRAPWDIKDDENEIKMRFDMPGLSKDEVKVSVEDDLLVIKGEYKKEETGDDNSWGRNYSSYDTRLSLPDNVEK

SEQ ID NO: 21720 - protein, 241 aa, Petunia x hybrida
MACKTLTCSASPLVSNGVVSATSRTNNKKTTTAPFSVCFPYSKCSVRKPASRLVAQATGDNKDTSVDVHVSNNNQGGNNQGSAVERRPRRMALDVSPFGLLDPMSPMRTMRQMMDTMDRLFEDTMTFPGSRNRGTGEIRAPWDIKDDENEIKMRFDMPGLSKEEVKVSVEDDVLVIKGEHKKEESGKDDSWGRNYSSYDTRLSLPDNVDKDKVKAELKNGVLLISIPKTKVEKKVTDVEIK

SEQ ID NO: 21721 - protein, 244 aa, Hordeum vulgare
MAAATAPFALVSRLSPAARLPIRAWRAARPAPLWTGRTRPLSVASAAQENTDSSVDVQVSQDRNAGNQQGNAVQRRPRRAAGFDISPFGLVDPMSPMRTMKQMLDTMDRLFDDAVGFPTAGRSPAAAAGEMPRMPWDIMEDDKEVKMRFDMPGLSREEVKVMVEDDALVIRGEHKKEAGEGQGEAAGGGDGWWKERSVSSYDMRLALPDECDKSQVRAELKNGVLLVSVPKRETERKVIDVQVQ

SEQ ID NO: 21722 - protein, 243 aa, Hordeum vulgare
MAAATAPFALVSRLSQAARLPIRAWRAARPAPLWTGRTRPLSVASAAQEDRDNSVDVQVSQARNAGNQQGNAVQRRPRRAGFDISPFGLVDPMSPMRTMKQMSDTMDRLFDDAVGFPTARRSPAAAAGEMPRMPWDIMEDDKEVKMRFDMPGLSREEVKVMVEDDALVIRGEHKKEAGEGQGEAAGGGDGWWKERSVSSYDMRLALPDECDKSQVRAELKNGVLLVSVPKRETERKVIDVQVQ

SEQ ID NO: 21723 - protein, 239 aa, Oryza sativa
MAAPFALVSRVSPAARLPIRAAWRSEPTVGLPSSGRARQLAVASAAQENRDNTAVDVHVNQDGGNQQGNAVQRRPRRSSAFGRHLPFGLVDPMSPMRTMRQMLDTMDRMFDDVALGFPATPRRSLATGEVRMPWDVMEDDKEVRMRFDMPGLSREEVKVMVEDDALVIRGEHKKEEGEGAEGSGDGWWKERSVSSYDMRLALPDECDKSKVRAELKNGVLLVTVPKTEVERKVIDVQVQ

SEQ ID NO: 21724 - protein, 241 aa, Oryza sativa
  unsure (1)..(241): unsure at all Xaa locations
MAAPFALVSRVSPAARLPIRAAWRRARPTVGLPSSGRARQLAVASAAQENRDNTAVDVHVNQDGGNQQGNAVQRRPXRRSSAFGRHLPFGLVDPMSPMRTMRQMLDTMDRMFDDVALGFPATPRRSLATGEVRMPWDVMEDDKEVRMRFDMPGLSREEVKVMVEDDALVIRGEHKKEEGEGAEGSGDGWWKERSVSSYDMRLALPDECDKSKVRAELKNGVLLVTVPKTEVERKVIDVQVQ

SEQ ID NO: 21725 - protein, 205 aa, Oryza sativa
  unsure (1)..(205): unsure at all Xaa locations
TVGPFALVTRVSPVACLPIRAAWRSXXSGNXNGGNQQGNVVQRAXSALNNISPFALVDLXSPMRLIRXMLDMIDXMFNNVTLGFPVALWRSPATGKVRICWDIMDDDKRGEIRFDMLGLSREDVKVMVEDNMLVIRGEHSKXGEGTGGSDDGWWKERSMSSYNMRLVLPNVGDKSKVRAELKNGVLFVIVPKTEVKHKVIEGAEQ

SEQ ID NO: 21726 - protein, 227 aa, Oryza sativa
  unsure (1)..(227): unsure at all Xaa locations
MVDATSPTISISMLLISSLFGSATVGPFALVTRVSPVACLPIRAAWRSXXSGNXNGGNQQGNVVQRAXSALNNISPFALVDLXSPMRLIRXMLDMIDXMFNNVTLGFPVALWRSPATGKVRICWDIMDDDKRGEIRFDMLGLSREDVKERSMSSYNMRLVLPNVGDKSKVRAELKNGVLFVIVPKTEVKHKVIEGAEQRGEGREEDGRKKVEDRKGRRWMKNVMAVA

SEQ ID NO: 21727 - protein, 150 aa, Pennisetum glaucum
MSLVRRGNVFDPFSMDLWDPFDNMFRSIVPSSSSSDTAAFANARIDWKETPEVHVFKADLPGVKKEEVKVEVEDGNVLVISGQRSKEKEDKNDRWHRVERSSGQFVRRFRLPEDAKTDQVNAGLENGVLTVTVPKAEGKKPEVKAIEISG

SEQ ID NO: 21728 - protein, 238 aa, Triticum aestivum
MAAANAPFALVSRLSPAARLPIRAWRAARPAPLSTGGRTRPLSVASAAQENRDNSVDVQVSQAQNAGNQQGNAVQRRPRRAGFDISPFGLVDPMSPMRTMRQMLDTMDRLFDDAVGFPTRRSPAARARRRMPWDIMEDEKEVKMRFDMPGLSREEVRVMVEDDALVIRGEHKKEAGEGQGEGGDGWWKERSVSSYDMRLALPDECDKSQVRAELKNGVLLVSVPKRETERKVIDVQVQ

SEQ ID NO: 21729 - protein, 240 aa, Triticum aestivum
MAAANAPFALVSRLSPAARLPIRAWRAARPAPLSTGGRTRPLSVASAAQENRDNSVDVQVSQAQNAGNQQGNAVQRRPRRAGFDISPFGLVDPMSPMRTMRQMLDTMDRLFDDAVGFPTARRSPAAASETPRMPWDIMEDEKEVKMRFDMPGLSREEVRVMVEDDALVIRGEHKKEAGEGQGEGGDGWWKERSVSSYDMRLALPDECDKSQVRAELKNGVLLVSVPKRETERKVIDVQVQ

SEQ ID NO: 21730 - protein, 240 aa, Triticum aestivum; identical to SEQ ID NO: 21729

SEQ ID NO: 21731 - protein, 243 aa, Triticum aestivum
MADANAPFALVSRLSPAARLPIRAWRAARPAPLSTGGRTRPLSVASAAQENRDNSVDVQVSQAQNAGNQQGNAVQRRPRRAGFDISPFGLVDPMSPMRTMRQMLDTMDRLFDDAVGFPTARRSLAAASEMPRMPWDIMEDDKEVKMRFDMPGLSREEVKVMVEGDALVIRGEHKKEAGEGQGEAAEGGDGWWKERSVSSYDMRLALPDECDKSQVRAELKNGVLLVSVPKRETERKVIDVKVQ

SEQ ID NO: 21732 - protein, 243 aa, Triticum aestivum; identical to SEQ ID NO: 21731

SEQ ID NO: 21733 - protein, 243 aa, Triticum aestivum
MAAANAPFALVSRLSPAARLPIRAWRAARPAPLSTGGRTRPLSVASAAQENRDNSVDVHVSQAQDAGNQQGNAVQRRPRRAGFDISPFGLVDPMSPMRTMRQMLDTMDRLFDDAVGFPTARRSPAAASETPRMPWDIMEDDKEVKMRFDMPGLSREEVRVMVEGDALVIRGEHKKEAGEGQGEAAEGGDGWWKERSVSSYDMRLALPDECDKSQVRAELKNGVLLVSVPKRETERKVIDVQVQ

SEQ ID NO: 21734 - protein, 238 aa, Triticum aestivum
MAAANAPFALSRLSPAARLPFRAWRAARPAPVWTGRTRPLSVASAAQENRDNSVDVQVSQAQNAGNQQGNAVQRRPRRAGFDISPFGLVDPMSPMRTMRQMLDTMDRLFDDAVGFPTARRSPAAASETPRMPWDIMEDEKEVKMRFDMPGLSREEVRVMVEDDALVIRGEHKKEAGEGQGEGGDGWWKERSLSSYDMRLALPDECDKSQVRAELKNGVLLVSVPKRETERKVIDVQVQ

SEQ ID NO: 21735 - protein, 238 aa, Triticum aestivum; identical to SEQ ID NO: 21734

SEQ ID NO: 21736 - protein, 238 aa, Triticum aestivum
MAAANAPFALSRLSPAARLPIRAWRAARPAPVWTGRTRPLSVASAAQENRDNSVDVQVSQAQNGGNQQGNAVQRRPRRAGFDISPFGLVDPMSPMRTMRQMLDTMDRLFDDAVGFPTARRSPAAASEMPRMPWDIMEDDKEVKMRFDMPGLSRKEVKVMVEGDALVIRGEHKKEAGEGQVEGGDGWWKERSVSSYDMRLALPDECDKSQVRAELKNGVLLVSVPKRETERKVIDVQVQ

SEQ ID NO: 21737 - protein, 238 aa, Triticum aestivum; identical to SEQ ID NO: 21736

SEQ ID NO: 21738 - protein, 237 aa, Triticum aestivum
MAAANAPFALSRLSPAARLPFRAWRAARPAPVWTGRTRPLSVASAAQENRDNSVDVQVSQAQNAGNQQGNAVQRRPRRAGFDISPFGLVDPMSPMRTMRQMLDTMDRLFDDAVGFPTARSPARRAKTPRMPWDIMEDEKEVKMRFDMPGLSREEVRVMVEDDALVIRGEHKKEAGEGQGEGGDGWWKERSLSSYDMRLALPDECDKSQVRAELKNGVLLVSVPKRETERKVIDVQVQ

SEQ ID NO: 21739 - protein, 237 aa, Triticum aestivum; identical to SEQ ID NO: 21738

SEQ ID NO: 21740 - protein, 241 aa, Triticum aestivum
MAAANAPFALSRLSPAARLPIRAWRAARPAPLSTGRTRPLPPVAPAEEKRDNSVDVQVSQAQNAGNQQGNAVQRRPRRAGFDISPFGLVDPMASATTTMRQMLDMDRLFEDAVGFPAARRPLAAGNEMPRMSWVMMEDEKEVMRRFELPLLSREEVMVVVEGDALVIRGEHKKEAGEGQGEAAEGGDGWWKERSVSSYDMRLALPDECDKSQVRAELKNGVLLVSVPKRETERKVIDVKVQ

SEQ ID NO: 21741 - protein, 158 aa, Retama raetam
MSLIPSVFGTGRRTNVFDPFSLDIWDPFQDFPLRTIAPSGFDTETAAVANTRIDWKETPEAHVFKADLPGLKKEEVKVEVEEGRVLQISGERTKEKEDKNDTWHRVECSAGRFLRRFRLPENAKVEQVKASLENGVLTVTVPKEEVKKPDVKPVQITG

SEQ ID NO: 21742 - protein, 243 aa, Agrostis stolonifera var. palustris
MAAANAPFALVSRLSSPAARLPIRAWRAASPAPLGAGRARPLTTASASQDNRDNSVDVQVSQNGGGNQQGNAVQRRPRRTGFDVAPFGLVDPMSPMRTMRQMLDTMDRLFDDAVGFPTTRRSPAAASEAPRMPWDIVEDDKEVKMRFDMPGLSRDEVKVMVEDDTLVIRGEHKKEVSEGQGDGAEGQGDGWWKERSVSSYDMRLALPDECDKSQVRAELKNGVLLVSVPKTETERKVIDVQVQ

SEQ ID NO: 21743 - protein, 243 aa, Agrostis stolonifera var. palustris
MAAANAPFALVSRLSSPAARLPIRAWRAARPAPLGAGRARPLTTASASQDNRDNSVDVQVSQNGGGNQQGNAVQRRPRRAGFDVAPFGLVDPMSPMRTMRQMLDTMDRLFDDAVGFPTTRRSPAAASEAPRMPWDIVEDDKEVKMRFDMPGLSRDEVKVMVEDDTLVIRGEHKKEVSEGQGDGAEGQGDGWWKERSVSSYDMRLALPDECDKSQVRAELKNGVLLVSVPKTETERKVIDVQVQ

SEQ ID NO: 21744 - protein, 242 aa, Agrostis stolonifera var. palustris
MAAANAPFALVSRLSSPATRLPARAWRAARPAPVAAGRTRPLTTASASQENRDNSVDVQVSQNGGNQQGNAVQRRPRRAGFDISPFGLVDPMSPMRTMRQMLDTMDRLFDDTVGFPTTRRSPATASEVPRMPWDIMEDDKEVKMRFDMPGLSRDEVKVMVEDDTLVIRGEHKKEAGEGQGDGAEGQGDGWWKERSVSSYDMRLTLPDECDKSQVRAELKNGVLLVTVPKTETERKVIDVQVQ

SEQ ID NO: 21745 - protein, 235 aa, Agrostis stolonifera var. palustris
MAAANAPFALVSRLSSPATRLPARAWRAARPAPVAAGRTRPLTTASASQENRDNSVDVQVSQNGGNQQGNAVQRRPRRAGFDISPFGLVDPMSPMRTMRQMLDTMDRLFDDTVGFPTTRRSPATASEAPRMPWDIMEDDKEVKMRFDMPGLSRDEVKVMVEDDTLVIRGEHKKEAGEGQGDGWWKERSVSSYDMRLSLPDECDKSQVRAELKNGVLLVTVPKTETERKVIDVQVQ

SEQ ID NO: 21746 - protein, 233 aa, Agrostis stolonifera var. palustris
MAAANAPFALVSRLSSPATRLPARAWRAATQRRGAGRTRPLTTASASQENRDNSVDVQVSQNGGNQQGNAVQRRPRVPDLTSLRSGWWTRCHPCEPCGRCWTRWTGCSTTPWGSPRQPFSGDGERAPRMPWDIMEDDKEVKMRFDMPGLSRDEVKVMVEDDTLVIRGEHKKEVGEGQGDGWWKERSVSSYDMRLSLPDECDKSQVRAELKNGVLLVTVPKTETERKVIDVQVQ

SEQ ID NO: 21747 - protein, 67 aa, Agrostis stolonifera var. palustris
MAAANAPFVLVSRLSSPATRLPARAWRAARPAPVAAGRTRPLTTASASQENRDNSVDVQVSQNGGNQ

SEQ ID NO: 21748 - protein, 143 aa, Chloroflexus aurantiacus
MTNLTRWDPFREMTQLLDDTFFTGFTGVLPRNGSLVPALDLSETADAYHIEMAVPGMTADQLNITFENNVLTISGEITQSSDRKERQYHVTERRFGRFSRSIRLPNQIHPDRIEARLENGVLTVTVPKAEEIKPRKIAVNVAQ

SEQ ID NO: 21749 - protein, 145 aa, Thermoanaerobacter tengcongensis
MSLMRRGRDWWDWPFDINIRNLPSIFDINFPSLSGLFSRPRVDIVESETEIVATAELPGVDKKDIEINVYDNILEIKGQTSVDEEKEDKNYYIRERYYGSFARRIELPAEVDPERTTAKFENGILKITMPKLHPSKPKKRRIDIE

SEQ ID NO: 21750 - protein, 182 aa, Deinococcus radiodurans
MSAGGSTPELHSQEEQHMMRFDPFREIEELTQRMDRAFASGGAQTTRFAPPVDVHEDEQGLELTLDIPGVKPEDIQIEAENQTLTVQAERRYSRGEGRTAHRVERAYGTFTRTFSVPAKYDLTKVEADFDHGTLNLRVPRSEAAQKRSISVRSGGQLAQPKTVEAEQPEPTVQPSADTAATE

SEQ ID NO: 21751 - protein, 166 aa, Deinococcus radiodurans
MARDSLRAATCYPPAMSQSNNESGKPVLARLQQLMTLREEVETLAQGGPWTPAADWRDAGTHLDLLLDVPGVDAGTLALAEDGGQLTVSGERPGTEHLLRSERPSGRFVRELAFPEPVRPASGVASLAGGVLTVRFEKLRPTIDVTARPAPGDPEASTETSPDEDR

SEQ ID NO: 21752 - protein, 150 aa, Corylus avellana
MSIVPNNERERSVSNPSSRDLWDVFRSFRENHLQDPFSDLPFASTLSTLFPHSPFGSSVNTRLDWRETPRAHVLKASLPGFVDEDVLVELQDDRVLQVSVESGKFVSRFKVPDDAMLDQLKASMHNGVLTVTIPKAEASRPTVRTIEISG

SEQ ID NO: 21753 - protein, 145 aa, Bacillus subtilis
MSLVPYDPFRQLSNMRREFDRFFSELPISFDNEHGIGGIRVDVHETENEVVATCDLPGLEKKEDVDIDIQNNRLSISGSIKRTNEIKEENMLKKERYTGRFQRMITLPSPVSHDGVKATYKNGILEITMPKVAKDVKKKIDVSFQ

SEQ ID NO: 21754 - protein, 191 aa, Xylella fastidiosa Ann-1
MASPCLSVALKALCFRGASTHLSINRVRRLSMNVVRYTPWPGQAVLQNEIKQVFDRFFEHNGDTDESAVVTAQWVPRVDIKEEPNQFVLYADLPGIDPADIEVQMDKGILSIKGERKTESSSQTEHFSRIERRYGSFHRRFALPDSADADGITASGSHGVLRILIPKQAATTPRRIQVGNAVSSDVALQSM

SEQ ID NO: 21755 - protein, 146 aa, Magnetococcus sp. MC-1
MAALMEYDPFRNVRTLQNEINRLFDHNWEEPNGQMAKWPMRVDIREDENQIMIKADLPGMTQQDISVDVDNGTLTISGERKFDDEQNRDGYHRIERAYGRFSRSFQLPNTTDTGNIAAKYQNGVLEVTLPKLDEAKPRSIQVEVLN

SEQ ID NO: 21756 - protein, 231 aa, Pseudomonas putida KT2440
MTRIKPAGGRDFTLLIKIKWGAAPRRMIEASPWEALLIHSFEEGAMSDVAKKVPVTPVASQPTEGSPPSVEPSELWRPFQQLRRQIDSLFEDFGRRPMRMPFSHTPFDVEPFWRRDLFTHGMPAMDISELAEEYRISAELPGVDAKDIEIKLVNGNLLIRGEKKEEVDEKRKEYHLSERHYGSFERVFQLPRGVDAEKIDAQFDKGVLLVHLPKRAEAIHPEKVIPIKSGK

SEQ ID NO: 21757 - protein, 160 aa, Xylella fastidiosa 9a5c
MNVVRYTPWPGQAALQNEIKQVFDRFFEHNGDTDESAVVTAQWVPRVDIKEEPNQFVLYADLPGIDPADIEVQMDKGILSIKGERKTESSSQTEHFSRIERRYGSFHRRFALPDSADADGITASGSHGVLSIFIPKRAATTPRRIQVGNAVSNDVALQSM

SEQ ID NO: 21758 - protein, 160 aa, Xylella fastidiosa Temecula1
MNVVRYTPWPGQAALQNEIKQVFDRFFEHNGDTDESAVVTAQWVPRVDIKEEPNQFVLYADLPGIDPADIEVQMDKGILSIKGERKTESSSQTEHFSRIERRYGSFHRRFALPDSADADGITASGSHGVLRILIPKQAATTPRRIQVGNAVSSDVALQSM

SEQ ID NO: 21759 - protein, 140 aa, Magnetospirillum magnetotacticum
MLYPTYLRRSDPFALMRSMMRDLDRGFWPPARAAFPAVNVWQGPEAVGVTAELPGIEPGDIEISVKDNVLTLSGERKAPEVLDGARWHRNERSFGRFSRTIRLPFAASDDKVEARMTNGVLRIVISRPEEEKPKKIEGIL

SEQ ID NO: 21760 - protein, 125 aa, Magnetospirillum magnetotacticum
GENPRVGQFEWPWGSGEAKSDMVETDNAIEVSIELPGMEMKDIEVTVNDDMLTVKGEKKIERQVEKKGYYLSERSYGAIYRTIPLPPGVDGEKAQASFKNGVLTIKLPQTPEAQAKIKRIDVKNG

SEQ ID NO: 21761 - protein, 158 aa, Xanthomonas campestris pv. campestris str. ATCC 33913
MNIVRYPQWPTHALQNEIKQVFDRFFEQSGDTDESAVVTAQWVPRVDIKEEANQFVLYADLPGIDPSQIEVQMDKGILSIKGERKSESSSETERFSRIERRYGSFHRRFALPDSADADGITADGRNGVLEIRIPKRPAATPRRIQVGGGQDGGGTTVQ

SEQ ID NO: 21762 - protein, 158 aa, Xanthomonas axonopodis pv. citri str. 306
MNIVRYPQFPTHALQNEIKHVFDRFFEQNGDTDESAVVTAQWVPRVDIKEEVNHFVLYADLPGIDPSQIEVQMDKGILSIRGERKSESSTETERFSRIERRYGSFHRRFALPDSADADGITAAGRNGVLEIRIPKRPAATPRRIQVGNGQNTSGSTVQ

SEQ ID NO: 21763 - protein, 132 aa, Chlorobium tepidum TLS
MLMKIAKDPMRLFDDIWSGSQMAVAPSFKVDISEDENAYHLDAELPGIAKEQIALNIEDDVLTIKAERTHKEEEKKKNYHRVERTYGSFSRSFNIGEIIDQEHIGATYDNGVLHVTLPKTQPAKKTKEIPIN

SEQ ID NO: 21764 - protein, 220 aa, Thermobifida fusca
MLSTSRLQLGLVGRPAPPPPVTRNTLNKVEFMGLKFGDDHRRKAARPPHLNPPPPGGHQRVRGGTDMALPVVRSSQPTTGWDPFRELNELHTQLHRWMDSVLERTSGLTADPLSWSPLADLSETEDAYLVEVEVPGVSREDISIDLSGTELVITGERKEREREGWFRHRTRSVGRFHYAVTLPRDIDPDGVDATLSQGVLTVRIPKSKALKPRRIAITER

SEQ ID NO: 21765 - protein, 145 aa, Clostridium thermocellum ATCC 27405
MICMSLISWNPFREVDSISRDMETFFERSPFGFFSRATAPRVDVFETEKDVVVKAEIPGVSKEDLNVYVDENSIRLSGETKRDTEYKNEHIYRTERYYGSFSRTIPLPVEVKSEQAKAEYKDGILTVTVPKVETTQMKGKKIDIH

SEQ ID NO: 21766 - protein, 202 aa, Desulfovibrio desulfuricans G20
MSESLQFFFWRCDMDIDFKKLAPWNWFKKEQEEQQSTASLPMQRNDLPVAGGPVSPILQLHREIDRLFDDAFRGFGFPALAMPRWPSDWPGLLKPALDIQETDKLYKISLEVPGVEEKDIQITLDNDVLLVRGEKRQEQETKDGGFHRVERSYGSFQRALNLPADANQDTIKAAFKNGVLTITMEKREACAPKQGRSIPING

SEQ ID NO: 21767 - protein, 142 aa, Desulfovibrio desulfuricans G20
MVDSMFSGFGMPSPRRLFDAASPMLGKSVIKPKVDIYGTDKEYVVEVDLPGIEEKDLSVELKDDVLILSAEKKHEEKTEEKGYYRVERSYGSFRRVLNVPDDADKEGINAKLNKGVLRITMPRNKAIETESRKIAIESSKED

SEQ ID NO: 21768 - protein, 154 aa, Castanea sativa
MALSLFGGRRSNVFDPFSLDIWDPFEGFSAVANVPPSARETTAFATARIDWKETPEAHIFKADLPGLKKEEVKVEVEDGNVLQISGERSKEHEEKNDKWHRVERSCGKFLRRFRLPENAKVEQVKANMENGVLTVIVPKEEQKKTEVKSIEISG

SEQ ID NO: 21769 - protein, 175 aa, Bradyrhizobium japonicum USDA 110
MANETKLPVTKKTNEPAFGGETWRPFEALRKEVDRLFEDFGTDDFWRRPFRSLAGFERNLAQKLVSTPAVDVTESDKAYEITAELPGMDEKDIEVNVANDGLTIKGEKKFEREEKQKDYYVSERRYGSFERHFGLPKDVEADKIEASFRNGVLKVTLPKTAEAQKPAKKIEVKAA

SEQ ID NO: 21770 - protein, 173 aa, Bradyrhizobium japonicum USDA 110
MATETKLPVTKSPTAPAVAGETWRPFQALRNEIDQIFDDFGNGFWNRPFRSLARLERDFSKSISAPAVDVAESDKAYEITAELPGLDEKNIDIKVANGGLTIKGEKREETEEKNKDYYVSERRYGTFERYFTLPESVNADKIEATFKNGVLKVVLPKTEEAQKPAKTINVKAA

SEQ ID NO: 21771 - protein, 166 aa, Bradyrhizobium japonicum USDA 110
MGIKDLIPWNNGGREVGIHRGADVNPFLTLHREMNRMFDEVFRGFDLAPFGSSRGLSGLGWPQIDIDETDKEVRITAELPGLEEKDVSLEIANGVLSISGEKKSESEDKARRFSERYYGRFERRIPLEGIDEDKVSAAFKNGVLTITVPKSAEAKNVRRIAINRNG

SEQ ID NO: 21772 - protein, 163 aa, Bradyrhizobium japonicum USDA 110
MALRELIPWNNGSRNLPARRTEVDNPFLSLHREMNRLFDDVFRGVDIGQFAPPATMGWPSVEFNETDKEVKVIAELPGIEQKDVEVELADGVLTISGEKKSETKDKERRFSERYYGRFERRIPVDDVDQDKVAASFKDGILTVTLPKSPTEQRKVKRIAINGK

SEQ ID NO: 21773 - protein, 119 aa, Bacteroides thetaiotaomicron VPI-5482
MVKANATAPAINVFETEKEYKVELAAPGMTKEDFNVRIDEDNNLVISMEKKTENKEEKKEGRYLRREFSYSKFQQTMILPDNVDKEKISAAVENGVLSVQLPKISEEEVKKAEKQIEVK

SEQ ID NO: 21774 - protein, 151 aa, Coxiella burnetii RSA 493
MAKAVQKYPHSMLSHLQQDINRLFEPFGWATGGELWDAFSSEWSPHIDIKDEGQNYLICADIPGVDPKKIQVSMENNILTIKGERETEAKEKSEGYLRIERTKGAFLRQFTLPESVDAESIKAKSKHGVLEITIPKAQPPRTKKIEIEEQE

SEQ ID NO: 21775 - protein, 144 aa, Nitrosomonas europaea ATCC 19718
MAITRYEPWGLLTQLQRELERARDDMATEGASAIAEWAPAVDIKEESDKFIVHADLPGVKPEAIDVTTENGVLTIKGEKQTEARTEKEGYKRVERTHGSFYRRFSLPDTADLGAISAVTKDGVLVVTIPKREAVQPKKVSVTAQ

SEQ ID NO: 21776 - protein, 147 aa, Thermotoga maritima
MLLGRREDIFRPFRELQREIDRLFDDFFRTEVRPAKEFFAPDMDVYETDDEVVIEVEIPGIDRKDVKITVEENILKISGEKKLEREQKGKNYYYVERSAGKFERAIRLPDYVDVEKIKAEYKNGVLTIRVPKKEERKKKVIEVEVQE

SEQ ID NO: 21777 - protein, 142 aa, Thermotoga maritima
MLLGRREDIFRPFRELQREIDRLFDDFFRTEVRPAPDMDVFETDDEVVIEVEIPGIDRKDVQITVEENILKISGEKKLEREQKGKNYYYVERSAGKFERAIRLPDYVDVEKIKAEYKNGVLTIRVPKKEERKKKVIEVEVQE

SEQ ID NO: 21778 - protein, 147 aa, Geobacter metallireducens
MAIVKYTPFGDLRNLQEQMNRLLDMAWSRESGEELREGVWQPPVDIFEDENGVVIKAELPGIDQKDIEVKIEDNTLTIRGERKHDQEVKKENYHRVERYYGSFMRSFSLPTTIDRDTVKAVCDKGILTITLPRREETKPKQINVEVK

SEQ ID NO: 21779 - protein, 153 aa, Funaria hygrometrica
MALSLFGGRGSSILDPFEFGSVWDPFSVLENGPSRRFASDAHAVANTRIDWRETPEAHVFKADLPGLKKEEVKVQVVEGRTLEISGERKKEEVQKGDTWHRVERAQGSFMRRFRLPEGTNVDEVKAQVQDGVLTVTIPKLQKPKPQVRQIEIA

SEQ ID NO: 21780 - protein, 153 aa, Funaria hygrometrica
MALSLFGGRGNSVFDPFEFGSVWDPFTVLESGPSRQLASDVQAVASTRIDWRETPEAHIFKADLPGLTKEEVKVQVLEGRTLEICGERKKEEVQKSDTWHRMERAQGSFMRRFRLPEGTNTDDVKAQVQDGVLTVTVPKVQKPKPQVRQIEIA

SEQ ID NO: 21781 - protein, 96 aa, Ginkgo biloba
LDMPGLKSNDIKVQVENENVLNITGERRRDEKADADAKYIRMERRVGKFMRQFTLPSDANLEGISATCYDGVLTVTVPKIPPPEPKKPKTIEVIAS

SEQ ID NO: 21782 - protein, 151 aa, Picea abies
MAMDPLLSTVQQLLGVPDDLERILHAPTRSYMRDTEATASTPVDVKEYPNSYVFIVDMPGLKSNDIKVQVEDENVLNISGERKRNEKEEGEVKYIRMERRVAKFMRKFSLPADCNLEAISAACQDGVLTVTVPKLPPPEPKKPKTIAVKIG

SEQ ID NO: 21783 - protein, 151 aa, Picea abies
MAMDPLLSTVQQLLGVPDDLERILHAPTRSYMRDTEATASTPVDVKEYPNSYVFIVDMPGLKSNDIKVQVEDENVLNISGERKRNEKEEGAVKYIRMERRVAKFMRKFTLPADCNLEAISAACQDGVLTVTVPKLPPPEPKKPKTIAVKIG

SEQ ID NO: 21784 - protein, 151 aa, Picea glauca
MAMDPLLNTVQQLLVVPDDLERILHAPTRSYMRDTEATASTPVDVKEYPNSYVFIVDMPGLKSNDIKVQVEDENILNISGERKRNEKEEGEVKYIRMERRVGKFMRKFSLPADCNLEAISAACQDGVLTVTVPKLPPPEPKKPKTIAVQIG

SEQ ID NO: 21785 - protein, 151 aa, Picea glauca
MAMDPLLSTVQQLLGVPDDLERILHAPTRSYTRDTEATASTPVDVKEYPNSYVFIVDMPGLKSNDIKVQVEDENVLNISGERKRNEKEEGEVKYIRMERRVAKFMRKFSLPADCNLEAISAACQDGVLTVTVPKLPPPEPKKPKTIAVKIG

SEQ ID NO: 21786 - protein, 152 aa, Picea glauca
MAMDPSLITVQHLLGVPDDLEKLLNAPTHSYMRDTKAMASTPVDVKEYPNSYVFIIDMPGLKSNDIKVQVEDENVLNISGERKRNEKDEEGEVKYIRMERRVGKFMRKFTLPADCNLEAISAACQDGVLTVTVPKLPPPEPKKPKTIEVKIG

SEQ ID NO: 21787 - protein, 161 aa, Pseudotsuga menziesii
MSIIPSFFGRRSSSAFDPFSLDVWDPFRAFTDLAAGGPSGQFVNEASAVANTQIDWKETPEAHIFKADLPGLKKEEVKIELEEGQRILQISGERSKEEEQKNDKWHRIERSHGKFLRRFRLPDNAKVEEIKAAMENGVLTVTVPKEPEPQPPQPKSIEISG

SEQ ID NO: 21788 - protein, 161 aa, Pseudotsuga menziesii
MSIIPSFFGRRSSSAFDPFSLDVWDPFRAFTDLSGGGPSGQFVNEASAVANTQIDWKETPEAHIFKADLPGLKKEEVKIELEEGQRILQISGERSKEEEQKNDKWHRIERSRGKFLRRFRLPDNAKVEEIKAAMENGVLTVTVPKQPEPQPPQPKSIEISG

SEQ ID NO: 21789 - protein, 161 aa, Pseudotsuga menziesii
MSIIPSFFGRRSSSAFDPFSLDVWDPFRAFTDLAAGGPSGQFVNEASAIANTQIDWKETPEAHIFKADLPGLKKEEVKIELEEGQRILQISGERSKEEEQKNNKWHRIERSRGKFLRRFRLPDNAKVEEIKAAMENGVLTVTVPKQPEPQPPQPKSIEISG

SEQ ID NO: 21790 - protein, 161 aa, Lilium sp.
FLRSISMGSKLTREEYNTLLAAFHKLMVRLEVASVPKDATPADIKNLPDAYLYFIDMPGVRTGEIKVEVEDDSDLVISGGRKREEEEKYQIMERWTGRRMRKFELPKNADTKAVSAVWKNGVLAVTVGKLLAWEVAGLFFNIERLPVPLPTKTKSIEVKIA

SEQ ID NO: 21791 - protein, 210 aa, Papaver somniferum
MSIIPSFFSNQRSNVFDPFSLDIWDPFQGFPFSTGALTANWQGGSDTARETSQLANTRIDWKETPEAHVFRADLPGVTKEEVKVEVEEGRVLQISGERRSRESEEKNDKWHRVERSSGKFLRRFRLPENTKMDEVKATMENGVLTVCVPKVEQRRPEVKSIEISGASEGSTQVPMETPVLRLHKTRLLRDVAMTGNLQASYVVSCLVLFS

SEQ ID NO: 21792 - protein, 248 aa, Azotobacter vinelandii
MAREYYPFHAERWPAFRRLPWAGNRIRPVMCLTEMRLNFPFPSNHMEEIIMAQANQNVPVNRERQSQRPAASSGDLWRPLTSLRQQIDHLFEDFDRISPFWPMGRSAFGSLMEPFGRAGREMASMPAVDIVDQDKAILISAELPGMDEQNIELKVCNGNLMLKGEKREEREENSQGLYLSERSYGAFQRSFALPDSVDADNIEAHFDKGVLTITLPKRPEAQQSERAIEIRRGEAAAQQQDTTQATTH

SEQ ID NO: 21793 - protein, 155 aa, Ipomoea nil
MDLRLMGFDHPLFHHIMDYAGDDKSSNSSAPSRTFMLDAKAMAATPADVKEYPNSYVFIIDMPGLKSGDIKVQVDGDNVLSISGERKREAEEKEGAKYVRMERRVGKLMRKFVLPENANKEKITAVCQDGVLTVTVENVPPPEPKKPRTIEVKIG

SEQ ID NO: 21794 - protein, 167 aa, Ipomoea nil
MDLRNFGLSNFGLEPQLLSTIQDMLDFADDHDRAGRAPPEQPIRAYVRDAKAMAATPADVKEYPNSYVFIADMPGVKAAEIKVQVEDDNVLVVSGERTEREKDEKDGVKYLRMERRVGKFMRKFVLPENANVEAINAVYQDGVLQVTVEKLPPPEPKKPKTVEVKVA

SEQ ID NO: 21795 - protein, 195 aa, Arabidopsis thaliana
MMKHLLSIFFIGALLLGNIKTSEGSLSSALETTPGSLLSDLWLDRFPDPFKILERIPLGLERDTSVALSPARVDWKETAEGHEIMLDIPGLKKDEVKIEVEENGVLRVSGERKREEEKKGDQWHRVERSYGKFWRQFKLPDNVDMESVKAKLENGVLTINLTKLSPEKVKGPRVVNIAAEEDQTAKISSSESKEL

SEQ ID NO: 21796 - protein, 157 aa, Brassica oleracea
MSLIPSFFGGRRTNVFDPFSLDLYDPFEGFLTPSGMTNTTSKDVAAFTNAKVDWRETAEAHVFKADLPGLKKEEVKVEVEDGNILKISGERSSENEEKSDKWHRVERSSGKFMRRFKLPENAKVDEVKASMENGVLSVTVPKMPERKPEVKSMDISG

SEQ ID NO: 21797 - protein, 156 aa, Fragaria x ananassa
MALSLFGNSRRSNVFDPFSLDTWDPFQGFGPLMNSSSTAGDTSAFAQTRIDWKETPEAHVFKADLPGLKKEEVKVELEEGNVLQISGERSKEQEEKNDKWHRVERSSGKFVRRFRLPDNAKVDQVKAAMENGVLTVTVPKAPEPKPQVKSIDISGA

SEQ ID NO: 21798 - protein, 156 aa, Prunus dulcis
MDVRIAGLDSPLFSTLQHIMDFTDEPDKSFNAPTRTYVRDAKAMASTPADVKEYPNSYVFVVDMPGLKSGDIKVQVEDDNVLLITGERKREEEKEGAKYVRMERRVGKFMRKFVLPENANVEAISAVCQDGVLTVTVEKLPPPEPKKSKTIEVKIA

SEQ ID NO: 21799 - protein, 165 aa, Mesorhizobium loti
MGDEERRWPCSRKSEGVAGRLSEDETMIARMLFGADPYRNMRRLQDEVSRLEFPAVNAFVNQDGVIITAELPGVRSEDLDILIHRDSVTLSGERQAEAEDARRGYHRRERRQGRFVRTVSLPFLVDPNNVGANLINGLLTLGLPRAEEDKPKRIHVNASKEARHG

SEQ ID NO: 21800 - protein, 175 aa, Sinorhizobium meliloti
MAEPATKLPIKSEEKGVERRAESWLPFESLRSEIDRLFDDFAPSLWHRPLASALMRRVPRLSELDVAPAVDLAETEKTYEITCELPGMEEKDIEVAISNGTLTIRGEKQEEKKENKKEYVLSERRYGSFQRTFRMPDGVDTEKIAAKFSKSVLSITLPKTPEAQQNERKIQIKVT

SEQ ID NO: 21801 - protein, 192 aa, Glycine max
MRLQQLNLFFLLLCVAKANGSLLPFMDPPITLLADLWSDRFPDPFRVLEHIPFGVDKDEASMAMSPARVDWKETPEGHVIMLDVPGLKREEIKVEVEENRVLRVSGERKKEEEKKGDHWHRVERSYGKFWRQFRLPQNVDLDSVKAKLENGVLTLTLDKLSPGKIKGPRVVSIAGEDHQQGNLNNDGAKQEL

SEQ ID NO: 21802 - protein, 192 aa, Glycine max; identical to SEQ ID NO: 21801

SEQ ID NO: 21803 - protein, 197 aa, Glycine max
MRHFLVLVPLILLVFAGFPSKAKGSLLPFTNHPNTLLADLWSNHFPDPFRVLEQIPFGVDKDETFTALSSHARVDWKETPEGHVIMLDVPGLKRDEIKIEVEGNRVLRVSGERKREEEKEGDHWHRVERSYGKSWRQFKVPDNVDLDSVKAKMENGVLTLTMNKLSPDKVKGPRLVSIAGDDEQAPKLKGNEDKQEL

SEQ ID NO: 21804 - protein, 197 aa, Glycine max
MRHFLVLVPLILLVFAGFPSKAKGSLLPFTNHPNTLLADLWSNHFPDPFRVLEQIPFGVDKDETFTALSSHARVDWKETPEGHVIMLDVRGLKRDEIKIEVEGNRVLRVSGERKREEEKEGDHWHRVERSYGKSWRQFKVPDNVDLDSVKAKMENGVLTLTMNKLSPDKVKGPRLVSIAGDDEQAPKLKGNEDKQEL

SEQ ID NO: 21805 - protein, 197 aa, Glycine max; identical to SEQ ID NO: 21804

SEQ ID NO: 21806 - protein, 75 aa, Phaseolus vulgaris
RVLQISGQRTKEKEDKNEKWHRVERSSGSFLRRFRLPENAKVNEVKAAMETGVLTVTVPKEEVKKRDVKPVQITG

SEQ ID NO: 21807 - protein, 197 aa, Pisum sativum
MSLKPLNMLLVPFLLLILAADFPLKAKGSLLPFIDSPNTLLSDLWSDRFPDPFRVLEQIPYGVEKHEPSITLSHARVDWKETPEGHVIMVDVPGLKKDDIKIEVEENRVLRVSGERKKEEDKKGDHWHRVERSYGKFWRQFKLPQNVDLDSVKAKMENGVLTLTLHKLSHDKIKGPRMVSIVEEDDKPSKIVNDELK

SEQ ID NO: 21808 - protein, 197 aa, Pisum sativum
MSLKPLNMLLVPFLLLILAADFPLKAKASLLPFIDSPNTLLSDLWSDRFPDPFRVLEQIPYGVEKHEPSITLSHARVDWKETPEGHVIMVDVPGLKKDDIKIEVEENRVLRVSGERKKEEDKKGDHWHRVERSYGKFWRQFKLPQNVDLDSVKAKMENGVLTLTLHKLSHDKIKGPRMVSIVEEDDKPSKIVNDELK

SEQ ID NO: 21809 - protein, 157 aa, Daucus carota
MSIIPSFFGGRRSNVFDPFSLDVWDPFKDFPLVTSSASEFGKETAAFVNTHIDWKETPQAHVFKADLPGLKKEEVKVELEEGKVLQISGERNKEKEEKNDKWHRVERSSGKFLRRFRLPENAKVDEVKAAMANGVLTVTVPKVEIKKPEVKAIDISG

SEQ ID NO: 21810 - protein, 157 aa, Daucus carota
MSIIPSFFGGRRSNVFDPFSLDVWDPFKDFPLVTSSASEFGKETAAFVNTHIDWKETPQAHVFKADLPGLKKEEVKVELEEGKVLQISGERNKEKEEKNDKWHRVERSSGKFLRRFRLPENAKVDEVKAAMANGVVTVTVPKVEIKKPEVKAIDISG

SEQ ID NO: 21811 - protein, 159 aa, Daucus carota
MSIIPSFFGSRRSNVLNPFSLDIWDPFQDYPLITSSGTSSEFGKETAAFANTHIDWKETPQAHVFKADLPGLKKEEVKVEVEEGKVLQISGERNKEKEEKNNKWHRVEFSSGKFLRRFRLPENANVDEVKAGMENGVLTVTVPKVEMKKPEVKSIHISG

SEQ ID NO: 21812 - protein, 153 aa, Daucus carota
  unsure (1)..(153): unsure at all Xaa locations
DPKHLRRPQQRLRPLLPRHLRPLPRLPQRSLHRYRGRTERSHGTCNMRIDWKETPDDVFKADMPXLKKEEVKVEVEEGRVLQISGERSREQEEKNDKYHRVERSSGKFLRRFRLPENVKMEEVKACMENGVLTVTVRKWRRRSRNVKAIDISG

SEQ ID NO: 21813 - protein, 92 aa, Daucus carota
DLPGLKKEEVKVEVEEGKVLQISGERNKEKEEKNDKWHPLEVSSGKFLRRFRLPENANVDEVKAGMENGVLTVTVPKVEMKKPEVSVIDISG

SEQ ID NO: 21814 - protein, 158 aa, Petroselinum crispum
MDFRLMGFNHPLLNTLSPHCDEDNQDSSNKNKSEQARSYVRDAKAMATTPADVKEYPNSYVFVVDMPGLKSGDIKVQVEEDNVLVVSGERKREEEKEGVKYVRMERKVGKFMRKFVLPENADLENINAVCQDGVLSVTVQKLPPPEPKKPKTIEVKIA

SEQ ID NO: 21815 - protein, 190 aa, Lycopersicon esculentum
MRVISKLTLLIISIACIFQVSSLSADGSSLVPLIIDQMISSNPANTFLDPFKVLEQIPFGLENTLLARVDWKETAKGHVISVEVPGLNKDDIKIEIEENRVLRVSGERKKEEEKNDEENHWHCVERSHGKFWRQFRLPENADIDTMKAKLENGVLTISFAKLSADRIKGPKVVSIESKQQGKESSVREEL

SEQ ID NO: 21816 - protein, 169 aa, Stigmatella aurantiaca
MADLSVRRGTGSTPQRTREWDPFQQMQELMNWDPFELANHPWFANRQGPPAFVPAFEVRETKEAYIFKADLPGVDEKDIEVTLTGDRVSVSGKREREKREESERFYAYERSFGSFSRAFTLPEGVDGDNVRADLKNGVLTLTLPKRPEVQPKRIQVASSGTEQKEHIKA

SEQ ID NO: 21817 - protein, 188 aa, Stigmatella aurantiaca
MADLSVRRGTGSTPQRTREWDPFQQMQELMNWDPFELANHPWFANRQGPPAFVPAFEVRETKEAYIFKADLPGVDEKDIEVTLTGDRVSVSGKREREKREESERFYAYERTFGSFSRAFTLPEGVDGDNVRADLKNGVLTLTLPKRPEVQPKRIQVASSGTEQKEHIKAYPAPAEPGLAAPLGWPGFS

SEQ ID NO: 21818 - protein, 197 aa, Solanum tuberosum
MRVISKLTLLIISIGCIFQVSSLGADASSLLPLILDQMIGSNPANTFLDPFKVLEQIPFGLENREETTLPLSIARVDWKETAEGHVISIDVPGLKKDDIKIEIEENRVLRVSGERKKEEEKNDEQNHWHCVERSYGKFWRQFRLPENADIDTMKAKLENGVLTISFAKLSADRIKGPKVVSIESKQEGKESSVREEL

SEQ ID NO: 21819 - protein, 69 aa, Populus alba
FKADLPGIKKDEVKVEIEDDRVLQISGERSVEKEDRNDTWHRVERSSGKFLRRFKLPENARTDQVKAGM

SEQ ID NO: 21820 - protein, 151 aa, Hordeum vulgare
MSIVRRSNVLDPFADLWADPLDTFRSIFPAISGGNSETAVRERRMDWKGRRLEAHVFKADLPGVKKEEVKVEVEDGNVLIVSGERTKEKEDKNDKWHRVERRSGKFVRPFRLPEDGKVDEVKAGLENGVLTVTVPKAEVKKPEVKAIEISG

SEQ ID NO: 21821 - protein, 160 aa, Hordeum vulgare
MTGRRAVAHVFKADLPGVKKEEVKVEVEDGNVLVVSGERTKEKEDKNDKWHRVERSSGKFVRPFRLPEDAKVEEVKAGLENGVLTVTVPKTEVKKPEVKAIEISGCVFESEPFWLMCVRVLQPKYSCDLFLSSLVEASLYRVSFLGRLCTCVIAMNKCST

SEQ ID NO: 21822 - protein, 108 aa, Oryza sativa
RVKHNGVFRINGQRRREKTRAGAHWPREERSYGRFWRQLRLPDNADLDSIAASLDNGVLTVRFRKLAPDQIKGPRVVGIASAGGDDGGKKSIGGAGEGQNQQAKKVEL

SEQ ID NO: 21823 - protein, 211 aa, Triticum aestivum
  unsure (1)..(211): unsure at all Xaa locations
MSTRCFLALGCIAVAAMSLAVAPADGAILPFVDPAMTLASPLQDVALPDPFRILEHVPFGFDRDDVAMXXSMARVDWRETSDSHEIVVDVPGMRKEDLKVEIEENRVLRISGERRREVEERKGDHWHREERSYGKFWRQMRLPDNADLDSIAASLDAGVLTVRFRKLAPEQIKGPRVVRIAGGDDGAAAKKTIGDAGAAGGEERQTKKVEL

SEQ ID NO: 21824 - protein, 156 aa, Ananas comosus
MSLVRRSNIFDPFSLDLWEPFEGFPFGGALSFPRPSASFPAETASFAGARIDWKETPEAHVFKADLPGVKKEEVKVEVEEGNVLQISGERTREKEEKNDTWHRVERSSGKFLRRFRLPDNAKVDQVKAAMENGVLTVTVPKEDVKKPQVKSVQISG

SEQ ID NO: 21825 - protein, 203 aa, Lilium longiflorum
QSSQSMESAMITLDLPVIAAYRQLMEIPGETSNSLGDPSQSYALDAPTLTYALDAPTRSYVLDAPTLSYAHDAPTLTYALGAPASTYALDAGAMASTAADVKDLPAAYVFVVDMPGVGSGDLKVKVEGDNVLLISGERKREEEGVYLCIERRVGKLTKMFVLPENANTEAVSAVCKDGVLTVTVEKRPPQEPKKPKVIEVKVA

SEQ ID NO: 21826 - protein, 155 aa, Lilium longiflorum
MGSKLTREEYDTLLAAFHKLTVRLEVASVPKDATPADIKNLPDAYLYFIDMPGVRTGEIKVEVEDDSALVIIGERKREEEEKYQMMERWTGKRMRKFELPENADTKAVSAVWKNGVLAVTVRKLPAWEVAGISFNIERLPVPLPTKTKSIEVKIA

SEQ ID NO: 21827 - protein, 153 aa, Lilium longiflorum
LKPLKSMDSKFEVDHSLIAKLNQLTEFLANRNQPLRAPFVPDARAMPAAATDIKDMPGAYVFIIDMPGVESEEIKIDVEEGNMLVISGERKREEEEERYLEMQRRMGKMMRKFKLLENANSGAISAVCKNGVLTVTVEKLPSQEPKAIEIKIA

SEQ ID NO: 21828 - protein, 146 aa, Desulfitobacterium hafniense
MRIMALIPNDPFRMFNHYWDEMERNYLRGRGKEELSQFLYRVDVEETADQVFVTAEIPGLEKREDLHIEVDEKLLTISGEIKRAASTSERSSHHTERYYGKFSRTLTLPAVVKADGSHASYKNGILELSFLKDRHPAARTIEVDFH

SEQ ID NO: 21829 - protein, 154 aa, Quercus suber
MALSLFGGRRSNVFDPFSLDIWDPFEGFSAVASVPPSARETTAFATARIDWKETPEAHIFKADLPGLKKEEVKVEVEDGNVLQISGERSKEHEEKNDKWHRVERSCGKFMRRFRLPENAKVDQVKANMENGVLTVMVPKEEQKKPAVKAIEISG

SEQ ID NO: 21830 - protein, 110 aa, Quercus suber
SLDIWDPFEGFSAVASVPPSARETTAFATARIDWRETPEAHIFKADLPGLKKEEVKVEVEDGNVLQISGERSKEHEEKNDKWHRVERSCGKFMRRFRLPENAKVDQVKAN

SEQ ID NO: 21831 - protein, 110 aa, Quercus suber
SLDIWVPFEGFSAVASVPPSARETTAFATARIDWKETPEAHIFKADLPGLKKEEVKVEVEDGNVLQISGERSKEHEEKNDKWHRVERSCGKFMRRFRLPENAKVDQVKAN

SEQ ID NO: 21832 - protein, 110 aa, Quercus suber
SLDIWDPFEGFSAVASVPPSARETTAFATARIDWKETPEAHIFKADLPGLKKEEVKVEVEDGNVLQISGERSKEHEEKNDKWHRVERSCGKFMRRFRLPENAKVDQVKAN

SEQ ID NO: 21833 - protein, 104 aa, Quercus suber
SLDIWDPFDGLFTSVRETSSFSNVRIDWKETPEAHVFKADLPGLKKEEVKVEVEEGRVLQISGERSKEQEEKNEKWHRVERSSGKFLRRFRLPQNAKIDEVKAS

SEQ ID NO: 21834 - protein, 110 aa, Quercus suber
SLDVWDPFEGFAQLSSHSNFPSETSSFAAAKVDWKETPNAHVFKADVPGLKKEEVKVEIEEGRVLQISGERSQEQEEKSDTWHRVERSSGRFSRRFRLPENAKVEEVKAA

SEQ ID NO: 21835 - protein, 110 aa, Quercus suber
SLDIWDPFEGFSAVASVPPSARETTAFATARIDWKETPEAHIFNADLPGLKKEEVKVEVEDGNVLQISGERSKEHEEKNDKWHRVERSCGKFMRRFRLPENAKVDQVKAN

SEQ ID NO: 21836 - protein, 110 aa, Quercus suber
SLDIWDPFEGFSAVASVPPSARETTAFATARIDWKETPEAHIFKADLPGLKKEEVKVEVEDVNVLQISGERSKEHEEKNDKWHRVERSCGKFMRRFRLPENAKVDQVKAN

SEQ ID NO: 21837 - protein, 110 aa, Quercus suber
SLDIWDPFEGFSAVASVPPSARETTAFATARIDWKETPEAHIFKADLPGLKKEEVKVEVEDGNVLQISGERSKEHEEKNDKWHRVERSCGKFMRRFRLPESAKVDQVKAN

SEQ ID NO: 21838 - protein, 110 aa, Quercus suber
SLDIWDPFEGFSAVASVPPSARETTAFATARIDWKETPEAHIFKADLPGLKKEEVKVEVEDGNVSQISGERSKEHEEKNDKWHRVERSCGKFMRRFRLPENAKVDQVKAN

SEQ ID NO: 21839 - protein, 110 aa, Quercus suber
SLDIWDPFEGFSAVASVPPSARETTAFATARIDWKETPEAHIFKADLPGLKKEEVKVEVEDGNVLQISGERSKEHEEKIDKWHRVERSCGKFMRRFRLPENAKVDLVKAN

SEQ ID NO: 21840 - protein, 110 aa, Quercus suber
SLDIWDPFEGFSAVASVPPSARETTAFATARIDWKETPEAHIFKADLPGLKKEEVKVEVEDGNVLQISRERSKEHEEKNDKWHRVERSCGKFMRRFRLPENAKVDQVKAN

SEQ ID NO: 21841 - protein, 105 aa, Quercus suber
SLDIWDPFEGFSAVASVPPSARETTAFATARIDWKETPEAHIFKADLPGLKKEEVKVEVEDGNVLQISGERSKEHEEKNDKWHRVERSCGKFMRRFRLPENAKVD

SEQ ID NO: 21842 - protein, 110 aa, Quercus suber
SLDIWDPFEGFSAVASVPPSARETTAFATARIDWKETPEAHIFKADLPGLKKEEVKVEVEDGNVLQISGERSKEHEEKNDKWHRVERSCGKFMRRFRLLENAKVDQVKAN

SEQ ID NO: 21843 - protein, 88 aa, Quercus suber
SLDIWDPFEGFSAVASVPPSARETTAFATARIDWKETPEAHIFKADLPGLKKEEVKVEVEDGNVLQISGERSKEHEEKNDKWHRVERS

SEQ ID NO: 21844 - protein, 92 aa, Quercus suber
SLDIWDPFEGFSAVASVPPSARETTAFATARIDWKETPEAHIFKADLPGLKKEEVKVEVVDGNVLQISGERSKEHEEKNDKWHRVRGAVASL

SEQ ID NO: 21845 - protein, 150 aa, Agrostis stolonifera var. palustris
MSIVRWSNVFDPFSLDLWADPFDAFRSILPAASGNHDTAAFVNARMDWKETPEAHVFKADLPGVKKEEVKVEVEGGNVLVVSGERKGEGGQERQVATLERSSGKFVRRFRLPENAKVEEVKAGLENGVLTVTVPKAEVKKPEVKAIEISG

SEQ ID NO: 21846 - protein, 157 aa, Cuscuta japonica
MSLIPSFFEGRRSNAFDPFSLELWDPFFSNTVANLSGSSSAREASAFANARIDWKETPEAHIFKADVPGLKKEEVKVEVEEGKVLQISGERSKEKEEKNDTWHRVERSSGKFLRSFRLPENAKVDQVKAAMENGVLTVTVPKVEEKKAEVKSIQISG

SEQ ID NO: 21847 - protein, 145 aa, Bacillus halodurans
MSLTPYEPFRHLDQMRREFDRFFPDFPIDLPNRHLTLSPKMDVHETDHEVILECDIPGLESKEDLQIDVEPRSVRIEGRIKRSKEVHDERFYRREREIGHFRRVVPLPAEVAEDDIRAAYRNGVLEVRMRKRLDDRRRTIDVEFH

SEQ ID NO: 21848 - protein, 153 aa, Nitrosomonas europaea
MFVIYVEAIMAITRYEPWGLLTQLQRELERARDDMATEGASAIAEWAPAVDIKEESDKFIVHADLPGVKPEAIDVTTENGVLTIKGEKQTEARTEKEGYKRVERTHGSFYRRFSLPDTADLGAISAVTKDGVLVVTIPKREAVQPKKVSVTAQ

SEQ ID NO: 21849 - protein, 379 aa, Oryza sativa
TNGFRSLDQSEERSACVLIVVMSMVVASYAPASRSPVTRASSGARRVSHTQSWRPPPPPFFPASAAVKCRRPTLPVARSVGPPEKHRPVLNIPPTALLYQVPPPEGKERWEIKDDEGNVQLWLQVPGLTEDDLEITTTDELLEIKRKAGRGDPRRLDDVQGVGSFHLRLLLTKEFVSSQVTAELKAGMLEVTIPKNTNLRRTVVRIGQQSQSPAAVRTAQPKVVDPPPANSPPKNNNLVRNTSVQSRIDPPAEESRPKNDLGVGISVQPNDSPAREPPKNNLAGGRNVPTKDDPPARELPKNNLAGGRNVPPKDDPPAREPPKNNLAGGRNVAPKDDPPANEAPRNNLAGGTGVPTKDPPRNANEPPKNPPGTREANLG

SEQ ID NO: 21850 - protein, 329 aa, Oryza sativa
TNGFRSLDQSEERSACVLIVVMSMVVASYAPASRSPVTRASSGARRVSHTQSWRPPPPPFFPASAAVKCRRPTLPVARSVGPPEKHRPVLNIPPTALLYQVPPPEGKERWEIKDDEGNVQLWLQVPGLTEDDLEITTTDELLEIKRKAGRGDPRRLDDVQGVGSFHLRLLLTKEFVSSQVTAELNAGMLEVTIPKNTNLRRTVVRIGQQSQSPAAVRTAQPKVVDPPPANSPPKNNNHRRAESVQSKKDISVEPDCLSCERATGSTILPEVEMCQRRMKLLQGSGRNMPTTDDPTARELPKNNLAGGRNVPPKDDPIAREPPKNNLDRR

SEQ ID NO: 21851 - protein, 356 aa, Oryza sativa
MADTDRTRQTVARTYYKAQIMQHPLIHRRIMLYVPKQLPGLRVCVDCRNVDGCGLLRSGEPVAGDAGVLRRTAALLYQVPPPEGKERWEIKDDEGNVQLWLQVPGLTEDDLEITTTDELLEIKRKAGRGDPRRLDDVQGVGSFHLRLLLTKEFVSSQVTAELKAGMLEVTIPKNTNLRRTVVRIGQQSQSPAAVRTAQPKVVDPPPANSPPKNNNLVRNTSVQSRIDPPARESPKNDLGVGISVQPNDSPAREPPKNNLAGGRNVPTKDDPPARELPKNNLAGGRNVPPKDDPPAREPPKNNLAGGRNVAPKDDPPANEAPRNNLAGGTGVPTKDPPRNANEPPKNPPGTREANLG

SEQ ID NO: 21852 - protein, 219 aa, Triticum aestivum
  unsure (1)..(219): unsure at all Xaa locations
XELACIKPTFSLLQSIVPAFRSSIRIRQXXMQVSVAXXSNVDGCCVLHPYESLARSAVFFRHAAALLYPVQPPDSKERWDIKEEEKHVKIWLQVPGLSENDLEITAGEDMLEIKRKAGTGAGGREEPPVEVHGVGSFHVRLLMTKEYNSEDVTAELKAGMLEITIGKADNRXHKKTSRVWEEKHGPEHASPRQAELKQXPPKVMAPXPKNQNIVRSFQX

SEQ ID NO: 21853 - protein, 150 aa, Hordeum vulgare subsp. vulgare
MSIVRRSNAFDPFADLWADPFDTFRSIVPAFSGNSETAAFANARVDWKETPEAHVFKADLPGVKKEEVKVEVEDGNVLVVSGERTKEKEDKNDKWHRVERSSGKFVRRFRLPEDAKVEEVKAGLENGVLTVTVPKTEVKKPEVKAIEISG

SEQ ID NO: 21854 - protein, 145 aa, Thermosynechococcus elongatus BP-1
MALVRWEPFREIDAIQRQMNRLFDELIPLTERRSDLSFLPAAELEETPEALLLKVELPGMDPKDIDVQVTAEAVSISGERKSETKTETEGMKRTEFRYGKFQRVIPLPVRIQNTSVKAEYKDGILHLTLPKAEEEKNRVVKVSLA

SEQ ID NO: 21855 - protein, 142 aa, Bacteroides thetaiotaomicron VPI-5482
MVPVKTNQNWLPSIFNDFFDNEWMARANATAPAINVIENEKDYKVELAAPGMTKNDFKVSVDESNNLVICMEKKDEKKEEKKDGKYLRREFSYSRFQQSILLPDNVEKDKISAKVEHGVLFIDIPKVVDKKVQETTKTIDVK

SEQ ID NO: 21856 - protein, 147 aa, Funaria hygrometrica
MDFPLFQILSFPDELEKSLNPQSQKYVRDTKAMVSTAVDVKELPDAYIFVADMPGLKSADMKVQLENDNVLVIGGTRKREEPDPKVKYIRMERNSGSFMRKFTLPQNSNLDKIAASCVDGILTVTVPKIPPPEPAKPRTIEVTMGNQ

SEQ ID NO: 21857 - protein, 147 aa, Funaria hygrometrica
MDFPLFQILSFPDELEKSLNPQSQKYVRDTKAMVSTAVDVKELPDAYIFVADMPGLKSADVKVQLENDNVLVIGGTRKREEPDPKVKYIRMERNSGSFMRKFTLPQNSNLDKIAASCVNGILTVTVPKIPPPEPAKPRTIEVTMGNQ

SEQ ID NO: 21858 - protein, 161 aa, Funaria hygrometrica
MDFVVFDTDPFLTTLHQLVHEPGSDLERKIKRQRRNHHDEPRHVTIATPVDVKEIKDAYLFVADVPGLQKTDIEVQVENENVLTMRGKRKLDEKVNEKEEDTKFIRMERSPVKLLRKFTLPSDANADAITANCVDGVLTVTVPKIPPPEPAKSKTVQIAVD

SEQ ID NO: 21859 - protein, 85 aa, Lilium sp.
GEIKVEIEDDRVLVISGERKRQEEMYQKTERWMGKLTRKFQLAENANPNAVSAVWRDGELTVTVEKLPEGDVEGLTLTVESPGRR

SEQ ID NO: 21860 - protein, 161 aa, Chenopodium rubrum
MSLIPNNWFNTGRRSNIFDPFSLDEIWDPFFGLPSTLSTVPRSETAAETAAFANARIDWKETPEAHVFKADLPGVKKEEVKVEVEDGNVLRISGQRAREKEEKNDTWHRVERSSGQFMRKFRLPENAKVDQVKAGMENGVLTVTVPKNEAPKPQVKAINVY

SEQ ID NO: 21861 - protein, 211 aa, Plasmodium falciparum 3D7
MSENNLSKDNNKNKRNEALENAGMLDTFFESMYDHMNRLDQYHSDMNRMMNSLRGYYMNNDFFRFFPNRRSLTDYDINRNRNHDLLLSKPFSSMFRRDGYSNVPAMDVLDKEKHLEIKMDVPGLNKEDVQINLDDGKLEISGEFKKSHEQKDEQQRYYIKERCESSFYRSFTLPENVSEDEIKATFKDGVLKIDIPKKDIPDKKKKKIEID

SEQ ID NO: 21862 - protein, 155 aa, Arabidopsis thaliana
MDLGRFPIISILEDMLEVPEDHNNEKTRNNPSRVYMRDAKAMAATPADVIEHPNAYAFVVDMPGIKGDEIKVQVENDNVLVVSGERQRENKENEGVKYVRMERRMGKFMRKFQLPENADLDKISAVCHDGVLKVTVQKLPPPEPKKPKTIQVQVA

SEQ ID NO: 21863 - protein, 156 aa, Arabidopsis thaliana
MDLEFGRFPIFSILEDMLEAPEEQTEKTRNNPSRAYMRDAKAMAATPADVIEHPDAYVFAVDMPGIKGDEIQVQIENENVLVVSGKRQRDNKENEGVKFVRMERRMGKFMRKFQLPDNADLEKISAACNDGVLKVTIPKLPPPEPKKPKTIQVQVA

SEQ ID NO: 21864 - protein, 156 aa, Arabidopsis thaliana
MDLEFGRFPIFSILEDMLEAPEEQTEKTRNNPSRAYMRDAKAMAATPADVIEHPDAYVFAVDMPGIKGDEIQVQIENENVLVVSGKRQRDNKENEGVKFVRMERRMGKFMRKFQLPDNADLEKISPACNGGVLEVTNPKLPPPEPRNPRQNKVQFA

SEQ ID NO: 21865 - protein, 159 aa, Arabidopsis thaliana
MDLGRFPIISILEDMLEVPEDHNNEKTRNNPSRVYMRDAKAMAATPADVIEHPNAYAFVVDMPGIKGDEIKVQVENDNVLVVSGERQRENKENEGVKYVRMERRMGKFMRKFQLPENADLDKISAVCHDGVLKVTVQNFLLRNQRNQRQFKFKLLEFVL

SEQ ID NO: 21866 - protein, 159 aa, Glycine max
MDFRVMGLDSPLFHTLQHMMDMSEDAAGDNKTYSAPTRSYVRDAKAMAATPADVKEYPNSYVFEIDMPGLKSGDIKVQVEDDNVLLISGERKRDEEKEGVKYLRMERRVGKFMRKFVLPENANTDAISAVCQDGVLSVIVQKLPPPEPKKPKTIEVKVA

SEQ ID NO: 21867 - protein, 159 aa, Glycine max
MDFRVMGLEPPLFHTLQHMMDMSEDAAGENKTYSAPTRSYVRDAKAMAATPADVKEYPNSYVFEIDMPGLKSGDIKVQVEDDNVLLISGERKRDEEKEGVKYLRMERRVGKFMRKFVLPENANTDAISAVCQDGVLSVTVQKLPPPEPKKPRTIEVKVF

SEQ ID NO: 21868 - protein, 159 aa, Glycine max
MDFRVMGLESPLFHTLQHMMDMSEDGAGDNKTHNAPTWSYVRDAKAMAATPADVKEYPNSYVFEIDMPGLKSGDIKVQVEDDNVLLICGERKRDEEKEGAKYLRMERRVGKLMRKFVLPENANTDAISAVCQDGVLSVTVQKLPPPEPKKPRTIQVKVA

SEQ ID NO: 21869 - protein, 159 aa, Glycine max
MDFRVMGLESPLFHTLQHMMDMSEDGAGDNKTHNAPTWSYVRDAKAMAATPADVKEYPNSYVFEIDMPGLKSGDIKVQVEDDNLLLICGERKRDEEKEGAKYLRMERRVGKLMRKFVLPENANTDAISAVCQDGVLSVTVQKLPPPEPKKPRTIQVKVA

SEQ ID NO: 21870 - protein, 159 aa, Glycine max
  unsure (1)..(159): unsure at all Xaa locations
MDMRLMDLDSPFFNTLHRIMDLTEDXXEKNLNAPTRTYVRDAKAMAATPADVKEYPNSYVFVIDMPGLKSGDIKVQVEDDNVLLISGERKREEEKEKEGGKYLRMERRLGKLMRKFTLPENANTDAISAVCQDGVLTVTVNKLPPPQPKKPRTIEVKIA

SEQ ID NO: 21871 - protein, 121 aa, Glycine max
  unsure (1)..(121): unsure at all Xaa locations
MAGMVFGLDAPMMAALQHLLDIPDGEAXEQPPXEKQGPTRAYVRDARAMAATPADVKELPGAYAFVVDMPGLGSGDIKVQVEDERVLVISGERRREEKEDAKYLRMERRMGKLMRKFVLPE

SEQ ID NO: 21872 - protein, 117 aa, Glycine max
  unsure (1)..(117): unsure at all Xaa locations
QLSLSTQEKNRKWISGXWIWTLHCSTLCTXIMDLTEDDNVLLISGERKREEDKEKEGAKYLRMERRVGKFMRKFTLPENANTDAISAVCQDGVLTVTVNKLPPPQPKKPKTIKVKIA

SEQ ID NO: 21873 - protein, 160 aa, Medicago sativa
MDFRLMGLMLQCYTALHQMMDLSDENVEKSSSHNAPTRSYVRDAKAMAATPADVKENPNSYVFVIDMPGLKSGDIKVQVEDDNVLVISGERKREEEKEGGAKYLRMERRVGKFMRKFVLPENPNTDAVSPVCQDGVLTVTVQKLPPPRPKKPRTIEVQIA

SEQ ID NO: 21874 - protein, 157 aa, Pisum sativum
MDFRLMDLDSPLFNTLHHIMDLTDDTTEKNLNAPTRTYVRDAKAMAATPADVKEHPNSYVFMVDMPGVKSGDIKVQVEDENVLLISGERKREEEKEGVKYLKMERRIGKLMRKFVLPENANIEAISAISQDGVLTVTVNKLPPPEPKKPKTIQVKVA

SEQ ID NO: 21875 - protein, 152 aa, Pisum sativum
MDLDSPLFNTLHHIMDLTDDTTEKNLNAPTRTYVRDAKAMAATPADVKEHPNSYVFMVDMPGVKSGDIKVQVEDENVLLISGERKREEEKEGVKYLKMERRIGKLMRKFVLPENANIEAISAISQDGVLTVTVNKLPPPEPKKPKTIQVKVA

SEQ ID NO: 21876 - protein, 208 aa, Oryza sativa (japonica cultivar-group)
MGEYCDWRRSEAIKRQDREATNPSAIRGRRRRRRRRRRGDREMESAMFGLETPLMTALQHLLDIPDGEGGAAGKQGATGGPTRAYVRDARAMAATPADVKDLPGAYAFVVDMPGLKSSDIKVQVEEERLLVISGERRRGGGEEEKEESCKYLRMERRMGKFMRKFVLPDNADVDKISAVCQDGVLTVTVEKLPPPEPKKPKTIEVKVA

SEQ ID NO: 21877 - protein, 162 aa, Daucus carota
MDLRFMGIDHPLFDTLYHILDDDEHDTTDTGNTKRNKSRHERRYVRDAKAMATTAADVKEYPNAYLFVVDMPGLKSGDIKVQVEDGNVLVVNGERKREEEEGVKYLSMGRKVGRFLKKFVVPENANLENIKAVCQDGVLSVTVEKLPPPEPKKPKTIEVQIA

SEQ ID NO: 21878 - protein, 158 aa, Lycopersicon esculentum
MDLRLLGIDNTPLFHTLHHMMEAAGEDSDKSVNAPSRNYVRDAKAMAATPADVKEYPNSYVFVVDMPGLKSGDIKVQVEEDNVLLISGERKREEEKEGAKFIRMERRVGKFMRKFSLPENANTDAISAVCQDGVLTVTVQKLPPPEPKKPKTIEVKVA

SEQ ID NO: 21879 - protein, 155 aa, Lycopersicon esculentum
MDLRLMGIDNTPLFHTLQHMMEAAGEDSVNAPPKKYVRDAKAMAATPVDVKEYPDSYVFVVDMPGLKSGDIKVQVEEDNVLLISGERKREEEKEGVKFIRMERRVGKFMRKFSLPENANTDAISAVCQDGSLTVTVQKLPPPEPKKSKTIQVKVA

SEQ ID NO: 21880 - protein, 155 aa, Lycopersicon peruvianum
MDLRLLGIDNTPLFHTLHHMMEAAGEDSVNAPSKIYVRDAKAMAATPADVKEYPNSYVFVVDMPGLKSGDIKVQVEEDNVLLISGERKREEEKEGAKFIRMERRVGKFMRKFSLPENANTDAISAVCQDGVLTVTVQKLPPPEPKKPKTIEVKVA

SEQ ID NO: 21881 - protein, 160 aa, Helianthus annuus
MDIDSLMGFDPLLRNLHYILEATDDNTTGNKSNNSGPSRAYVRDARAMAATPADVKECPNSYVFIVDMPGLKSGDIKVQVERDNVLVISGKRNREEEKEGVKYVRMERRMGKFMKKFALPEDANTDKISAICQDGVLTVTVEKLPPPEPKKPKTIQVQVA

SEQ ID NO: 21882 - protein, 275 aa, Oryza sativa
SCQTPPYDKWVPLEPTVRPPTQTRSPLAPKISTSLDLSRRKRPSAPASPRPFHHLSEPSTPFQTPPPRHPYLNPSSHRAIKRQDREATNPSAIRGRRRRRRRRRRGDREMESAMFGLETPLMTALQHLLDIPDGEGGAAGKQGATGGPTRAYVRDARAMAATPADVKDLPGAYAFVVDMPGLKSSDIKVQVEEERLLVISGERRRGGGEEEKEESCKYLRMERRMGKFMRKFVLPDNADVDKISAVCQDGVLTVTVEKLPPPEPKKPKTIEVKVA

SEQ ID NO: 21883 - protein, 162 aa, Triticum aestivum
MEGRMFGLETPLMTALQHLLDVPDGESGGAGNAGGEKQGPTRAYVRDARAMAATPADVKELPGAYAFVVDMPGLGSGDIKVQVEDERVLVISGERRREEKEDAKYLRMERRMGKLMRKFVLPENADMEKISAVCRDGVLTVSVEKLPPPEPKKPKTIQVQVA

SEQ ID NO: 21884 - protein, 162 aa, Triticum aestivum
MEGRMFGLETPLMTALQHLLDVPDSESGGAGNAGGERQGPTRAYVRDARAMAATPADVKELPGAYAFVVDMPGLGSGDIKVQVEDERALVISGERRREEKEDARYLRMERRMGKLMRKFVLPENADMEKISAVCRDGVLTVTVEKLPPPEPKKPKTIQVQVA

SEQ ID NO: 21885 - protein, 162 aa, Triticum aestivum
MEGRMFGLETPLMTALQHLLDVPDGEAGGPGNAAGEKQGPTRAYVRDARAMAATPADVKELPGAYAFVVDMPGLGSGDIKVQVEDERVLVISGERRREEKEDAKYLRMERRMGKMMRKFVLPENADMEKISAVCRDGVLTVSLEKLPPPETKKPKTIQVQVA

SEQ ID NO: 21886 - protein, 160 aa, Triticum aestivum
  unsure (1)..(160): unsure at all Xaa locations
MAGMVFGLDAPMMAALQHLLDIPDGEAXEPPPXEKQGPTRAYVRDARAMAATPADVKELPGAYAFVVDMPGLGSGDIKVQVEDERVLVISGERRREEKEDAKYLRMERRMGKLMRKFVLPENADMEKISAACRDGVLTVTVDKLPPPEPKKPKTIQVQVA

SEQ ID NO: 21887 - protein, 157 aa, Triticum aestivum
MAGMVFGLDAPMMAALQHLLDIPDGEAEPPPEKQGPTRAYVRDARAMAATPADVKELPGAYAFVVDMPGLGSGDIKVQVEDERVLVISGERRREEKEDAKYLRMERRMGKLMRKFVLPENADMEKISPCRDGVLTVTVDKLPPPEPKKPKTIQVQVA

SEQ ID NO: 21888 - protein, 162 aa, Triticum aestivum
MAGMVFGLENPMMTALQHLLDIPDGEAGGAGAPRGEKQGPTRAYVRDARAVAAAPADVKELPGAYAFVVDMPGLGSGDIKVQVEDERVLVISGERTREEEEDPKYLRMEPRMGKLMRKFVLPENADMEKISPACRDGVLPVPVEKLPPPEPKKPKPIQVQVA

SEQ ID NO: 21889 - protein, 156 aa, Triticum aestivum
  unsure (1)..(156): unsure at all Xaa locations
MAGMVFGLDAPMMAALQHLLDIPDGEAXEPPAXEKQGPTRAYVRDARAMAATPADVKELPGAYAXWVVDMPGLGSGDIKVQVEGEGVLVIGGERGREEKEDAKYRRMERRRKFVLPENADMEKISAVCRDGVLTVTVHKLPAPEPKKPKTIQVQVA

SEQ ID NO: 21890 - protein, 156 aa, Nostoc punctiforme
MALVRWEPFREVESLQRQLNRLFDEIAPTGRREEEGIAFIPSAEIQETPDAVHLKVEIPGVDPKDLDVQVSPEAVSISGERKSEIKTEERGITRTEFRYGRFQRVIPLPSRVQHDKVEAEYKDGILKLRLPKAEEDRNKVVKVNLGDGHRGNGQGQ

SEQ ID NO: 21891 - protein, 142 aa, Streptococcus thermophilus
MLNKIQPRNSDTYSMTPFDFFEDFSRNLFNDFKSNLIKTDIHETDNEYLVEAELPGIPKENIQVTYEDGVLTISGQQQIDTVDEDKKGKLIRSERSSTSLRRQYLLENVKEDEIKASYSDGILKVTLPKDSNKEIKKSIPIE

SEQ ID NO: 21892 - protein, 142 aa, Streptococcus thermophilus
MLNKIQQRNSDTYSMTPFDFFEDFSRNLFNDLRSNLIKTDIHETDNEYIVEAELPGISKDNIQVTYEDGVLTISGQQQIDTVDEDKKGKLIRSERSLTSVRRQYLLENVKEDEIKASYSDGILKVTLPKDSNKEIKKSIPIE

SEQ ID NO: 21893 - protein, 142 aa, Streptococcus thermophilus
MLNKIQHRNLNTYSVTPFDFFEEFSRNLFNDFKPNFIKTDIHETDNEYLVEAELPGIPKENIQVTYENGVLTISGQRQIDAVNEDKKGKLIRSERSLTSVQRQYLLENVKEDEIKASYSDGVLKVTLPKDSNKEIKKSISIE

SEQ ID NO: 21894 - protein, 154 aa, Streptococcus thermophilus
MLNKIQQRNSDIYSMTPFNFFEDFRRNLFNDFFEDFSHNLFNDLKSNLIKTDIHETDNEYVVEAELPGIPKEDIQVNYENGVLTISGQRQIDAAIEDKKGKLIHSERSLTSVRRQYLLENVKEDEIKASYSDGILKVTLPKDSNKEIKTSIPIE

SEQ ID NO: 21895 - protein, 142 aa, Streptococcus thermophilus
MLNKIQHRNLNTYSVTPFDFFEEFSRNLFNDFKPNFIKTDIHETDNEYLVEAELPGIPKEDIQVTYENGVLTISGQQQIDAVNEDKKGKLIRSERSLTSVQRQYLLENVKEDEIKASYSDGVLKVTLPKDSNKEIKKSISIE

SEQ ID NO: 21896 - protein, 154 aa, Streptococcus thermophilus
MLNKIQQRNSDTYSVTPFNFFEDFRRNLFNDFFEDFSHNLFNDFKPNLIKTDIHETDNEYFVEAELPGIPKEDIQINYENGVLTISGQRQIDAATEDKKGKLIRNERSLTSVRRQYLLENVKEDEIKASYSDGILKVTLPKDSNKEIKTSIPIE

SEQ ID NO: 21897 - protein, 142 aa, Streptococcus thermophilus
MLNKIQHRNLNTYSVTPFDFFEEFSRNLFNDFKPNFIKTDIHETDNEYLVEAELPGIPKENIQVTYENGVLTISGQQQIDAVNEDKKGKLIRSERSLTSVQRQYLLENVKEDEIKASYSDGVLKVTLPKDSNKEIKKSISIE

SEQ ID NO: 21898 - protein, 142 aa, Streptococcus thermophilus
MLNKIQQRNSDIYSMTPFNFFEDFRRNLFNDLKSNLIKTDIHETDNEYVVEAELPGIPKEDIQVNYENGVLTISGQRQIDAAIEDEKGKLIHSERSLTSVRRQYLLENVKEDEIKASYSDGILKVTLPKDSNKEIKTSIPIE

SEQ ID NO: 21899 - protein, 150 aa, Streptococcus thermophilus
MLNKIQHRNLNTYSVTPLDFYSVTPLNFFEDFSRSLFNDFKPHFIKTDIHETDNEYLVEAELPGIPKEDIQVTYENGVLTISGQQQIDAVNEDKKGNLIRSERNLTSVRRQYLLENVKEDEIKASYSDGVLKVTLPKDSNKEIKKSISIE

SEQ ID NO: 21900 - protein, 55 aa, Coffea arabica
KRVERSSGQFMRRFRLPENAKMDQIKAAMENGVLTITIPKEEAKKTDVRAIQISG

SEQ ID NO: 21901 - protein, 142 aa, Burkholderia fungorum
MSNLTRFDPFPLEPMSELFQGLFRPLRGAGGEAPLADIKVDVTESDSAYTVKAELPGVDKKDIDVKIDGNLVSISAKVERNQEMKEGERVIRRERYAGAVSRAFSLASEVDESAAAAEYKDGVLSLTLPKKAASERKRLQIN

SEQ ID NO: 21902 - protein, 177 aa, Burkholderia fungorum
MFRSVCRRIRPVAGELERVVRFASFYRGSQTMSDPYFSTDLFGGIDRLQQQMASVFGGFSTSLRAARLGAFPEINIGSTDDTIEIVAFAPGLDPAQLDVSIDKGLLIISGERKNLERSRNDEVRSYVQERFSGSFRRVIELPQQADPDKVEARYTNGCLKISVGKLEASKPRAITVQ

SEQ ID NO: 21903 - protein, 167 aa, Pyrococcus furiosus DSM 3638
MVRRIRRWDIWDPFDLIREIQEEIDAMFDEFFSRPRLWTYRRWSEPAMYEERVGEVWREPFVDIFDNGDEFVITAELPGVRKEDIKVRVTEDTVYIEATVKREKELEREGAVRIERYFTGYRRAIRLPEEVIPEKAKAKYNNGVLEIRVPKKHPTKKESEGFEVKVE

SEQ ID NO: 21904 - protein, 145 aa, Methanothermobacter thermautotrophicus str. Delta H
MFEKRRLMAEKMMEDMIKNMREMQKEFEKKIAEYAENIPEKLSMDVMETDDAIIIKTDLPGVKKEDINIELTENTISISAVFEEEVEIKEADFIKKERKYGEAKREMRLPEKIRVEDASAKFENGVLTVELPKVEVKKKQTLKVE

SEQ ID NO: 21905 - protein, 153 aa, Methanosarcina acetivorans C2A
MKWPAKRSVSGPARWDPFEEIRRTQERLNQLFEDFMPMEEWGGGKVYTPAIDIMEEDDKLVVTTDLPGINKEDVEINLKEDMLEISAKTGEEKETEEEGYLRKERAYTQFYRAVRLPVGVKEEGSTAKMENGVLTISLPKAQIEEPKKKIEIE

SEQ ID NO: 21906 - protein, 152 aa, Methanosarcina acetivorans C2A
MKFPIKRPSRDVCNWDPFDEIRGMQEYMEQMMRTFPALESRYAGGTFAPLTDVAEEDNKVIVTTDLPGINRENIELSLKDNFLVISASKGKEEENEKEGYLRKERSFMRYYREIPLPKGVTEEGATAQLKNGVLTVTMPKTEALTEKRIPIE

SEQ ID NO: 21907 - protein, 130 aa, Leptospira interrogans serovar lai str. 56601
MTNAVLNEKNHSVTSEETKKERVRILAPRVDIYSDEENIYLLADLPGVEEKDVQVQLEKDQLIISGKTSNKDIQGELRYSEFRTGEYKRTFTLTESVEEDRISAVYKNGVLNLTLPKRKPLTKKIEVRSE

SEQ ID NO: 21908 - protein, 153 aa, Methanosarcina mazei Goe1
MRWPAKRSFSGPARWDPFEEIKRTQERLNQLFEDFMPMEEWGGGKVYTPAIDIKEEDDKLLVTTDLPGINKEDVEINLKEDMLEISAKSGKEKESEEEGYLRRERAYTQFYRAVRLPSSVREEGACAKMDNGVLTIMLPKAKIEEPKKKIEIE

SEQ ID NO: 21909 - protein, 152 aa, Methanosarcina mazei Goe1
MKLPIKRPSRDVYSWDPFDEIKRMQEYMEQMMRAFPALENRYVSDTLSPLTDVAEEDNKVIVTTDLPGIDKENVELNLRENLLVISAQKGKEEETEKEGYLRKERSFMRYYREIPLPDNVTEDGATAQLKNGVLTVTLPKTKDVTEKRIQIE

SEQ ID NO: 21910 - protein, 152 aa, Clostridium thermocellum ATCC 27405
MLFMFGIVPFGRRGMGVSRRGRDLFDIDSFFDDFFDDRFFPAFYGGNQIKVDIRENDKEYILEADIPGVDKENITVEVNGDVLTISAKWDEQTEIKKENYLRRERRASSMSRSFTLENVDSDRITAKHENGVLTLILPKKEPRSRGRRINIS

SEQ ID NO: 21911 - protein, 215 aa, Microbulbifer degradans 2-40
MRILMFDSQQSNSMEVVFMNLQTLNPWNWFKHEEAAKQHAAAPAIHSAENSETSAPQLNSLIQLHQQMDKLFDDVFSSFGFPSLGARFADANLLTNRANSLLGGYRPTVDVSGDKTHYHISLDVPGLSESDISIDVSNDVLTIRGSKEEKAEQNEKHVYRMERRYGSFQRTLSLPSDANTDDITAQLKDGVLNLVIAKKDVPPEDVKRIPINSVH

SEQ ID NO: 21912 - protein, 167 aa, Bifidobacterium longum DJO10A
MAMFPALMNDTMFSDLFDDPFFEGWRNTDNTMSAVMPANMMTTDVRETDKGYDVDIDMPGFKKEDINLELNNGYLTVSASRCSEHEDKAPAAEDEASDSKCACASDSGKWLRRERYMGSCSRSFYVGEDVKESDIHASYRNGTLCIQVPKMQAQPQVESKHQIAIEG

SEQ ID NO: 21913 - protein, 146 aa, Clostridium tetani E88
MFDMIPFKRNNSMKRDSYFDEFFDNFFNNDFLVPIKFPKNNFRADLKETNNEYIIEADLPGISKDAVKVNYSNNNLVISAKREDIIENKDENYIRRERSYGEFKRAFYVDNVDENNIKASFKNGVLRINLTKLEDTTKARKQIEIE

SEQ ID NO: 21914 - protein, 153 aa, Methanosarcina barkeri
MRWPMRRSFSGPARWDPFDEIRRTQERLNQLFEDFMPMEEWGGGKVYTPAIDIKEEDDKLLVTTDLPGINKEDVQINLKEDILEISAKTGKEKETEEEGYLRRERAYTQFYRAVRLPASVKEEGSTAKMENGVLTITLPKMQLEELTKKIAIE

SEQ ID NO: 21915 - protein, 152 aa, Methanosarcina barkeri
MKFPMKRTDRDMYSWDPFDEIRRMQNYMENMFRTFPALESRFGNEAFSPLTDVMEEDEKVVVTTDLPGVDREDVELNLRDNVLVISAGKGKEEEAEKEGYLRKERSFMRYYREIPLPDGVTEEGTTAQLKNGVLTVTLPKTKSVAGKRIEIE

SEQ ID NO: 21916 - protein, 144 aa, Aquifex aeolicus VF5
MDRRSMIVWRPFEEVERLRRDFERLLEEFVPRRAEQETLVPPVEVYETDKEVVIKMDLPGVKKEDIEITVKENAVHVRAERKEEKEEKTENIIRAERFYGVIERVIPLPVEVDPEKAEAKYENGVLEIRIPKVHVEKEKKIKLA

SEQ ID NO: 21917 - protein, 165 aa, Pyrococcus abyssi
MVRRRRWDIWDPFDIIREIQEEIDAMFDEFFSRPRLWTYRRWREPEVYEESREVWREPFVDIFDRGDEFVVIAELPGVRKEDIKVRVTEDSVYIEATVRREKELEEEGAVRIERYYSGYRRVIRLPEEVIPEKAKAKYNNGVLEIRIPKKQPTKKEGEGFEVKIE

SEQ ID NO: 21918 - protein, 146 aa, Funaria hygrometrica
MALSLFGRGSGSFFDPFDLSLLESGPSRQFARDAHAVANTQIDWRETPEAHIFKADLPGLKKEEVKVQLVDGKTLEISGERRKEEVHKDDTWHRVERAHGSFLRRFRLPDNSNVEAVEAQVQDGVLTVTIPKIQKPKPQVRQIEIA

SEQ ID NO: 21919 - protein, 146 aa, Funaria hygrometrica
MALSLFGRGSGSFFDPFDLSLLESGPSRQFARDAHAVPNTQIDWRETPEAQSSKADLPGLKKEEVKVQLVDGKTLEISGERRKEEVHKDDTWHRVERAHGSFLRRFRLPDNSNVEAVEAQVQDGVLTVTIPKIQKPKPQVRQIEIA

SEQ ID NO: 21920 - protein, 149 aa, Funaria hygrometrica
MAIYVNRRNNIWNMPDPMDIMMNFFEDTPARSIARDAHALASTNVDWKETPTEHVIKADLPGLKKEEVHVQVEGDRTLSISGQRKHEEVQKTDTWHRVERSSGQFMRKFRLPENANLEQISAQVQDGVLTVKIPKLEKQKPHSRTIEIG

SEQ ID NO: 21921 - protein, 155 aa, Laccaria bicolor
MSVFYYEPYYDFDRLLDGIFTPRTARNGVHKRALQSDATPEGAVRALKPRMDLHEDKEKNLVTATFEFPGSKKEDVHLEIHNGRLVVSVENKISEEHDESGYAVRERRYGKFSRTLQLPQGVKDDEIKAGMEDGVLTVTFPKSGAELAPKKISIS

SEQ ID NO: 21922 - protein, 140 aa, Ralstonia solanacearum
MSQLRRYDPFAIEPAGDIFQGLLRSFRGGMDSALPFKVDVTESDTAYSVVAEIPGAKKEDIDVTVDRGTVMISAKVERQSEKKEGERVIRSERYSGSMQRMFTLEAGVDENKVEATYESGLLRVTLPKKEVSPQQRITIR

SEQ ID NO: 21923 - protein, 46 aa, Pseudotsuga menziesii
LRRFRLPDNAKVEEIKAAMENGVLTVTVPKQPEPQPPQPKSIEISG

SEQ ID NO: 21924 - protein, 161 aa, Arabidopsis thaliana
MSLIPSIFGGRRSNVFDPFSQDLWDPFEGFFTPSSALANASTARDVAAFTNARVDWKETPEAHVFKADLPGLKKEEVKVEVEDKNVLQISGERSKENEEKNDKWHRVERASGKFMRRFRLPENAKMEEVKATMENGVLTVVVPKAPEKKPQVKSIDISGAN

SEQ ID NO: 21925 - protein, 157 aa, Arabidopsis thaliana
MSLIPSIFGGRRTNVFDPFSLDVFDPFEGFLTPSGLANAPAMDVAAFTNAKVDWRETPEAHVFKADLPGLRKEEVKVEVEDGNILQISGERSNENEEKNDKWHRVERSSGKFTRRFRLPENAKMEEIKASMENGVLSVTVPKVPEKKPEVKSIDISG

SEQ ID NO: 21926 - protein, 403 aa, Arabidopsis thaliana
MAWNSERSIRECINRRQVHGPSMLPTLNLTGDVILAEHLSHRFGKIGLGDVVLVRSPRDPKRMVTKRILGLEGDRLTFSADPLVGDASVSVLVKQHGIANLGLRVKRCMIDELGWSRRFRKVMFGFREITCMLQLIHVILGLYLTVSLKEKLFYGNHLFACLGLATRILWVIEMTIIYTYTFSNRRKAMVLILFLKPELQYQMLRFILLVSKKLLYEPTRSKEFIAKQSFKTEQTQRVAITRGSETMSLIPSIFGGRRTNVFDPFSLDVFDPFEGFLTPSGLANAPAMDVAAFTNAKVDWRETPEAHVFKADLPGLRKEEVKVEVEDGNILQISGERSNENEEKNDKWHRVERSSGKFTRRFRLPENAKMEEIKASMENGVLSVTVPKVPEKKPEVKSIDISG

SEQ ID NO: 21927 - protein, 161 aa, Arabidopsis thaliana
MSLIPSIFGGRRSNVFDPFSQDVWDPFEGFFTPSSALANASTARDVAAFTNARVDWKETPEAHVFKADLPGLKKEEVKVEVEDKNVLQISGERSKENEEKNDKWHRVERASGKFMRRFRLPENAKMEEVKATMENGVLTVVVPKAPEKKPQVKSIDISGAN

SEQ ID NO: 21928 - protein, 156 aa, Arabidopsis thaliana
MSLVPSFFGGRRTNVFDPFSLDVWDPFEGFLTPGLTNAPAKDVAAFTNAKVDWRETPEAHVFKADVPGLKKEEVKVEVEDGNILQISGERSSENEEKSDTWHRVERSSGKFMRRFRLPENAKVEEVKASMENGVLSVTVPKVQESKPEVKSIDISG

SEQ ID NO: 21929 - protein, 156 aa, Arabidopsis thaliana
MSLVPSFFGGRRTNVFDPFSLDVWDPFEGFLTPGLTNAPAKDVAAFTNAKVDWRETPEAHVFKADVPGLKKEEVKVEVEDGNILQISGERSSENEEKSDTWHRVERSSGKFMRRFRLPENAKVEEVKASMENGVLSVTVPKVQESKPEVKSVDISG

SEQ ID NO: 21930 - protein, 156 aa, Arabidopsis thaliana
MSLVPTFFGGRRTNVFDPFSLDVWDPFEGFLTPGLTNAPAKDVAAFTNAKVDWRETPEAHVFKADVPGLKKEEVKVEVEDGNILQISGERSSENEEKSDTWHRVERSSGKFMRRFRLPENAKVEEVKASMENGVLSVTVPKVQESKPEVKSVDISG

SEQ ID NO: 21931 - protein, 153 aa, Arabidopsis thaliana
MSMIPSFFNNNRRSNIFDPFSLDVWDPFKELTSSSLSRENSAIVNARVDWRETPEAHVFKADLPGLKKEEVKVEIEEDSVLKISGERHVEKEDKNDTWHRVERSSGQFTRRFRLPENVKMDQVKAAMENGVLTVTVPKAETKKADVKSIQISG

SEQ ID NO: 21932 - protein, 157 aa, Arabidopsis thaliana
MSLIPSFFGNNRRSNSIFDPFSLDVWDPFKELQFPSSLSGETSAITNARVDWKETAEAHVFKADLPGMKKEEVKVEIEDDSVLKISGERHVEKEEKQDTWHRVERSSGQFSRKFKLPENVKMDQVKASMENGVLTVTVPKVEEAKKKAQVKSIDISG

SEQ ID NO: 21933 - protein, 155 aa, Arabidopsis thaliana
MSLIPSFFGNNRRINNNIFDPFSLDVWDPFKELQFPSSSSSAIANARVDWKETAEAHVFKADLPGMKKEEVKVEIEDDSVLKISGERHVEKEEKQDTWHRVERSSGGFSRKFRLPENVKMDQVKASMENGVLTVTVPKVETNKKKAQVKSIDISG

SEQ ID NO: 21934 - protein, 155 aa, Arabidopsis thaliana
MSLIPSFFGNNRRINNNIFDPFSLDVWDPFKELQFPSPSSSAIANARVDWKETAEAHVFKADLPGMKKEEVKVEIEDDSVLKISGERHVEKEEKQDTWHRVERSSGGFSRKFRLPENVKMDQVKASMENGVLTVTVPKVETNKKKAQVKSIDISG

SEQ ID NO: 21935 - protein, 157 aa, Brassica rapa
MSLIPSFFGGRRTNVFDPFSLDLYDPFEGFLTPSGMTNATSKDVAAFTNAKVDWRETPEAHVFKADLPGLKKEEVKVEVEDGNILQISGERSSENEEKSDRWHRVERSSGKFMRRFKLPENAKVDEVKASMENGVLSVTVPKMAERKPEVKSIDISG

SEQ ID NO: 21936 - protein, 128 aa, Brassica oleracea
DPFEGLLTPSSARDMAAFTNARVDWKETPEAHVFKADLPGLMKEEVKVEVEDKNILQISGERSKENEEKNDKWHRLERASGKFMRRFKLPENAKMEEVKATMENGVLTVTVPKAPEKKPEVKSIDISG

SEQ ID NO: 21937 - protein, 83 aa, Citrus maxima
MSLIPSIFGGRRTNVFDPFSLDVWDPFDGFLSSALTNAPSSARETSQFANARIDWKADLVHVFKADLPGLRKEEVKVEVEECR

SEQ ID NO: 21938 - protein, 161 aa, Glycine max
MSLIPNFFGGRRNNVFDPFSLDVWDPFKDFPFPNTLSSASFPEFSRENSAFVSTRVDWKETPEAHVFKADIPGLKKEEVKVQIEDDKVLQISGERNVEKEDKNDTWHRVERSSGKFMRRFRLPENAKVEQVKASMENGVLTVTVPKEEVKKPDVKAIEISG

SEQ ID NO: 21939 - protein, 154 aa, Glycine max
MSLIPGFFGARRSNVFDPFSLDIWDPFKDFHVPTSSVSAENSAFVSTRVDWKETPEAHVFKADIPGLKKEEVKVQIEDDRVLQISGERNVEKEDKNDTWHRVERSSGKFVRRFRLPENAKVNEVKASMENGVLTVTVPKEEVKKPDVKAIEISG

SEQ ID NO: 21940 - protein, 154 aa, Glycine max
MSLIPGFFGGRRSNVFDPFSLDMWDPFKDFHVPTSSVSAENSAFVSTRVDWKETPEAHVFKADIPGLKKEEVKVQIEDDRVLQISGERNVEKEDKNDTWHRVERSSGKFTRRFRLPENAKVNEVKASMENGVLTVTVPKEEVKKPDVKAIEISG

SEQ ID NO: 21941 - protein, 154 aa, Glycine max; identical to SEQ ID NO: 21940

SEQ ID NO: 21942 - protein, 154 aa, Glycine max
MSLIPGFFGGRRSNVFDPFSLDMWDPFKDFHVPTSSVSAENSAFVSTRVDWKETPEAHVFKADIPGLKKEEVKVQIEDDRVLQISGERNVEKEDKNDTWHRVERSSGKFTRRFRLPENAKVNEVKASMENGVLTVTVPKEEVKKPNVKAIEISG

SEQ ID NO: 21943 - protein, 153 aa, Glycine max
MSLIPSFFGGRRSSVFDPFSLDVWDPFKDFPFPSSLSAENSAFVSTRVDWKETPEAHVFKADIPGLKKEEVKLEIQDGRVLQISGERNVEKEDKNDTWHRVERSSGKLVRRFRLPENAKVDQVKASMENGVLTVTVPKEEIKKPDVKAIDISG

SEQ ID NO: 21944 - protein, 153 aa, Glycine max; identical to SEQ ID NO: 21943

SEQ ID NO: 21945 - protein, 161 aa, Glycine max
MSLIPNFFGGRRSNVFDPFSLDVWDPFKDFPFPNTLSSASFPEFSRENSAFVSTRVDWKETPEAHVFKADIPGLKKEEVKVQIEDDKVLQISGERNVEKEDRNNTWHRVERSSGKFMRRFRLPENAKVDKVKASMENGVLTVTVPKEEVKKADVKNIQISG

SEQ ID NO: 21946 - protein, 153 aa, Glycine max
MSLIPSIFGGRRSNVFDPFSLDVWDPFKDFHFPTSLSAENSAFVNTRVDWKETPEAHVFEADIPGLKKEEVKVQIEDDRVLQISGERNLEKEDKNDTWHRVERSSGNFMRRFRLPENAKVEQVKASMENGVLTVTVPKEEVKKPDVKAIEISG

SEQ ID NO: 21947 - protein, 153 aa, Glycine max; identical to SEQ ID NO: 21946

SEQ ID NO: 21948 - protein, 153 aa, Glycine max
MSLIPSFFGGRRSSVFDPFSLDVWEPFKDFPFPSSLSAENSAFVSTRVDWKETPEAHVFKADIPGLKKEEVKLEIQDDRVLQISGERNVEKEDKNDTWHRVERSSGKFMRRFRLPENAKVDQVKASMENGVLTVTVPKEEIKKPDVKAIDISG

SEQ ID NO: 21949 - protein, 153 aa, Glycine max
MSLIPSIFGGRRSNVFDPFSLDVWDPFKDFHFPTSLSAENSASVNTRVDWKETPEAHVFKADIPGLKKEEVKVEIEDDRVLQISGERNLEKEDKNDTWHRLERSSGKFMRRFRLPENAKVEQVKASMENGVLTVTVPKEEVKKPDVKAIEISG

SEQ ID NO: 21950 - protein, 150 aa, Glycine max
MSLIPSFFGGRRSNVFDPFSLDVWDPFKDLSFPSAEDSAFLKTRVDWKETPEAHVFKADIPGLKKEQVKVEIEDDKVLQISGERSVEKEDKNDKWHRVDRSSGKFLRKFRLPENAKVDQVKASIENGVLTVTVPKEEVKKPDVKAVQISG

SEQ ID NO: 21951 - protein, 160 aa, Glycine max
  unsure (1)..(160): unsure at all Xaa locations
MSLIPSFFGTGRRTNVFDPFSLDVWDPFHGFPXXTTALSAPRSETAAFANTRIDWKETAEAHVFKADLPGLKKEEVKVEIEEEGRVLQISGQRTKEKEDKNDTWHRLERSSGSFLRRFRLPENAKLDQVKAGMENGVLTVTVPKVDVKKPDVKPVQITEG

SEQ ID NO: 21952 - protein, 163 aa, Glycine max
  unsure (1)..(163): unsure at all Xaa locations
MSLIPNFFGGRRNNVFDPFSLDVWDPFKDFPFPNTLSSASFPEFSRENSAFVSTRVXDWKETPEAHVFKADIPGLKKEEVKVQIEDDKVLQISGERNVEKEDKNDTWHRVERSSGXKFMRRFRLPENAKVEQVKASMENGVLTVTVPKEEVKKPDVKAIEISG

SEQ ID NO: 21953 - protein, 160 aa, Glycine max
MSLIPNIFGGRRSNVFDPFSLDMWDPFKDFPFPNSVSTSFPEFSRENSAFVSTRVDWKETPEAHVFKADIPGLKKEEVKVQIEDDKVLQISGERNVEKEDKNDTWHRVERSSGKFMRRFRLPENAKVNEVKASMENGVLTVTVPKEEVKNHDVKAIKISG

SEQ ID NO: 21954 - protein, 153 aa, Glycine max
MSLIPSFFSGPRSNVFDPFSLDVWDPFKDFHFPTSVSAENSAFVSTRVDWKETPEAHVLKADIPGLKKEEVKVQIEDDRVLQISGERNLEKEDKNDTWHRVERSSGKFMRRFRLPENAKVEQVKASMENGVLTVTVPKEEIKKPDVKAIEISA

SEQ ID NO: 21955 - protein, 157 aa, Glycine max
MSIIPNLFGGRRSNVFDPFSLDVWDPFEGFPFSTGHVPSSGGESSAIANTRVDWKETPAAHVFNVDLPGLKKEEVKVEVEDGRVLQISGERTKEQEQKDDRWHRVERSTGKFMRRFRLPENAKMDQVKAAMENGVLTVTVPKEEDKKPQVKSIQISA

SEQ ID NO: 21956 - protein, 153 aa, Glycine max
MSLIPNFFGGRRSNVFDPFSLEVWDPFKDFHFPSSVSAENLAFVSTRVDWKETPEAHVLKADIPGLKKEEVKVQIEDDRVLQISGERNLEKEDKNDTWHRVERSSGKFMRRFRLPENVKVEQVKASMENGVLTVTVPKKEVKKPDVKAIEISA

SEQ ID NO: 21957 - protein, 153 aa, Glycine max
MSLIPSFFGGRRSNVLDPFSLDVWDPFKDFPFPTSLSAENSAFVSTRVDWKETPEAHVFKADIPGLKKEEVKLEIQDDRILQISGERNVEKEDKNDTWHRVERSSGKFMRSFRLPDNAKVDQVKASMENGVLTVTVPKEEIKKPDVKAIEISG

SEQ ID NO: 21958 - protein, 153 aa, Glycine max
MSIIPNLFGGRRSNVFDPVSLDVWDPLEGFPFSTANAGESSAIANTRVDWKETPQAHVFSVDLPGLKKEDVKVEVEDGRVLQISGEKTKEQEQKDDRWHRIERSTGKFMRRFRLPENAKMDQVKAAMENGVLTVTVPKEEQKKPQVKSIQISG

SEQ ID NO: 21959 - protein, 154 aa, Glycine max
MSLIPSIFGGPRSNVFDPFSLDMWDPFKDFHVPTSSVSAENSAFVNTRVDWKETQEAHVLKADIPGLKKEEVKVQIEDDRVLQISGERNVEKEDKNDTWHRVERSSGKFMRRFRLPENAKVEQVKACMENGVLTVTIPKEEVKKSDVKPIEISG

SEQ ID NO: 21960 - protein, 154 aa, Glycine max
MSLIPSIFGGPRSNVFDPFSLDMWDPFKDFHVPTSSVSAENSAFVNTRVDWKETQEAHVLKADIPGLKKEEVKVQIEDDRVLQISGERNVEKEDKNDTWHRVDRSSGKFMRRFRLPENAKVEQVKACMENGVLTVTIPKEEVKKSDVKPIEISG

SEQ ID NO: 21961 - protein, 152 aa, Glycine max
MSLIPNIFGGRRSNVFDPFKDFPFPNSVSTSFPEFSRENSAFVSTRVDWKETPEAHVFKADIPGLKKEEVKVQIEDDKVLQISGERNVENEDKNDTWHRVERSSGKFMRRFRLPENAKVNEVKASMENGVLTVTVPKKEVKNHDVKAIEISG

SEQ ID NO: 21962 - protein, 145 aa, Glycine max
  unsure (1)..(145): unsure at all Xaa locations
MSLIPSLLSNRXXIMDPFSTNIWAPSDSDSEVSAFVNARVDWKETPESHVFKADLPGLKKEEVKVEVEEGRVLNISGERSVEKEDKNEKWHRVERGRGKFQRKFWLPEDAKVDEVKASMENGVLTVIVPKVPDKKPEVKTIEISG

SEQ ID NO: 21963 - protein, 110 aa, Glycine max
  unsure (1)..(110): unsure at all Xaa locations
MSIVRRSNVFDPFADLWADPFDTFRSIVPAISGGSSETAAFANARVDWKETPEAHVFKADLPGVKKEEVKVEVEDGNVLVVSGERTKEEEDKNDKWHRVERSSGKFVRRX

SEQ ID NO: 21964 - protein, 150 aa, Glycine max
  unsure (1)..(150): unsure at all Xaa locations
MSLIPSFFGGRRSNVFDPFSLDVWDPFKDLSFPSAEDSAFLKTRVDWKETPEAHVFKADIPGLKKEQVKVEIEDDMVLQISGDRSVEKQDKNDNWHRVYRTIGKISMNCTLPENSXFDRVNASIENGVLTVIVRHEQVKEPDVXAVHISG

SEQ ID NO: 21965 - protein, 102 aa, Glycine max
YNITAHVFKADIPGLKKEEVKVQIEDDKVLQISGERNVEKEDKNDTWHRVERSSGKFMRRFRLPENAKVEQVKASMENGVLTVTVPKEEVKKPDVKAIEISG

SEQ ID NO: 21966 - protein, 113 aa, Glycine max
  unsure (1)..(113): unsure at all Xaa locations
MSLIRRSNVFDPFSLDFFDPFDGFPFGSGSSNSGGSLVPRTSSDTAAFAGARIDWKETPEAHVFKADVPGLKKEEVKVEVEDGXILQISGERIKEQEEKTDTWHRVERSSGXF

SEQ ID NO: 21967 - protein, 143 aa, Medicago sativa
DPFSLDVWDPFKDFPFTNSALSASSFPQENSAFVSTRIDWKETPEAHVFKADLPGLKKEEVKVEIEDDRVLQISGERNVEKEDKNDQWHRVERSSGKFMRRFRLPENAKMDQVKAAMENGVLTVTVPKEEIKKPEVKSIEISS

SEQ ID NO: 21968 - protein, 155 aa, Pisum sativum
IIPRVFGTGRRTNAFDPFSLDLWDPFQNFQLARSATGTTNETAAFANAHIDWKETPEAHVFKADLPGVKKEEVKVEIEEDRVLKISGERKTEKEDKNDTWHRVERSQGSFLRRFRLPENAKVDQVKAAMENGVLTVTVPKEEVKKPEAKPIQITG

SEQ ID NO: 21969 - protein, 158 aa, Pisum sativum
MSLIPSFFSGRRSNVFDPFSLDVWDPLKDFPFSNSSPSASFPRENPAFVSTRVDWKETPEAHVFKADLPGLKKEEVKVEVEDDRVLQISGERSVEKEDKNDEWHRVERSSGKFLRRFRLPENAKMDKVKASMENGVLTVTVPKEEIKKAEVKSIEISG

SEQ ID NO: 21970 - protein, 158 aa, Pisum sativum
MSLIPSFFGNRRSNVYDPFSLDVWDPLKDFPFPSSALSASFPRENSAFVSTRVDWKETPEAHVFKADLPGLKKEEVKVEVEDDRVLQISGERSVEKEDKNDEWHRVERSSGKFLRRFRLPENAKMGQVKASMENGVLTVTVPKEEIKKPDVKSIEISG

SEQ ID NO: 21971 - protein, 149 aa, Oryza sativa (japonica cultivar-group)
MSLVRRSNVFDPFADFWDPFDGVFRSLVPATSDRDTAAFANARVDWKETPESHVFKADLPGVKKEEVKVEVEEGNVLVISGQRSKEKEDKNDKWHRVERSSGQFMRRFRLPENAKVDQVKASMENGVLTVTVPKAEVKKPEVKAIEISG

SEQ ID NO: 21972 - protein, 154 aa, Lycopersicon esculentum
MSLIPRIFGDRRSSSMFDPFSIDVFDPFRELGFPGTNSGESSAFANTRIDWKETPEAHVFKADLPGLKKEEVKVEVEEDRVLQISGERNVEKEDKNDKWHRVERSSGKFMRRFRLPENAKMDQVKASMENGVLTVTVPKEEVKKPEVKSIEISG

SEQ ID NO: 21973 - protein, 154 aa, Lycopersicon esculentum
MSLIPRIFGDRRSSSMFDPFSIDVFDPFRELGFPSTNSGESSAFANTRIDWKETPEAHVFKVDLPGLKKEEVKVEVEEDRVLQISGERNVEKEDKNDKWHRMERSSGKFMRRFRLPENAKMDQVKASMENGVLTVTVPKEEVKKPEVKSIEISG

SEQ ID NO: 21974 - protein, 154 aa, Lycopersicon esculentum
MSLIPRIFGDRRSSSMFDPFSIDVFDPFRELGFPSTNSGESSAFANTRIDWKETPEPHVFKVDLPGLKKEEVKVEVEEDRVLQISGERNVEKEDKNDKWHRMERSSGKFMRRFRLPENAKMDQVKASMENGVLTVTVPKEEVKKPEVKSIEISG

SEQ ID NO: 21975 - protein, 154 aa, Lycopersicon esculentum
MSLIPRIFGDRRSSSMFDPFSIDVFDPFRELGFPSTNSGESSAFANTRIDWKETPEAHVFKVDLPGLKKEEVKEEVEEDRVLQISGERNVEKEDKNDKWHRMERSSGKFMRRFRLPENAKMDQVKASMENGVLTVTVPKEEVKKPEVKPIEISG

SEQ ID NO: 21976 - protein, 154 aa, Lycopersicon peruvianum
MSLIPRIFGDRRSSSMFDPFSIDVFDPFRELGFPGTNSRETSAFANTRIDWKETPEAHVFKADLPGLKKEEVKVEIEEDRVLQISGERNVEKEDKNDTWHRVERSSGKFMRRFRLPENAKMDQVKASMENGVLTVTVPKEEVKKPDVKSIEISG

SEQ ID NO: 21977 - protein, 154 aa, Lycopersicon peruvianum
MSLIPRIFGDRRSTSVFDPFSIDVFDPFKELGFTVSNSGETSAFANTRIDWKETPEAHVFKADLPGLKKEEVKVEVEEDRVLQISGERNVEKEDKNDTWHRVERSSGKFMRRFRLPENAKMDQVKASMENGVLTVTVPKEEVNNPDVKSIEISG

SEQ ID NO: 21978 - protein, 154 aa, Lycopersicon peruvianum
MSLIPRIFGDRRSSSMFDPFSIDVFDPFRELGFPGTNSGETSAFANTRIDWKETPEAHVFKADLPGLKLEEVKVEVEEDRVLQISGERNMEKEDKNDKWQRVERSSGKFMRRFRLPENAKMDQVKASMENGVLTVTVPKEEMKKPDVKSIEISG

SEQ ID NO: 21979 - protein, 159 aa, Nicotiana tabacum
MSLIPSFFDGRRSNIFDPFSLNIWDPFEGFPFSGTVANIPTSTRETAAFSSARIDWKETPESHVFKVDLPGIKKEEVKVEVEEGRVLQISGERSREQEEKNDKWHSMERSSGKFLRRFRLPENIKMEEIKATMENGVLTVTVPKMEEKKPEVKAIDISG

SEQ ID NO: 21980 - protein, 159 aa, Nicotiana tabacum
MAMIPSFFGGRRSNIFDPFSLDIFDPFEGFPFSGTVANVPSSARETSAFANARIDWKETPDSHIFKMDVPGIKKEEVKVEVEEGRVLQISGERSREQEEKNDTWHRMERSSGKFMRRFRLPGNAKMEEIKAAMENGVLTVTVPKEEEKKSEVKAIDISG

SEQ ID NO: 21981 - protein, 155 aa, Helianthus annuus
MSIIPSLFAGRRSSVFDPFSLDVWDPFRDFPISSSSDVSRETSALVNARVDWKETPEAHVFKADLPGIKKEEVKVEVEDGNILQITGERNVEKEDKNDKWHRVERSSGKFTRRFRLPENAKMDQVKAAMENGVLTITVPKEEVKKPDVKSIEISG

SEQ ID NO: 21982 - protein, 157 aa, Helianthus annuus
MSIVSSLFGGRRSSVFDPFSLDVWDPFRDFPISSSSDVSRETSALVNARVDWKETPEAHVFKADLPGIKKEEVKVEVEDGNILKITGERNIEKEDKNDKWHRVERSSGKFTRRFRLPENAKMDQVKAAMENGVLTITVPKEEVKKPDVKSIGDLWLE

SEQ ID NO: 21983 - protein, 177 aa, Helianthus annuus
MSIVPSLFGSRRSSIFDPFSLYVWDPFRDFPISTSSEVSRETSALVNARVDWKETPEAHVFKADLPGIKKEEVKVEVEDGNILQITGERNVEKEDKNDKWHRVERSSGKFTRRFRLPENAKMDQVKAAMENGVLTITVPKEEAKKPDVKSIEISVKKIYEFARFIVLDRLYDLYVFI

SEQ ID NO: 21984 - protein, 163 aa, Helianthus annuus
MSIIPNFFGRRRTNCFDPFSLDVWDPFEGFPFNNNNFGSLSDQVRSSSETSSFVNANVDWRETNDAHVFKADVPGLKKEEVKVEVEDDRVLQISGERNKESEEKGDTWHRVERSSGKFVRRFRLPENAKVDQVKAAMENGVLTVTVPKVEVKKPDVKSIQISG

SEQ ID NO: 21985 - protein, 156 aa, Helianthus annuus
MSIIPSFFTGNGSNIFDPFSSEIWDPFQGLSSVINNLPESSRETTAIANTRIDWKETPEAHVFKADLPGLKKEEVKVEVEEGRVLQISGERSRENVEKNDKWHRMERSSGKFLRRFRLPENAKMDQVKAAMENGVLTVTVPKAEVKKPEVKAIDIS

SEQ ID NO: 21986 - protein, 153 aa, Helianthus annuus
MSIIPSFFTSKRSNIFDPFSLDTWDPFQGIISTEPARETAAIVNARIDWKETPEAHVLKADLPGMKKEEVKVEVEDGRVLQISGERCREQEEKDDTWHRVERSSGKFIRRFRLPENAKMDEVKAMMENGVLTVVVPKEEEEKKPMVKAIDISG

SEQ ID NO: 21987 - protein, 150 aa, Oryza sativa
MSLVRRSNVFDPFSLDLWDPFDSVFRSVVPATSDNDTAAFANARIDWKETPESHVFKADLPGVKKEEVKVEVEEGNVLVISGQRSKEKEDKNDKWHRVERSSGQFMRRFRLPENAKVDQVKAGLENGVLTVTVPKAEVKKPEVKAIEISG

SEQ ID NO: 21988 - protein, 150 aa, Oryza sativa; identical to SEQ ID NO: 21987

SEQ ID NO: 21989 - protein, 150 aa, Oryza sativa
MSLVRRSNVFDPFSLDLWDPFDSVFRSVVPATSDNDTAAFANARIDWKETPESHVFKADLPGVKKEEVKVEVEEGNVLVISGQRSKEKEDKNDKWHRVERSSGQFMRRFRLPENAKVDQVKAGMENGVLTVTVPKAEVKKPEVKAIEISG

SEQ ID NO: 21990 - protein, 150 aa, Oryza sativa; identical to SEQ ID NO: 21989

SEQ ID NO: 21991 - protein, 149 aa, Oryza sativa
MSLVRRSNVFDPFADFWDPFDGVLRSLVPATSDRDTAAFANARVDWKETPESHVFKADLPGVKKEEVKVEVEEGNVLVISGQRSKEKEDKNDKWHRVERSSGQFMRRFRLPENAKVDQVKASMENGVLTVTVPKAEVNKPEVKAIEISG

SEQ ID NO: 21992 - protein, 149 aa, Oryza sativa; identical to SEQ ID NO: 21991

SEQ ID NO: 21993 - protein, 151 aa, Triticum aestivum
MSIVRRSNVFDPFADLWADPFDTFRSIVPAISGGSSETAAFANARVDWKETPEAHVFKVDLPGVKKEEVKVEVEDGNVLVVSGERSREKEDKNDKWHRVERSSGKFVRRFRLPEDAKVEEVKAGLENGVLTVTVPKAEVKKPEVKAIEISG

SEQ ID NO: 21994 - protein, 151 aa, Triticum aestivum; identical to SEQ ID NO: 21993

SEQ ID NO: 21995 - protein, 151 aa, Triticum aestivum
MSIVRRSNVFDPFADLWADPFDTFRSIVPAISGGSSETAAFANARMDWKETPEAHVFKADLPGVKKEEVKVEVEDGNVLVVSGERTKEKEDKNDKWHRVERSSGKFVRRFRLPEDAKVEEVKAGLENGVLTVTVPKAEVKKPEVKAIEISG

SEQ ID NO: 21996 - protein, 151 aa, Triticum aestivum
MSIVRRSNVFDPFADLWADPFDTFRSIVPAISGGNSETAAFANARVDWKETPEAHVFKADLPGVKKEEVKVEVEDGNVLVVSGERTKEKEDKNDKWHRMERSSGKFVRRFRLPEDAKVEEVKAGLENGVLTVTVPKAEVKKPEVKAIEISG

SEQ ID NO: 21997 - protein, 151 aa, Triticum aestivum
MSIVRRSNVFDPFADLWADPFDTFRSIVPAISGGGSETAAFANARMDWKETPEAHVFKADLPGVKKEEVKVEVEDGNVLVVSGERTKEKEDKNDKWHRVERSSGKFVRRFRLLEDAKVEEVKAGLENGVLTVTVPKAEVKKPEVKAIQISG

SEQ ID NO: 21998 - protein, 151 aa, Triticum aestivum
  unsure (1)..(151): unsure at all Xaa locations
MSIVRRSSVFDPFADLWADPFDTFRSIIPAISGGNSETAAFANARMDWKETPEAHVFKADLPGVKKEEVKVEVEDGNVLVVSGERTKEKEDKNDKWHRVERSSGKFVRRFRLPEDAKVEEVKAGLENGVLTVTVPKAXVKKPEVKAIXISG

SEQ ID NO: 21999 - protein, 151 aa, Triticum aestivum
MSIVRRTNVFDPFADLWADPFDTFRSIVPAISGGGSETAAFANARMDWKETPEAHVFKADLPGVKKEEVKVEVEDGNVLVVSGERTKEKEDKNDKWHRVERSSGKFVRRFRLLEDAKVEEVKAGLENGVLTVTVPKAEVKKPEVKAIQISG

SEQ ID NO: 22000 - protein, 151 aa, Triticum aestivum; identical to SEQ ID NO: 21999

SEQ ID NO: 22001 - protein, 151 aa, Triticum aestivum
MSIVRRSNVFDPFADLWADPFDTFRSIVPAISCGSSETAAFANARVDWKETPEAHVFKADLPGVKKEEVKVEVEDGNVLVVSGERTKEEEDKNDKWHRVERSSGKFVRRFRLPEDAKVGEVKAGLENGVLTVTVPKAEVKKPEVKAIEISV

SEQ ID NO: 22002 - protein, 151 aa, Triticum aestivum
MSIVRRTNVFDPFADLWADPFDTFRSIVPAISGGTSETAAFANARVDWKETPEAHVFKADLPGVKKEEVKVEVEDGNVLVVSGERTKEEEDKNDKWHRVERSSGKFVRRFRLPEDAKVGEVKAGLENGVLTVTVPKAEVKKPEVKAIEISV

SEQ ID NO: 22003 - protein, 152 aa, Triticum aestivum
  unsure (1)..(152): unsure at all Xaa locations
MSIVRWSNVFDPFADLWADPFDTFRSIVPAISGGSSETAAFANARVDWKETPEAHVFKADLPGVKKEEVKVEVXEDGNVLVVSGERTKEKEDKNDKWHRVERSSGKFVRRFRLPEDAKVEEVKAGLENGVLTVTVPKAEVKKPQVKAIEISG

SEQ ID NO: 22004 - protein, 152 aa, Triticum aestivum
  unsure (1)..(152): unsure at all Xaa locations
MSIVRRSNVFDPFADLWADPFDTFRSIVPAISGGSSETAAFANARMDWKETPEAHVFKADLPGVKKEEVKVEVEDGNVLVVSGERTKEKEDKNDKWHRVERSSGKFVRRFRLXREDAKVEEVKAGLENGVLTVTVPKTEVKKPEVKAIEISG

SEQ ID NO: 22005 - protein, 143 aa, Schizosaccharomyces pombe
MSLQPFFGFPPTVNDLFSDFVSYSPRLNNQIPGELSPSIDVHEGKDTVSVDVELPGVKKEDVQVHYDSGKLTISGEVVNERKNESTEGNQRWSERRFGSFSRTITIPAKIDADRIEANFSNGLLTVTLPKVEKSQTKKQIAIK

SEQ ID NO: 22006 - protein, 154 aa, Desulfitobacterium hafniense
MLFMFDLVPFEGRNSGLPRKSRNLFDIDSIFENFFNDTLFPAFYNQSGQMRVDVRENEKEFIVEAELPGVNKEEIQIDCTEDRLTITVQKTESTEEQKDNYIRKERKASSMARSFAIANIRHEEITAKYENGLLTVTLPKHEKTAPKGKKIDIQ

SEQ ID NO: 22007 - protein, 229 aa, Toxoplasma gondii
MAPSASHPPGACPPGCTKHPATATAISPSGVCPMRAFHPAGPHSHFSCYDDLRNRLSHDKNVRPVASQQLDYLDEVSPFALAYYPPPFWGGVGLNPIDDMLFETALTANEMMEDITWRPRVDVEFDSKKKEMIILADLPGLQKDDVTIEVDNGAIVIKGEKTSKEAEKVDDGKTKNILTERVSGYFARRFQLPSNYKPDGISAAMDNGVLRVTIKVEDSGGAKQQISVK

SEQ ID NO: 22008 - protein, 229 aa, Toxoplasma gondii
MAPSASHPPGACPPGCTKHPATATAISPSGVCPMRAFHPAGPHSHFSCYDDLRNRLSHDKNVRPVASQQLDYLDEVSPFALAYYPPPFWGGVGLNPIDDMLFETALTANEMMEDITWRPRVDVEFDSKKKEMIILADLPGLQKDDVTIEVDNGAIVIKGEKTSKEAEKVDDGKTKNILTERVSGYFRARFQLPSNYKPDGISAAMDNGVLRVTIKVEDSGGAKQQISVK

SEQ ID NO: 22009 - protein, 73 aa, Quercus suber
SLDVWDPFEGFPPLSSHSNFPSETSSFAAAKLDWKETPNAHVFADVPGQKKEEVKVEIEDRRVLQISGERSQD

SEQ ID NO: 22010 - protein, 164 aa, Thermococcus sp. KS-1
MRKMVWRRDRYWDPFDIMREIQEEIDAIFRDFMRGPRLWSYREPGERIEVSETWREPFADIFDRGDRFVITVELPGVRKEDIKLRVTEDTVYIEAQMRREKELEQEGAIRIERYYSGYRRVIRLPEEVIPEKAKARYNNGVLEIEIPKKKPTKPEKEGVEVKIE

SEQ ID NO: 22011 - protein, 145 aa, Cytophaga hutchinsonii
MTIVKRNGHFPFIFDDFFNRQYNRGMADYSNTNTTIPAVNIKESAENFVIEVAAPGMNKKDFNVQVDGNVLTIRSEKTTEKEDANNEKYTTREFSYQSFVRTFNLPKDIADTDKIEAKYEDGVLHVLIPKKEKEKVKESRLVEVV

SEQ ID NO: 22012 - protein, 138 aa, Glycine max
  unsure (1)..(138): unsure at all Xaa locations
MSTVISCSLLSGRPAAAPSRSSSNRFPPTTGKAAAERQSRPSSVCCASNPKGDQHVPKTDLPPFSISPVALLRPGSPQGERWRIKEGPEAVSMWFEVPGLSKEDLVVELDEDVLVIRKMKAKAETAAGTTDAGGSASX

SEQ ID NO: 22013 - protein, 208 aa, Oryza sativa
LRNQAVPPQVDMSTVTSCTFLSIRPTVSSAGSLLSKKPAAFVSLASERKSRPLSPCFAISSNKPGDPKIDVSPFSISPVVLVNPVPVDGERWQVAENKDEVSLWFDVPGLSPADLIVEIDEDVLVIKKKKKASPKSNYNTPTSGAIADHQEATADEFSGGGIYARLLLPAGYSREGVQAKLTSGELKLTIGKVKESVRRKINVDISVK

SEQ ID NO: 22014 - protein, 197 aa, Oryza sativa
MSTVTSCTFLSIRPTVSSAGSLLSKKPAAFVSLASERKSRPLSPCFAISSNKPGDPKIDVSPFSISPVVLVNPVPVDGERWQVAENKDEVSLWFDVPGLSPADLIVEIDEDVLVIKKKKKASPKSNYNTPTSGAIADHQEATADEFSGGGIYARLLLPAGYSREGVQAKLTSGELKLTIGKVKESVRRKINVDISVK

SEQ ID NO: 22015 - protein, 163 aa, Oryza sativa
MSTVTSCTFLSIRPTVSSAGSLLSKKPAAFVSLASERKSRPLSPCFAISSNKPGDPKIDVSPFSISPVDLIVEIDEDVLVIKKKKKASPKSNYNTPTSGAIADHQEATADEFSGGGIYARLLLPAGYSREGVQAKLTSGELKLTIGKVKESVRRKINVDISVK

SEQ ID NO: 22016 - protein, 198 aa, Triticum aestivum
  unsure (1)..(198): unsure at all Xaa locations
MSTVISCSLLSGRPAAAPSRSSGNRFPPTTGKAAAERQSRPSSVCCASNPKGDQHVPKTDLPPFGISPVALLHPGSPQGERWGIQERADTVSMWFEVPGLSKEDLVVELDEDVLVIRKMKXXKAEIEAARADAVASGSSKDAAGAAAHDGDMYARLLVPAGYNKETIKAELASGVLKVHIRKVMECARRRINVNIAVK

SEQ ID NO: 22017 - protein, 205 aa, Vitis vinifera
QVVGTVVAVIVYVITAWWLMATIPNHCDTTMLPADSPWRCPMDNVFFDASVIWGLIGTRRIFGNLGAYSNVNWFFLLGAIAPLLVWLMHKAFPKKKWIPLIHMPVLLGSTAMMPPASAVNFTSWIIVGFLSGFVIFRLKPKLWERYNYVVSGGLDAGTAFMTILIFLTLGSGNVSIDWRGNNPEGCPLASCPTARGIVVDGCPVF

SEQ ID NO: 22018 - protein, 753 aa, Arabidopsis thaliana
MVGSLEVSKPPEHKVESKIVIADEEEEDENDSPIEEVRLTVPITDDPSLPVLTFRTWFLGMVSCVVLAFVNNFFGYRSNPLTVSSVVAQIITLPLGKLMATTLPTTKLRLPGTNWSCSLNPGPFNMKEHVLITIFANTGAGGAYATSILTIVKAFYHRNLNPAAAMLLVQTTQLLGYGWAGMFRKYLVDSPYMWWPANLVQVSLFRALHEKEEKREGKQTKLRFFLIVFFLSFTYYIVPGYLFPSISYLSFVCWIWTRSVTAQQIGSGLHGLGIGSFGLDWSTVAGFLGSPLAVPFFAIANSFGGFIIFFYIILPIFYWSNAYEAKKFPFYTSHPFDHTGQRYNTTRILNQKTFNIDLPAYESYSKLYLSILFALIYGLSFGTLTATISHVALFDGKFIWELWKKATLTTKDKFGDVHTRLMKKNYKEVPQWWFVAVLAASFVLALYACEGFGKQLQLPWWGLLLACAIAFTFTLPIGVILATTNQRMGLNVISELIIGFLYPGKPLANVAFKTYGSVSIAQALYFVGDFKLGHYMKIPPRSMFIVQLVATIVASTVSFGTTWWLLSSVENICNTDMLPKSSPWTCPGDVVFYNASIIWGIIGPGRMFTSKGIYPGMNWFFLIGFLAPVPVWFFARKFPEKKWIHQIHIPLIFSGANVMPMAKAVHYWSWFAVGIVFNYYIFRRYKGWWARHNYILSAALDAGTAVMGVLIYFALQNNNISLPDWWGNENTDHCPLANCPTEKGIVAKGCPVF

SEQ ID NO: 22019 - protein, 755 aa, Arabidopsis thaliana
MTSVFDEHKPSDDSHESKIVINGEEEVLEEENDNPIEEVRLTVPITDDPTLPVLTFRTWTLGLFSCILLAFVNQFFGFRSNQLWVSSVAAQIVTLPLGKLMAKTLPTKKFGFPGTNWSWSFNPGPFNMKEHVLITIFANTGAGGVYATSIITIVKAFYNRQLNVAAAMLLTQTTQLLGYGWAGIFRKFLVDSPYMWWPSNLVQVSLFRALHEKEDLQKGQQTRFRFFIIVFCVSFAYYIIPGYLFPSISAISFVCWIWKSSVTAQIVGSGLKGLGIGSFGLDWSTVAGFLGSPLAVPFFAIANFFGGFFIFLYIVLPIFYWTNAYDAQKFPFYTSHTFDQTGHTYNITRILNEKNFDINLDAYNGYSKLYLSVMFALLYGLSFGSLCATISHVALYDGKFIWGMWKKAKTATKDKYGDVHSRLMKKNYQSVPQWWFIAVLVISFAFALYACEGFDKQLQLPWWGLILACAIALFFTLPIGVIQATTNQQMGLNVITELIIGYLYPGKPLANVAFKTYGYISMSQALYFVGDFKLGHYMKIPPRSMFIVQLVATVVASTVCFGTTWWLITSVENICNVDLLPVGSPWTCPGDEVFYNASIIWGVIGPGRMFTKEGIYPGMNWFFLIGLLAPVPFWYLSKKFPEKKWLKQIHVPLIFSAVSAMPQAKAVHYWSWAIVGVVFNYYIFRRFKTWWARHNYILSAALDAGTAIMGVLIFFAFQNNDISLPDWWGLENSDHCPLAHCPLAKGVVVEGCPVF

SEQ ID NO: 22020 - protein, 729 aa, Arabidopsis thaliana
MATADEFSDEDTSPIEEVRLTVTNTDDPTLPVWTFRMWFLGLISCSLLSFLNQFFSYRTEPLVITQITVQVATLPIGHFLAKVLPKTRFGLPGCGSARFSLNPGPFNMKEHVLISIFANAGSAFGSGSAYAVGIITIIKAFYGRSISFIAGWLLIITTQVLGYGWAGLLRKYVVEPAHMWWPSTLVQVSLFRALHEKDDQRMTRAKFFVIALVCSFGWYIVPGYLFTTLTSISWVCWAFPRSVTAQQIGSGMRGLGLGAFTLDWTAVASFLFSPLISPFFAIANVFIGYVLLIYFVLPLAYWGFDSYNATRFPIFSSHLFTSVGNTYDIPAIVNDNFELDLAKYEQQGRINLSMFFALTYGLGFATIASTLTHVALFYGKEISERFRVSYKGKEDIHTRLMKRYKDIPSWWFYSMLAATLLISLALCVFLNDEVQMPWWGLVFASAMAFVFTLPISIITATTNQTPGLNIITEYAMGLIYPGRPIANVCFKVYGYMSMAQAVSFLNDFKLGHYMKIPPRSMFLVQFIGTILAGTINITVAWWQLNSIKNICQEELLPPNSPWTCPGDRVFFDASVIWGLVGPKRIFGSQGNYAAMNWFFLGGALGPVIVWSLHKAFPKRSWIPLVNLPVLLGATAMMPPATAVNYNSWILVGTIFNLFVFRYRKSWWQRYNYVLSAAMDAGVAFMAVLLYFSVGMEEKSLDWWGTRGEHCDLAKCPTARGVIVDGCPVK

SEQ ID NO: 22021 - protein, 729 aa, Arabidopsis thaliana
MATADEFSDEDTSPIEEVRLTVTNTDDPTLPVWTFRMWFLGLISCSLLSFLNQFFSYRTEPLVITQITVQVATLPIGHFLAKVLPKTRFGLPGCGSARFSLNPGPFNMKEHVLISIFANAGSAFGSGSAYAVGIITIIKAFYGRSISFIAGWLLIITTQVLGYGWAGLLRKYVVEPAHMWWPSTLVQVSLFRALHEKDDQRMTRAKFFVIALVCSFGWYIVPGYLFTTLTSISWVCWAFPRSVTAQQIGSGMRGLGLGAFTLDWTAVASFLFSPLISPFFAIANVFIGYVLLIYLVLPLAYWGFDSYNATRFPIFSSHLFTSVGKTYDIPAIVNDNFELDLAKYEQQGRINLSMFFALTYGLGFATIASTLTHVALFYGKEISERFRVSYKGKEDIHTRLMKRYKDIPSWWFYSMLAATLLISLALCVFLNDEVQMPWWGLVFASAMAFVFTLPISIITATTNQTPGLNIITEYAMGLIYPGRPIANVCFKVYGYMSMAQAVSFLNDFKLGHYMKIPPRSMFLVQFIGTILAGTINITVAWWQLNSIKNICQEELLPPNSPWTCPGDRVFFDASVIWGLVGPKRIFGSQGNYAAMNWFFLGGALGPVIVWSLHKAFPKRSWIPLVNLPVLLGATAMMPPATAVNYNSWILVGTIFNLFVFRYRKSWWQRYNYVLSAAMDAGVAFMAVLLYFSVGMEEKSLDWWGTRGEHCDLAKCPTARGVIVDGCPVK

SEQ ID NO: 22022 - protein, 766 aa, Arabidopsis thaliana
MEESEQVLPLLTNPKDLTNPSYASSSSSSSEPRDETEDLLLPISDENEEEEEENSPIRQVALTVPTTDDPSLPVLTFRMWVLGTLSCILLSFLNQFFWYRTEPLTISAISAQIAVVPLGRLMAAKITDRVFFQGSKWQFTLNPGPFNVKEHVLITIFANAGAGSVYAIHVVTVVKAFYMKNITFFVSFIVIVTTQVLGFGWAGIFRKYLVEPAAMWWPANLVQVSLFRALHEKEERTKGGLTRTQFFVIAFVCSFAYYVFPGYLFQIMTSLSWVCWFFPSSVMAQQIGSGLHGLGVGAIGLDWSTISSYLGSPLASPWFATANVGVGFVLVIYVLVPICYWLDVYKAKTFPIFSSSLFSSQGSKYNITSIIDSNFHLDLPAYERQGPLYLCTFFAISYGVGFAALSATIMHVALFHGREIWEQSKESFKEKKLDVHARLMQRYKQVPEWWFWCILVTNVGATIFACEYYNDQLQLPWWGVLLACTVAIIFTLPIGIITAITNQAPGLNIITEYIIGYIYPGYPVANMCFKVYGYISMQQAITFLQDFKLGHYMKIPPRTMFMAQIVGTLISCFVYLTTAWWLMETIPNICDSVTNSVWTCPSDKVFYDASVIWGLIGPRRIFGDLGLYKSVNWFFLVGAIAPILVWLASRMFPRQEWIKLINMPVLISATSSMPPATAVNYTTWVLAGFLSGFVVFRYRPNLWQRYNYVLSGALDAGLAFMGVLLYMCLGLENVSLDWWGNELDGCPLASCPTAPGIIVEGCPLYT

SEQ ID NO: 22023 - protein, 733 aa, Arabidopsis thaliana
MKDFTDTISESECDDEISIVPQVELTVPKTDDPTSPTVTFRMWVLGITACVLLSFLNQFFWYRTNPLTISSVSAQIAVVPIGHLMAKVLPTRRFFEGTRWSFTMNPGPFSTKEHVLITVFANSGSGAVYATHILSAVKLYYKRRLDFLPALLVMITTQVLGFGWAGLYRKHLVEPGEMWWPSNLVQVSLFRALHEKENKSKWGISRNQFFVITLITSFSYYLLPGYLFTVLTTVSWLCWISPKSILVNQLGSGSAGLGIGSFGLDWSTIASYLGSPLASPFFASANIAAGFFLVMYVITPLCYYLDLYNAKTFPIYSGKLFVASGKEYKVTSIIDANFRLDRQAYAETGPVHMSTFFAVTYGLGFATLSASIFHVLIFNGKDLWTQTRGAFGKNKKMDIHTKIMKRNYKEVPLWWFLSIFAVNLAVIVFICIYYKTQIQLPWWGAFLACLIAIFFTPLVGVIMATTNQAPGLNIITEYIIGYAYPERPVANICFKTYGYISMSQSLTFLSDLKLGTYMKIPPRTMFMAQVVGTLVAVIAYAGTAWWLMAEIPNLCDTNLLPPGSQWTCPSDRVFFDASVIWGLVGPRRMFGDLGEYSNINWFFVGGAIAPALVYLASRLFPNKKWISDIHIPVLIGATAIMPPASAVNFTSWLVMAFVFGHFVFKYRREWWQRYNYVLSGGMDAGTGFMSVLLFLALQRSEIAIDWWGNSGEGCPVAKCPTAKGVVVHGCPVF

SEQ ID NO: 22024 - protein, 734 aa, Arabidopsis thaliana
MAAIELHKPEINADDDDDESPVEQVRLTVSNHDDPSLPVWTFRMWFLGLLSCILLSFLNTFFGYRTQPLMITMISVQVVTLPLGKLMARVLPETKYKIGSWEFSFNPGPFNVKEHVLISMFANAGAGFGSGTAYAVGIVDIIMAFYKRKISFLASWILVITTQILGYGWAGIMRKLVVDPAQMWWPTSVLQVSLFRALHEKDNARMSRGKFFVIAFVCSFAWYIFPAYLFLTLSSISWVCWAFPKSITAQQLGSGMSGLGIGAFALDWSVIASYLGSPLVTPFFAIVNVLVGYVLVMYMVIPISYWGMNVYEANKFPIFSSDLFDKQGQLYNISTIVNNKFELDMENYQQQGRVYLSTFFAISYGIGFAAIVSTLTHVALFNGKGIWQQVRASTKAKMDIHTRLMKKYKDIPGWWFYSLLAISLVLSLVLCIFMKDEIQMPWWGLLLASFMALTFTVPVSIITATTNQTPGLNIITEYLMGVLLPGRPIANVCFKTYGYISMSQAISFLNDFKLGHYMKIPPRSMFLVQFIGTVIAGTVNISVAWYLLTSVENICQKELLPPNSPWTCPSDRVFFDASVIWGLVGPKRIFGRLGNYPALNWFFLGGLIGPVLVWLLQKAFPTKTWISQINLPVLLGATAAMPPATSVNFNCWIIVGVIFNYFVFKYCKKWWQRYNYVLSAALDAGLAFMGVLLYFSLTMNGISINHWWGAKGENCPLASCPTAPGVLVDGCPVF

SEQ ID NO: 22025 - protein, 736 aa, Arabidopsis thaliana
MGEIATEFTPVMDDDDDRCVVPEVELTVPKTDDSTLPVLTFRMWVLGIGACIVLSFINQFFWYRTMPLSITGISAQIAVVPLGHLMARVLPTKRFLEGTRFQFTLNPGAFNVKEHVLITIFANSGAGSVYATHILSAIKLYYKRSLPFLPAFLVMITTQILGFGWAGLFRKHLVEPGEMWWPSNLVQVSLFGALHEKEKKSRGGMSRTQFFLIVLVASFAYYIFPGYLFTMLTSISWVCWLNPKSILVNQLGSGEHGLGIGSIGFDWVTISAYLGSPLASPLFASVNVAIGFVLVMYIVTPVCYWLNIYDAKTFPIFSSQLFMGNGSRYDVLSIIDSKFHLDRVVYSRTGSINMSTFFAVTYGLGFATLSATIVHVLVFNGSDLWKQTRGAFQKNKKMDIHTRIMKKNYREVPLWWFLVILLLNIALIMFISVHYNATVQLPWWGVLLACAIAISFTPLIGVIAATTNQAPGLNIITEYVIGYIYPERPVANMCFKVYGYISMTQALTFISDFKLGHYMKIPPRSMFMAQVAGTLVAVVVYTGTAWWLMEEIPHLCDTSLLPSDSQWTCPMDRVFFDASVIWGLVGPRRVFGDLGEYSNVNWFFLVGAIAPLLVWLATKMFPAQTWIAKIHIPVLVGATAMMPPATAVNFTSWLIVAFIFGHFIFKYRRVWWTKYNYVLSGGLDAGSAFMTILLFLALGRKGIEVQWWGNSGDRDTCPLASCPTAKGVVVKGCPVF

SEQ ID NO: 22026 - protein, 741 aa, Arabidopsis thaliana
MDEIVEDSSRVMEIEGQNDDLDRCVVEEVELTVPKTDDPTLPVLTFRMWTLGLGACIILSFINQFFWYRQMPLTISGISAQIAVVPLGHLMAKVLPTRMFLEGSKWEFSMNPGPFNVKEHVLITIFANSGAGTVYATHILSAIKLYYKRSLPFLPAFLLMITTQFLGFGWAGLFRKHLVEPGEMWWPSNLVQVSLFSALHEKEKKKKGGMTRIQFFLIVLVTSFAYYILPGYLFTMITSISWICWLGPKSVLVHQLGSGEQGLGIGAIGIDWATISSYLGSPLASPLFATINVTIGFVVIMYVATPICYWLNIYKAKTYPIFSSGLFMGNGSSYDVLSIIDKKFHLDRDIYAKTGPINMSTFFAVTYGLGFATLSATIVHVLLFNGRDLWKQTRGAFQRNKKMDFHTRIMKKNYREVPMWWFYVILVLNIALIMFISFYYNATVQLPWWGVLLACAIAVFFTPLIGVIAATTNQEPGLNVITEYVIGYLYPERPVANMCFKVYGYISMTQALTFIQDFKLGLYMKIPPRSMFMAQVVGTLVSVVVYTGTAWWLMVDIPHLCDKSLLPPDSEWTCPMDRVFFDASVIWGLVGPRRMFGNLGEYAAINWFFLVGAIAPFFVWLATKAFPAHKWISKIHFPVILGATSMMPPAMAVNFTSWCIVAFVFGHFLYKYKRQWWKKYNYVLSGGLDAGTAFMTILIFLSVGRKGIGLLWWGNADDSTNCSLASCPTAKGVIMHGCPVL

SEQ ID NO: 22027 - protein, 737 aa, Arabidopsis thaliana
MDAEKATDKTNVHLSSDHERCPVEEVALVVPETDDPSLPVMTFRTWFLGLTSCVLLIFLNTFFTYRTQPLTISAILMQIAVLPIGKFMARTLPTTSHNLLGWSFSLNPGPFNIKEHVIITIFANCGVAYGGGDAYSIGAITVMKAYYKQSLSFICGLFIVLTTQILGYGWAGILRRYLVDPVDMWWPSNLAQVSLFRALHEKENKSKGLTRMKFFLVALGASFIYYALPGYLFPILTFFSWVCWAWPNSITAQQVGSGYHGLGVGAFTLDWAGISAYHGSPLVAPWSSILNVGVGFIMFIYIIVPVCYWKFNTFDARKFPIFSNQLFTTSGQKYDTTKILTPQFDLDIGAYNNYGKLYLSPLFALSIGSGFARFTATLTHVALFNGRDIWKQTWSAVNTTKLDIHGKLMQSYKKVPEWWFYILLAGSVAMSLLMSFVWKESVQLPWWGMLFAFALAFIVTLPIGVIQATTNQQPGYDIIGQFIIGYILPGKPIANLIFKIYGRISTVHALSFLADLKLGHYMKIPPRCMYTAQLVGTVVAGVVNLGVAWWMLESIQDICDIEGDHPNSPWTCPKYRVTFDASVIWGLIGPRRLFGPGGMYRNLVWLFLIGAVLPVPVWALSKIFPNKKWIPLINIPVISYGFAGMPPATPTNIASWLVTGTIFNYFVFNYHKRWWQKYNYVLSAALDAGTAFMGVLLFFALQNAGHDLKWWGTEVDHCPLASCPTAPGIKAKGCPVF

SEQ ID NO: 22028 - protein, 737 aa, Arabidopsis thaliana
MDAEKATDKTNVHLSSDHERCPVEEVALVVPETDDPSLPVMTFRAWFLGLTSCVLLIFLNTFFTYRTQPLTISAILMQIAVLPIGKFMARTLPTTSHNLLGWSFSLNPGPFNIKEHVIITIFANCGVAYGGGDAYSIGAITVMKAYYKQSLSFICGLFIVLTTQILGYGWAGILRRYLVDPVDMWWPSNLAQVSLFRALHEKENKSKGLTRMKFFLVALGASFIYYALPGYLFPILTFFSWVCWAWPNSITAQQVGSGYHGLGVGAFTLDWAGISAYHGSPLVAPWSSILNVGVGFIMFIYIIVPVCYWKFNTFDARKFPIFSNQLFTTSGQKYDTTKILTPQFDLDIGAYNNYGKLYLSPLFALSIGSGFARFTATLTHVALFNGRDIWKQTWSAVNTTKLDIHGKLMQSYKKVPEWWFYILLAGSVAMSLLMSFVWKESVQLPWWGMLFAFALAFIVTLPIGVIQATTNQQPGYDIIGQFIIGYILPGKPIANLIFKIYGRISTVHALSFLADLKLGHYMKIPPRCMYTAQLVGTVVAGVVNLGVAWWMLESIQDICDIEGDHPNSPWTCPKYRVTFDASVIWGLIGPRRLFGPGGMYRNLVWLFLIGAVLPVPVWALSKIFPNKKWIPLINIPVISYGFAGMPPATPTNIASWLVTGTIFNYFVFNYHKRWWQKYNYVLSAALDAGTAFMGVLLFFALQNAGHDLKWWGTEVDHCPLASCPTAPGIKAKGCPVF

SEQ ID NO: 22029 - protein, 722 aa, Arabidopsis thaliana
MAAIELHKPEINADDDDDESPVEQVRLTVSNHDDPSLPVWTFRMWFLGLLSCILLSFLNTFFGYRTQPLMITMISVQVVTLPLGKLMARVLPETKYKIGSWEFSFNPGPFNVKEHVLISMFANAGAGFGSGTAYAVGIVDIIMAFYKRKISFLASWILVITTQDNARMSRGKFFVIAFVCSFAWYIFPAYLFLTLSSISWVCWAFPKSITAQQLGSGMSGLGIGAFALDWSVIASYLGSPLVTPFFAIVNVLVGYVLVMYMVIPISYWGMNVYEANKFPIFSSDLFDKQGQLYNISTIVNNKFELDMENYQQQGRVYLSTFFAISYGIGFAAIVSTLTHVALFNGKGIWQQVRASTKAKMDIHTRLMKKYKDIPGWWFYSLLAISLVLSLVLCIFMKDEIQMPWWGLLLASFMALTFTVPVSIITATTNQTPGLNIITEYLMGVLLPGRPIANVCFKTYGYISMSQAISFLNDFKLGHYMKIPPRSMFLVQFIGTVIAGTVNISVAWYLLTSVENICQKELLPPNSPWTCPSDRVFFDASVIWGLVGPKRIFGRLGNYPALNWFFLGGLIGPVLVWLLQKAFPTKTWISQINLPVLLGATAAMPPATSVNFNCWIIVGVIFNYFVFKYCKKWWQRYNYVLSAALDAGLAFMGVLLYFSLTMNGISINHWWGAKGENCPLASCPTAPGVLVDDFTVFFFFLKIFVPFVNKNRLNDFLSMYLLY

SEQ ID NO: 22030 - protein, 691 aa, Arabidopsis thaliana
MDAEKATDKTNVHLSSDHERCPVEEVALVVPETDDPSLPVMTFRACHSPSQPSLMQIAGLPIGKFMARTLPTTSHNLLGWSFSLNPGPFNIKEHVIITIFANCGVAYGGGDAYSIGAITVMKAYYKQSLSFICGLFIVLTTQILGYGWAGILRRYLVDPVDMWWPSNLAQVSLFRALHEKENKSKGLTRMKFFLVALGASFIYYALPGYLFPILTFSSWVCWAWPNSITAQQVGSGYHGLGVGAFTLDWAGISAYHGSPLVAPWSSILNVGVGFIMFIYIIVPVCYWKFNTFDARKFPISSNQLFTTSGQKYDTTKILTPQFDLDIGAYNNYGKLYLSPLFALSIGSGFARFTATLTHVALFNGRDIWKQTWSAVNTTKLDIHGKLMQSYKKVPEWWFYILLAGSVAMSLLMSFVWKESVQLPWWGMLFAFALAFIVTLPIGVIQATTNQQPGYDIIGQFIIGYILPGKPIANLIFKIYGRISTVHALSFLADLKLGHYMKIPPPCMYTAQLVGTVVAGVVNLGVAWWMLESIQDICDIEGDHPNSPWTCPKYRVTFDASVIWGLIGPRRLFGPGGMYRNLVGFFLIGAVLPVPRVGAEQDLPKQEVDPSHQHSSYLLRLCRDASSHSNQHCQLVGHRNHLQLLCVQLPQEMVAEVQLRTLCSARCRDRVHGGALVLRPAECWTRPQMVGH

SEQ ID NO: 22031 - protein, 637 aa, Arabidopsis thaliana
MQIAGLPIGKFMARTLPTTSHNLLGWSFSLNPGPFNIKEHVIITIFANCGVAYGGGDAYSIGAITVMKAYYKQSLSFICGLFIVLTTQILGYGWAGILRRYLVDPVDMWWPSNLAQVSLFRALHEKENKSKGLTRMKFFLVALGASFIYYALPGYLFPILTFSSWVCWAWPNSITAQQVGSGYHGLGVGAFTLDWAGISAYHGSPLVAPWSSILNVGVGFIMFIYIIVPVCYWKFNTFDARKFPISSNQLFTTSGQKYDTTKILTPQFDLDIGAYNNYGKLYLSPLFALSIGSGFARFTATLTHVALFNGRDIWKQTWSAVNTTKLDIHGKLMQSYKKVPEWWFYILLAGSVAMSLLMSFVWKESVQLPWWGMLFAFALAFIVTLPIGVIQATTNQQPGYDIIGQFIIGYILPGKPIANLIFKIYGRISTVHALSFLADLKLGHYMKIPPPCMYTAQLVGTVVAGVVNLGVAWWMLESIQDICDIEGDHPNSPWTCPKYRVTFDASVIWGLIGPRRLFGPGGMYRNLVGFFLIGAVLPVPRVGAEQDLPKQEVDPSHQHSSYLLRLCRDASSHSNQHCQLVGHRNHLQLLCVQLPQEMVAEVQLRTLCSARCRDRVHGGALVLRPAECWTRPQMVGH

SEQ ID NO: 22032 - protein, 742 aa, Glycine max
  unsure (1)..(742): unsure at all Xaa locations
MAVAAKSSSTHAEKAANGESSAERCPENEVALQFPETDDPSLTVMTLLAWLLRIASCVLLIFLNTFFTLRTQPLTIXCLCMHIAVLPIGRFMGSTLPTKXYRFLGWSLTFNPGPFNMKEHVIITIFANCRVSFGGGDPYSIGAITVMKAYYKHRLSFLCALFIVLTTQMLRYGWAGILRRYLVDPVEMWWPANLAQVSLFRALHEKEPKSKGLTRMQFFLIAMGASFLYYALPGYLFMVLTFFSWICWAWPHNITAQQIGSGYHGLGIGAFTLDWAGISAYHGSPLVSPWSSIVNVGIGFIMFIYIIVPVCYWKFNTFDAHKFPIFSNQLFTASGHKYDTTKILTPEYDLNVDAYNKYSKLYLSPLFALSIGSGFARFTATLTHVALFYGRDIWRQSRSAMSNAKLDIHGRLMKAYKQVPEWWFLSILFGSMALSLLMAFVWKTDVQLPWWGMLFAFGLAFIVTLPIGVIQATTNQQPGYDIIAQFMIGYVLPGQPIANLLFKIYGRISTVHALSFLSDLKLGHYMKIPPRCMYTAQLVGTLVAGVVNLAVAWWMLDSIKDICMDDKVHHDSPWTCPKYRVTFDASVIWGLIGPKRLFGPGGLYRNLVWLFLIGAVLPVPIWVLSKIFPEKKWIPLINIPVITYGFAGMPPATPANIASWLVTGMIFNYFVFRYNKRWWQKYNYVLSAALDAGTAFMGVLIFFALQNAGHNLKWWGSELDHCPLATCPTAPGIEVEGCPVFK

SEQ ID NO: 22033 - protein, 441 aa, Glycine max
  unsure (1)..(441): unsure at all Xaa locations
XLIVYVVIPVSYWGLNVYNANRFPIFSSHLFTAQGQKYNIPKIVDNHFELNVAEYEKQGSSRFGSSFALTYGFGFATIASTLTHVVCFYGREIMERYRASSKGKEDIHTKLMRRYKDIPSWWFHSLLLVTLLVSLALCIFLKDQVQMPWWGLLFAGVLAFGFTLPISIITATTNQTPGLNIITEYVFGLIYPGRPIANVCFKTYGYISMAQAVSFLSDFKLGHYIIHFVHTCIYVXFIGTMLAGTINIGVAWWLLNSIKNICHDDLLPEGSPWTCPGDRVFFDASVIWGLVGPKRIFGSQGNYSAMNWFFLGGAVGPIIVWLLHKAFPKQSWIPLINLPVLLGATGXMMPPATPLNYNAWIFVGTIFNFFIFRYRKKWWQRYNYVLSAALDSGVAFMTVLLYFALGLENKSLNWWGNDGEHCPLAVCPTAKGVIVDGCPAN

SEQ ID NO: 22034 - protein, 440 aa, Glycine max
  unsure (1)..(440): unsure at all Xaa locations
XLIVYVVIPVSYWGLNVYNANRFPIFSSHLFTAQGQKYSSPKIVDNHFELNVAEYEKQGTSRLGVSFALTYGFGFATIASTLTHVVCFYGREIMERYRASSKGKEDIHTKLMRRYKDIPSWWFHSLLLVTLLVSLALCIFLKDQVQMPWWGLLFAGVLAFGFTLPISIITATTNQTPGLNIITEYVFGLIYPGRPIANVCFKTYGYISMAQAVSFLSDFKLGHXCIHFVHTCIYVXFIGTMLAGTINIGVAWWLLNSIKNICHDDLLPEGSPWTCPGDRVFFDASVIWGLVGPKRIFGSQGNYSAMNWFFLGGAVGPIIVWLLHKAFPKQSWIPLINLPVLLGATGMMPPATPLNYNAWIFVGTIFNFFIFRYRKKWWQRYNYVLSAALDSGVAFMTVLLYFALGLENKSLNWWGNDGEHCPLAVCPTAKGVIVDGCPAN

SEQ ID NO: 22035 - protein, 339 aa, Glycine max
  unsure (1)..(339): unsure at all Xaa locations
XDVHTRIMKRNYEQVPEWWFVSILLLMIVVALITCEGFGKQLQLPWWGVLMSLVIALVFTLPIGVIQATTNMQVGLNVITELIIGYIYPGRPLANVAFKTYGYISMSQALGFLQDFKLGHYMKIPPKSMFAVQLVGTIVASGVYLGTAWWLLTTIPDICDDANLPAGSPWTCPGDEVFYNASIIWGIVGPQRMFTKDGIYPGMNWFFLIGLLAPVPVWMLSRKFPNHKWIELINMPLIIAGSGGIPPARSVNYITWGMVGILFNFYVYNKFKAWWARHNYILSAALDAGVAFMGVILYFALQYYDIFGPTWWGQDADDHCPLAKCPTAPGIISHGCPVL

SEQ ID NO: 22036 - protein, 340 aa, Glycine max
  unsure (1)..(340): unsure at all Xaa locations
XDVHXTRIMKRNYEQVPEWWFVSILLLMIVVSLITCEGFGKQLQLPWWGVLMSLVIALVFTLPIGVIQATTNTQVGLNVITELIIGYIYPGRPLANVAFKTYGYISMSQALGFLQDFKLGHYMKIPPKSMFVVQLVGTIVASGVYFGTAWWLLTSIPHICDETSLPAGSPWTCPGDEVFYNASIIWGVVGPQRMFTKDGIYPGMNWFFLIGLLAPVPVWLLARKFPNHKWIELINMPLMIAGGGGIPPARSVNYITWGLVGIFFNFYVYSKFKAWWARHTYILSAALDAGVAFMGVILYFALQNYGVFGPIWWGQDADDHCPLAKCPTAPGIISHGCPVL

SEQ ID NO: 22037 - protein, 277 aa, Glycine max
  unsure (1)..(277): unsure at all Xaa locations
XNQQPGLNIITEYIIGYMYPERPVANMCFKVYGYISMVQALTFLQDFKLGHYMKIPPRTMFMAQVVGTILSVFIYTVTAWWLMRTIPHLCDTTMLDPDSPWTCPMDNVFFDASVIWGLLGPRRIFGDLGEYAKVNLFFLGGAIAPFLVWLAHKAFPEQRWITLIHMPVLLGATSMMPPATAVNFTSWILVGFLSGYIAYRYRQEWWKRCNYVLSGGLDAGTAFMTILLFLALNNNNIMLNWWGNNPEGCPLANCPTEKGIVVKGCPVHXSFSDDEKC

SEQ ID NO: 22038 - protein, 339 aa, Glycine max
  unsure (1)..(339): unsure at all Xaa locations
XDVHTRIMKRNYEQVPEWWFVSILLLMIVVSLITCEGFGKQLQLPWWGVLMSLVIALVFTLPIGVIQATTNTQVGLNVITELIIGYIYPGRPLANVAFKTYGYISMSQALGFLQDFKLGHYMKIPPKSMFVVQLVGTIVASGVYFGTAWWLLTSIPHICDETSLPAGRPWTCPSHQPDPSTTLXWGMVGXLVQFLRLQXVQGMVGXTQLHPFRLLLYWWLARKSFSILPFKLEHIRFNIAGGGGIPPARSVNYITWGFVGIFFNFYVYSKFKAWWARHTYILSAALDAGVAFMGVILYFALQNYGVFGPIWWGQDADDHCPLAKCPTAPGVIAHGCPLL

SEQ ID NO: 22039 - protein, 226 aa, Glycine max
  unsure (1)..(226): unsure at all Xaa locations
IXXXILGXGWAGLFRKFLVEPGEMWWPSNLVQVSLFSALHEKSKRPKGGTTRTQFFLLVLVSGLAYYVFPGYLFSMLTSFSWMCWLAPKSVLVQQLGSGLRGLGIAAFGIDWSTISAYLGSPLASPWFATANIAVGFFLVMYVMTPIAYWSNAYEAKTFPIFSSKLFMGNGSLYDISTIVNSEFHLDRXAYSIKRPXHLSTFFCMTYXXSIAALSATXCACLLFHG

SEQ ID NO: 22040 - protein, 208 aa, Glycine max
MSSDPEKRVTSEVVEDDELSPIEEVRLTGTNTDHPTRPVWTLRMWFLRLLSCSLLSFLNQFFAYRTVPLIITQITVHVATLPIGHFMAAFLPTTTFSIPGFGSKSFSFNPGPFNMKEHVLITIFANAGSAFGSGSPYAVGIVNIIKAFYGRSISFAASWLLIITTQVLGYGWAGLLRKYVVEPAHMWWPSTLVQVSLFRALHEKDDHR

SEQ ID NO: 22041 - protein, 259 aa, Glycine max
  unsure (1)..(259): unsure at all Xaa locations
SFSLGSIRFVENTYIHFHFQRNDHXXKNPRYTRSKPLSCXSNKEEDEVGSSTSHRQQNEENSPIKQVALTVPTTDDPSLPVLTFRMWVLGTLSCVLLSFLNQFFWYRIQPLTITAISAQIAVVPLGQLMAATITKRVFFRGTRWEFTLNPGPFNVKEHVLITIFANSGAGTVYAIHVVTAVKIFYHKHISFFVSLLVVITTQVLGFXGWAGIFRRYLVEPAAXMWWPANLVXQVSLFRALHEKDERPKGGLTRTQFFRX

SEQ ID NO: 22042 - protein, 163 aa, Glycine max
RVTFDASVIWGLIGPNRLFGPGGLYRNLVWLFMIGAVLPVPIWVLSKIFLQKKWIPLINIPVITYGFAGMPPATPANIASWLVTGMIFNYFVFRYNKRWWQKYNYVLSAALDAGTAFMGVLIFFALQNAGHNLKWWGSELDHCPLATCPTAPGIEVDGCPVFK

SEQ ID NO: 22043 - protein, 186 aa, Glycine max
  unsure (1)..(186): unsure at all Xaa locations
PDICKDTSSVWTCPSDTVFYDASVXWGLIGPRRIFGDLGTYEKVNWFFLGGAIAPLLVWLAARSFPQQEWIRLINMPVLIGATGMMPPATAVNYPSWIIAGFLSGFVVFRYKPEWWKRHNYVLSGALDAGLAFMGVLLYLCLGLEDISLNWWGNDLDGCTLAHCPTAKVVEEXQGCAVFHLNITVN

SEQ ID NO: 22044 - protein, 167 aa, Glycine max
  unsure (1)..(167): unsure at all Xaa locations
XYVFPGYIFQMLTSLSWICWLYPNNVLAQQLGSGLNGLGIGAIGLDWSTISSYLGSPLASPWFATANVAVGFVFVMYVLTPLCYWLDLYNAKTFPIFSDELFTEKGQVYNITAIIDSNFHLDLAAYERQGRLYISTFFAMTYGVGFAALTATIMHVALFHGREIWEX

SEQ ID NO: 22045 - protein, 178 aa, Glycine max
  unsure (1)..(178): unsure at all Xaa locations
MERGANNKKLSPLSSEQFISLTTPLVFLEKEAEASSTGVSQERVIEDAEKDEFQVDDCPIEQVRLTVPITDDPTQPALTFRTWVLGLASCVFLAFVNQFFGYRTNPLKISSVSAQIITLPLGKLMAATLSTKPIRVPFTKWSXSLNXGPFSLKEHVLITIFATSGSSGVYAISIITIV

SEQ ID NO: 22046 - protein, 128 aa, Glycine max
  unsure (1)..(128): unsure at all Xaa locations
XVGTVVASSVYFATAWWLLTSIENICDEELLPKGSPWTCPGDDVFYNASIIWGVVGPKRMFTKDGVYPGMNWXXLIGLLAPLPVWLLSXXFPNHKWIQLINFPIIIAGASNIPPFRSVNYITWGIVGX

SEQ ID NO: 22047 - protein, 167 aa, Glycine max
MASTFEGGSDSEKENTVESEEEECPVKQVELTVPKTDDPTMQLLTFRMWVLGVLSCVLLSFVNQFFWYRTQPLIVTSISAQIAVGPIGHFMARTLPTRVFFKDSRFEFSLNRGPFNIKEHVLITIFANSGAGTVYATHIVSAVKLMCKRRLNFLAALVVMLTTQILG

SEQ ID NO: 22048 - protein, 231 aa, Glycine max
  unsure (1)..(231): unsure at all Xaa locations
PRVRAKLNGLFWQQLKNXPHTRLMRRYRSAPHAEAXYIIVADNIALIISISEYYNESLQIPWRGVXIACAIDIFFTLTSGLINATTNQQPGLDIITEYIIAYMYTDRTVDNMCLKVYSYWHQRTXLSFCQDLNIATHMKIPPRTMDIAHVVRTILSAYIYTVSVWRMMRTIPHLCDTTMLDPDRRLTXPRDNVFYEASDIWXNLIGPRVTVRDLGEYAKVNSFXLGGAIAP

SEQ ID NO: 22049 - protein, 173 aa, Glycine max
  unsure (1)..(173): unsure at all Xaa locations
XLRLRSYWGLNVYNANTNPIFSXHLYTVQGQKYNIPKIVDDHIELNVAEYEKQGIIHLRVLFDLTYSFGFATITSTLTHAVCFYGKEIMERYRASSRGIEYMHTLLFIRYDDIPXRWYHSLLLETLLVTVALCMFIKDQVQMPWCGLLYAGVLAFGCTLPISLITATTYQTPG

SEQ ID NO: 22050 - protein, 146 aa, Glycine max
  unsure (1)..(146): unsure at all Xaa locations
XPWTCPGDDVFYNASIIWGVVGPKRMFTKDGVYPGMNWFFLIGLLAPLPVWLLSRKFPNHKWIQLINFPIIIACASNIPPFRSVSYITWGIVGIFFNFYVYRKFKASWAXNGIFGPTWWGLXXADHCHLAKCPTAPDVHAKGCPLL

SEQ ID NO: 22051 - protein, 786 aa, Oryza sativa (japonica cultivar-group)
MASSHQEDREEEEEHSHGDDEITAPFSQQDRRHRSLAHSFFRLVAALIGSCVYAVRPSTSRGSPELEEEENSPIEQVALTVPVSDEPETPVLTFRMWVLGTASCAVLSFLNQFFWYRKEPLTITAISAQIAVVPLGRLMAAALPERAFFRGRPWEFTLNPGPFNVKEHVLITIFANSGAGTVYAIHVITAVRVFYGKHISFFVSLLVVLTTQVLGFGWAGIFRRYLVEPAAMWWPSNLVQVSLFRALHEKEARSKGGLTRNQFFLVAFICSFAYYIFPGYLFQMLTSLSWICWVFPHSVLAQQLGSGLSGLGIGAIGLDWSTVSSYLGSPLASPWFATANVAAGFFFIMYIITPIAYWFNFYKAQNFPIFSDGLFTSTGQKYNISSIVDSHFHFDTKAYEKNGPLYLSTFFAVTYGVGFASLTATIVHVLLFHGSEIWQLSKSAFQEKRMDIHTKLMRRYKQVPEWWFVCILIANIAVTIFACEYYIEQLQLPWWGVLLACAIAFFFTLPIGIITATTNQTPGLNIITEYIMGYLYPGRPVANMCFKVYGYISMSQALTFLQDFKLGHYMKIPPRTMFMAQVVGTLIAAFVYIGTAWWLMETIPNICNTELLPSDSPWTCPGDHVFYDASVIWGLISPRRIFGDLGTYSAVNWFFLGGAIAPVLVWFAHKAFPNQNWILLINMPVLIGATGQMPPATAVNYTTWILVGFLSGYVVYRYRRDWWERHNYLLSGALDAGLAFMAVLIYLCLGLENISLNWWGNDLDGCPLASCPTAKGVVVDGCPVYT

SEQ ID NO: 22052 - protein, 755 aa, Oryza sativa (japonica cultivar-group)
MGEGEFVDVERGVVAEGALDDDASPIEEVRLTVPVTDDSSLPVWTFRMWTLGLLSCVLMSFLNQFFSYRTEPLIVTQITVQVASLPLGHILARVLPRRKFKAPALLGGGECSLNPGPFNMKEHVLVSIFANAGCAFGSGSAYAVMIVDIIRAFYGRSISLFPAWLLITTTQVLGYGWAGLMRRYVVEPAQMWWPGTLVQVSLFRALHGKGEEKEENKEGSGGGMSQAKFFLIALACSFLWYAVPGYLFPTLTSVSWVCWIFSKSVTAQQLGSGMKGLGLGAFTLDWTAVSAFLYSPLISPFFATANILAGYVLLMYVVVPVSYWGLDLYNARRFPIFSSHLFTATGSTYDITAIVNDRFEIDMDGYHRMGRINMSTFFALSYGLGFATIAATVTHVALFHGKEIYRRFRASQRDKPDVHTRLMKSYRDVPSWWFYAMLALSMAVSLLLCTVLRSAVQLPWWGLLFACAMAFVFTLPISIITATTNQTPGLNIITEYVIGLMLPGKPIANVCFKAYGYMSMSQAVSFLSDFKLGHYMKIPPKSMFLVKLVGTVVASTVNLVVAYWLLGSIPNICQDALLPADSPWTCPNDRVFFDASVIWGLVGPRRIFGPLGNYGALNWFFLAGAVGPVIVYLLHRAFPSKTWIPMINLPVLIGATSYMPPATAVNYNSWLIIGIIFNFFVFRYRKLWWKRYNYILSAALDAGVAFMAVLLYFSLSMENRSISWWGTAGEHCPLASCPTAKGINLGADSVCPVVL

SEQ ID NO: 22053 - protein, 769 aa, Oryza sativa (japonica cultivar-group)
MNMIAIHPIYGSSLLVLLAPGEVQDLVVVVLGVKLFVLLSVRSSMRLGSPEENSPVEQVALTVPVGDDPATPVLTFRIWVLGTASCVVLSFLNTFFWYRKEPLTVTAISAQIAVVPLGRLMAAALPERVFFRGRPWEFTLNPGPFNVKEHVLITIFANAGAGSVFAINVITAVRVFYGKRISFFVSLLVVLTSQVLGFGWAGIFRRYLVEPAAMWWPSNLVQVSLFRALHEKERRSKGGMTRTQFFLVAFVCSFAYYIFPGYLFQMLTSLSWICWIFPKSVLAQQLGSGLHGLGIGAIGLDWSSISSYLGSPLASPWFATANIAAGFFIYIYVITPIAYWINLYKAQNFPIFSDGLFTVTGQKYNISTIIDSQFHFDTKAYEKNGPLYISTFFSISYGLGFACLTATVVHVLLFHGSEIWQLSRSAFQDKKMDIHTKLMKRYKQVPEWWFISILIASVAITMFTCEYYIEQLQLPWWGVLLACALAIFFTLPIGIVTATTNQTPGLNIITEYIMGYLYPGRPVANMCFKVYGYIGPQQALAFLQDFKLGHYMKIPPRTMFMAQVVGTLIAAFVYLGTAWWLMDTIPNICNTELLPPGSPWTCPYDHLFYDASVIWGLIGPRRIFGDLGTYSAVNWFFLGGAIAPLLVWFAHKAFPGQKWILLVNMPVLIAGISQMPPATSVNYTAWIFVAFLSGYVVYKYRRDWWERHNYLLSGALDAGLAFMAVLLYLCLGLEKISLNWWGNDLDGCPLASCPIAEGITVQGCPVASA

SEQ ID NO: 22054 - protein, 753 aa, Oryza sativa (japonica cultivar-group)
MASSHHQEVQEQGHGDGEEEEQDNSQITSPLLRSSMRLGSPEENSPVEQVALTVPVGDDPATPVLTFRIWVLGTASCVVLSFLNTFFWYRKEPLTVTAISAQIAVVPLGRLMAAALPERVFFRGRPWEFTLNPGPFNVKEHVLITIFANAGAGSVFAINVITAVRVFYGKRISFFVSLLVVLTSQVLGFGWAGIFRRYLVEPAAMWWPSNLVQVSLFRALHEKERRSKGGMTRTQFFLVAFVCSFAYYIFPGYLFQMLTSLSWICWIFPKSVLAQQLGSGLHGLGIGAIGLDWSSISSYLGSPLASPWFATANIAAGFFIYIYVITPIAYWINLYKAQNFPIFSDGLFTVTGQKYNISTIIDSQFHFDTKAYEKNGPLYISTFFSISYGLGFACLTATVVHVLLFHGRSAFQDKKMDIHTKLMKRYKQVPEWWFISILIASVAITMFTCEYYIEQLQLPWWGVLLACALAIFFTLPIGIVTATTNQTPGLNIITEYIMGYLYPGRPVANMCFKVYGYIGPQQALAFLQDFKLGHYMKIPPRTMFMAQVVGTLIAAFVYLGTAWWLMDTIPNICNTELLPPGSPWTCPYDHLFYDASVIWGLIGPRRIFGDLGTYSAVNWFFLGGAIAPLLVWFAHKAFPGQKWILLVNMPVLIAGISQMPPATSVNYTAWIFVAFLSGYVVYKYRRDWWERHNYLLSGALDAGLAFMAVLLYLCLGLEKISLNWWGNDLDGCPLASCPIAEGITVQGCPVASA

SEQ ID NO: 22055 - protein, 766 aa, Oryza sativa (japonica cultivar-group)
MMLHHEASVQQAREEEEELDHHGDPMITSPLLRPSTSGSSPENGEEENSPVELVALTVPVSDEPETPVLTFRMWVLGTASCAVLSFLNQFFWYRKEPLTITAISAQIAVVPLGRLMAATLPEHAFFRGRPWEFTLNPGPFNVKEHVLITIFANSGAGTVYAIHVITGVRVFYGKTLSFFISLLVVLTTQYHQMLGFGWAGIFRRYLVEPASMWWPSNLVQVSLFSALHEKEARRKGGLTRNQFFLVAFVCSFAYYIFPGYLFQMLTSLSWICWVFPSSVLAQQLGSGLRGLGVGAIGLDWSSISSYLGSPLASPWFATVNVGVGFFIVMYIITPIAYWFNFYKAQNFPIFSDGLFTSTGQKYNVSSIVDSHFHFDTKAYEKNGPLYLSTSLLVTYGVGFATLAATIVHALLFHGSEIWLLSKSAFQEKRMDIHTKLMRRYKQVPEWWFICILIANIGTTIFACEYYNEELQLPWWGVLFACSIAFFFTLPIGIIKATTNQTPGLNVITEYIIGYLYPGRPVANMCFKVYGYISMKQALAFLEDFKLGHYMKIPPRTMFMAQVVGTSIAAFVYIGTAWWLMETIPNICNTELLPSDSPWTCPGDHVFYDASVTWGLISPRRIFGDLGTYSALNWFFLCGAIAPLLVWFAHKTFPGQNWILLIKTPVLIGATFQMPPATAVNYTTWILVGFLSGYVVYRYRRDWWERHNYLLSGALDAGLAFMAVLIYLCLGLEDISLNWWGNDLDGCPLASCPTAKGIVVKGCAVYT

SEQ ID NO: 22056 - protein, 726 aa, Oryza sativa (japonica cultivar-group)
MASLKSPVAAEEQAATAAAAAAKGEGERCPVEEVALVVPETDDPTTPVMTFRAWTLGLASCVVLIFLNTFFTYRTQPLTISGILAQILVLPAGQFMAAVLPSREVRLLGGRLGSFNLNPGPFNIKEHVIITIFANCGVSYGGGDAYSIGAITVMKAYYKQSLSFLCALLIVLTTQILGYGWAGMLRRYLVDPADMWWPSNLAQVSLFRALHEKEGGDGGKGSSSRGPTRMRFFLIFFFASFAYYALPGYLLPILTFFSWACWAWPHSITAQQVGSGYHGLGVGAFTLDWAGISAYHGSPLVAPWSSIANTAAGFVMFIYLIVPLCYWKFDTFDARKFPIFSNQLFTASGQKYDTTKVLTREFDLNVAAYESYGKLYLSPLFAISIGSGFLRFTATIVHVALFHGGDIWRQSRSAMSSAAAKMDVHAKLMRRYKQVPQWWFLVLLVGSVAVSLVMSFVYREEQPGYDIIAQFMIGYALPGKPIANLLFKIYGRISTVHALSFLADLKLGHYMKIPPRCMYTAQLVGTVVAGVVNLAVAWWMLGSIDNICDVEALHPDSPWTCPKYRVTFDASVIWGLIGPARLFGRHGLYRNLVWLFLAGAVLPVPVWLLSRAFPEKKWIALINVPVISYGFAGMPPATPTNIASWLVTGTIFNYFVFKYRKGWWQKYNYVLSAALDAGTAFMGVLIFFALQNAHHELKWWGTAVDHCPLASCPTAPGIAVKGCPVF

SEQ ID NO: 22057 - protein, 446 aa, Oryza sativa (japonica cultivar-group)
SGYHGLGVGAFTLDWAGISAYHGSPLVAPWSSIANTAAGFVMFIYLIVPLCYWKFDTFDARKFPIFSNQLFTASGQKYDTTKVLTREFDLNVAAYESYGKLYLSPLFAISIGSGFLRFTATIVHVALFHGGDIWRQSRSAMSSAAAKMDVHAKLMRRYKQVPQWWFLVLLVGSVAVSLVMSFVYREEVQLPWWGMLFAFALAFVVTLPIGVIQATTNQQPGYDIIAQFMIGYALPGKPIANLLFKIYGRISTVHALSFLADLKLGHYMKIPPRCMYTAQLVGTVVAGVVNLAVAWWMLGSIDNICDVEALHPDSPWTCPKYRVTFDASVIWGLIGPARLFGRHGLYRNLVWLFLAGAVLPVPVWLLSRAFPEKKWIALINVPVISYGFAGMPPATPTNIASWLVTGTIFNYFVFKYRKGWWQKYNYVLSAALDAGTAFMGVLIFFA

SEQ ID NO: 22058 - protein, 786 aa, Oryza sativa; identical to SEQ ID NO: 22051

SEQ ID NO: 22059 - protein, 745 aa, Oryza sativa
  unsure (1)..(745): unsure at all Xaa locations
MASSHHQEVQEQGHGDGEEEEQEXGAPEENSPVEQVALTVPVGDDPATPVLTFRIWVLGTASCVVLSFLNTFFWYRKEPLTVTAISAQIAVVPLGRLMAAALPERVFFRGRPWEFTLNPGPFNVKEHVLITIFANAGAGSVFAINVITAVRVFYGKRISFFVSLLVVLTSQVLGFGWAGIFRRYLVEPAAMWWPSNLVQVSLFRALHEKERRSKGGMTRTQFFLVAFVCSFAYYIFPGYLFQMLTSLSWICWIFPKSVLAQQLGSGLHGLGIGAIGLDWSSISSYLGSPLASPWFATANIAAGFFIYIYVITPIAYWINLYKAQNFPIFSDGLFTVTGQKYNISTIIDSQFHFDTKAYEKNGPLYISTFFSISYGLGFACLTATVVHVLLFHGSEIWQLSRSAFQDKKMDIHTKLMKRYKQVPEWWFISILIASVAITMFTCEYYIEQLQLPWWGVLLACALAIFFTLPIGIVTATTNQTPGLNIITEYIMGYLYPGRPVANMCFKVYGYIGPQQALAFLQDFKLGHYMKIPPRTMFMAQVVGTLIAAFVYLGTAWWLMDTIPNICNTELLPPGSPWTCPYDHLFYDASVIWGLIGPRRIFGDLGTYSAVNWFFLGGAIAPLLVWFAHKAFPGQKWILLVNMPVLIAGISQMPPATSVNYTAWIFVAFLSGYVVYKYRRDWWERHNYLLSGALDAGLAFMAVLLYLCLGLEKISLNWWGNDLDGCPLASCPIAEGITVQGCPVAS

SEQ ID NO: 22060 - protein, 769 aa, Oryza sativa; identical to SEQ ID NO: 22053

SEQ ID NO: 22061 - protein, 831 aa, Oryza sativa
SIDEAVVERRLRRRRVGFEEARGVTLDAGGEDSEEQRLQQAHPAAERARVQLLRLLHGTWETQGTVLVVSDTTTPAAREDAELTDGSGPEKSAGPKMRPSTSGSSPENGEEENSPVELVALTVPVSDEPETPVLTFRMWVLGTASCAVLSFLNQFFWYRKEPLTITAISAQIAVVPLGRLMAATLPEHAFFRGRPWEFTLNPGPFNVKEHVLITIFANSGAGTVYAIHVITGVRVFYGKTLSFFISLLVVLTTQYHQMLGFGWAGIFRRYLVEPASMWWPSNLVQVSLFSALHEKEARRKGGLTRNQFFLVAFVCSFAYYIFPGYLFQMLTSLSWICWVFPSSVLAQQLGSGLRGLGVGAIGLDWSSISSYLGSPLASPWFATVNVGVGFFIVMYIITPIAYWFNFYKAQNFPIFSDGLFTSTGQKYNVSSIVDSHFHFDTKAYEKNGPLYLSTSLLVTYGVGFATLAATIVHALLFHGSEIWLLSKSAFQEKRMDIHTKLMRRYKQVPEWWFICILIANIGTTIFACEYYNEELQLPWWGVLFACSIAFFFTLPIGIIKATTNQTPGLNVITEYIIGYLYPGRPVANMCFKVYGYISMKQALAFLEDFKLGHYMKIPPRTMFMAQVVGTSIAAFVYIGTAWWLMETIPNICNTELLPSDSPWTCPGDHVFYDASVTWGLISPRRIFGDLGTYSALNWFFLCGAIAPLLVWFAHKTFPGQNWILLIKTPVLIGATFQMPPATAVNYTTWILVGFLSGYVVYRYRRDWWERHNYLLSGALDAGLAFMAVLIYLCLGLEDISLNWWGNDLDGCPLASCPTAKGIVVKGCAVYT

SEQ ID NO: 22062 - protein, 794 aa, Oryza sativa
  unsure (1)..(794): unsure at all Xaa locations
MARSIPPESGDENVSASADEEGMEEEVNDHPIEEVRNTVPVTDDPSEPCLTFRVWVLGLSSCVFLAFVNEFFMYRTTQLSIGTVVVQIITLPIGRLMASTLPARRLRVGGWSFSLNPGPFSLKEHCLIIIFAGAGASGVYAMNIIAIVKVFYKRQISPYAAMLLAQTTQLLGYGWAGLFRKYLVDSAYMWWPSNLVQVTLFRAMHEEEKRNKGQLTRLQFFIMVMTCSFAYYIVPSYLFPAISTISVLCWLYRDSVTAQQIGSGASGLGVGSFGLDWNTVVGFLGNPLASPAFAIFNVMAGFALSTYVAVPILYWTDTYNAKRFPLVSSHVFNAAGGRYDTARILDPATFTLNLREYDAYGRINLSILFAINYGIGFAGLMSTLSHVALYHGKQATAXXQANGGGKERQDVHTRIMKRNYKAVPQWWFHLMLAIVMALSLYTCEGFGRQLQLPYWGLLLACAIAFTFTLPIGVISATTNMQPGLNIITELIIGYLYPGKPLANVVFKTYGYISMTQALTFVSDFKLGHYMKIPPRSMFMVQLAGTVVASTVHFATAWWLLTTVRNICDVDSLPLGSPWTCPGEDVFYNASIIWGVVGPLRMFGRLGNYWQMNYFFLVGVLAPVPVWLLSRRYPRSALLRDINLPLVLAGASGLLPARSVNFVMWGLVGFVFNHVVYRRCRAWWMRHNYVLAAGLDAGVAFMGVLTFVSLGYFDIYGVQWWGGAADDHCPLASCPTAPGASVGAIDAGEAVAQLPVRHGCVGRGSDELVANRHAALDMGLIMGGNLLQADLEATK

SEQ ID NO: 22063 - protein, 704 aa, Oryza sativa
  unsure (1)..(704): unsure at all Xaa locations
AAEEQAATAAAAAAKGEGERCPVEEVALVVPETDDPTTPVMTFRAXPLTISGILAQILVLPAGQFMAAVLPSREVRLLGGRLGSFNLNPGPFNIKEHVIITIFANCGVSYGGGDAYSIGAITVMKAYYKQSLSFLCALLIVLTTQILGYGWAGMLRRYLVDPADMWWPSNLAQVSLFRALHEKEGGDGGKGSSSRGPTRMRFFLIFFFASFAYYALPGYLLPILTFFSWACWAWPHSITAQQVGSGYHGLGVGAFTLDWAGISAYHGSPLVAPWSSIANTAAGFVMFIYLIVPLCYWKFDTFDARKFPIFSNQLFTASGQKYDTTKVLTREFDLNVAAYESYGKLYLSPLFAISIGSGFLRFTATIVHVALFHGGDIWRQSRSAMSSAAAKMDVHAKLMRRYKQVPQWWFLVLLVGSVAVSLVMSFVYREEVQLPWWGMLFAFALAFVVTLPIGVIQATTNQQPGYDIIAQFMIGYALPGKPIANLLFKIYGRISTVHALSFLADLKLGHYMKIPPRCMYTAQLVGTVVAGVVNLAVAWWMLGSIDNICDVEALHPDSPWTCPKYRVTFDASVIWGLIGPARLFGRHGLYRNLVWLFLAGAVLPVPVWLLSRAFPEKKWIALINVPVISYGFAGMPPATPTNIASWLVTGTIFNYFVFKYRKGWWQKYNYVLSAALDAGTAFMGVLIFFALQNAHHELKWWGTX

SEQ ID NO: 22064 - protein, 727 aa, Oryza sativa
  unsure (1)..(727): unsure at all Xaa locations
MASLKSPVAAEEQAATAAAAAAKGEGERCPVEEVALVVPETDDPTTPVMTFRAWTLGLASCVVLIFLNTFFTYRTQPLTISGILAQILVLPAGQFMAAVLPSREVRLLGGRLGSFNLNPGPFNIKEHVIITIFANCGVSYGGGDAYSIGAITVMKAYYKQSLSFLCALLIVLTTQILGYGWAGMLRRYLVDPADMWWPSNLAQVSLFRALHEKEGGDGGKGSSSRGPTRMRFFLIFFFASFAYYALPGYLLPILTFFSWACWAWPHSITAQQVGSGYHGLGVGAFTLDWAGISAYHGSPLVAPWSSIANTAAGFVMFIYLIVPLCYWKFDTFDARKFPIFSNQLFTASGQKYDTTKVLTREFDLNVAAYESYGKLYLSPLFAISIGSGFLRFTATIVHVALFHGGDIWRQSRSAMSSAAAKMDVHAKLMRRYKQVPQWWFLVLLVGSVAVSLVMSFVYREXXQPGYDIIAQFMIGYALPGKPIANLLFKIYGRISTVHALSFLADLKLGHYMKIPPRCMYTAQLVGTVVAGVVNLAVAWWMLGSIDNICDVEALHPDSPWTCPKYRVTFDASVIWGLIGPARLFGRHGLYRNLVWLFLAGAVLPVPVWLLSRAFPEKKWIALINVPVISYGFAGMPPATPTNIASWLVTGTIFNYFVFKYRKGWWQKYNYVLSAALDAGTAFMGVLIFFALQNAHHELKWWGTAVDHCPLASCPTAPGIAVKGCPVF

SEQ ID NO: 22065 - protein, 720 aa, Oryza sativa
  unsure (1)..(720): unsure at all Xaa locations
NILPASRPAGVRRSSTFRWTLQAVQQTTPKTSFTXXEGMEEEVNDHPIEEVRNTVPVTDDPSEPCLTFRVWVLGLSSCVFLAFVNEFFMYRTTQLSIGTVVVQIITLPIGRLMASTLPARRLRVGGWSFSLNPGPFSLKEHCLIIIFAGAGASGVYAMNIIAIVKVFYKRQISPYAAMLLAXQTTXQLLGYGWAGLFRKYLVDSAYMWWPSNLVQVTLFRAMHEEEKRNKGQLTRLQFFIMVMTCSFAYYIVPSYLFPAISTISVLCWLYRDSVTAQQIGSGASGLGVGSFGLDWNTVVGFLGNPLASPAFAIFNVMAGFALSTYVAVPILYWTDTYNAKRFPLVSSHVFNAAGGRYDTARILDPATFTLNLREYDAYGRINLSILFAINYGIGFAGLMSTLSHVALYHGKQIWGLWRKATAEQANGGGKERQDVHTRIMKRNYKAVPQWWFHLMLAIVMALSLYTCEGFGRQLQLPYWGLLLACAIAFTFTLPIGVISATTNMVSXQQPGLNIITELIIGYLYPGKPLANVVFKTYGYISMTQALTFVSDFKLGHYMKIPPRSMFMVQLAGTVVASTVHFATAWWLLTTVRNICDVDSLPLGSPWTCPGEDVFYNASIIWGVVGPLRMFGRLGNYWQMNYFFLVGVLAPVPVWLLSRRYPRSALLRDINLPLVLAGASGLLPARSVNFVMWGLVGFVFNHVVYRRCRAWAATRRLSMSX

SEQ ID NO: 22066 - protein, 891 aa, Oryza sativa
MADAYWRYAAAADAARHHHHHQLPLSAAPAAGMPAPPPAASQVAAAGQPLKRPRPADFSDVPGAPEMAGYYSRDEERPGYRPARDTEALNASYERFLRTGQIQSYGAGAGAGPGAESIRPAAGGNAGYPVEDRPMMAGGGMEARNIGFGDIFRPFVGFREVRLVSKEARHHDQSNPVSGHLKLFKVMYENRVIRTCNELVLCGVLGATNSMNMIAIHPIYGSSLLVLLAPGEVQDLVVVVLGVKLFVLLSVRSSMRLGSPEENSPVEQVALTVPVGDDPATPVLTFRIWVLGTASCVVLSFLNTFFWYRKEPLTVTAISAQIAVVPLGRLMAAALPERVFFRGRPWEFTLNPGPFNVKEHVLITIFANAGAGSVFAINVITAVRVFYGKRISFFVSLLVVLTSQVLGFGWAGIFRRYLVEPAAMWWPSNLVQVSLFRALHEKERRSKGGMTRTQFFLVAFVCSFAYYIFPGYLFQMLTSLSWICWIFPKSVLAQQLGSGLHGLGIGAIGLDWSSISSYLGSPLASPWFATANIAAGFFIYIYVITPIAYWINLYKAQNFPIFSDGLFTVTGQKYNISTIIDSQFHFDTKAYEKNGPLYISTFFSISYGLGFACLTATVVHVLLFHGSEIWQLSRSAFQDKKMDIHTKLMKRYKQVPEWWFISILIASVAITMFTCEYYIEQLQLPWWGVLLACALAIFFTLPIGIVTATTNQTPGLNIITEYIMGYLYPGRPVANMCFKVYGYIGPQQALAFLQDFKLGHYMKIPPRTMFMAQAFPGQKWILLVNMPVLIAGISQMPPATSVNYTAWIFVAFLSGYVVYKYRRDWKITENVNGRVNLQTYSFRSKINLVLDVYSEALSNTWWNTGDLECVMASSRACYAPASRVGIWTSTV

SEQ ID NO: 22067 - protein, 492 aa, Oryza sativa
  unsure (1)..(492): unsure at all Xaa locations
MMLHHEASVQQAREEEEELDHXXSGSSPENGEEENSPVELVALTVPVSDEPETPVLTFRMWVLGTASCAVLSFLNQFFWYRKEPLTITAISAQIAVVPLGRLMAATLPEHAFFRGRPWEFTLNPGPFNVKEHVLITIFANSGAGTVYAIHVITGVRVFYGKTLSFFISLLVVLTTQMLGFGWAGIFRRYLVEPASMWWPSNLVQVSLFSALHEKEARRKGGLTRNQFFLVAFVCSFAYYIFPGYLFQMLTSLSWICWVFPSSVLAQQLGSGLRGLGVGAIGLDWSSISSYLGSPLASPWFATVNVGVGFFIVMYIITPIAYWFNFYKAQNFPIFSDGLFTSTGQKYNVSSIVDSHFHFDTKAYEKNGPLYLSTSLLVTYGVGFATLAATIVHALLFHGSEIWLLSKSAFQEKRMDIHTKLMRRYKQVPEWWFICILIANIGTTIFACEYYNEELQLPWWGVLFACSIAFFFTLPIGIIKATTNQTPGLNVIX

SEQ ID NO: 22068 - protein, 298 aa, Oryza sativa
  unsure (1)..(298): unsure at all Xaa locations
XHEPWWGMLFAFALAFVVTLPIGVIQATTNQQPGYDIIAQFMIGYALPGKPIANLLFKIYGRISTVHALSFLADLKLGHYMKIPPRCMYTAQLVGTVVAGVVNLAVAWWMLGSIDNICDVEALHPDSPWTCPKYRVTFDASVIWGLIGPARLFGRHGLYRNLVWLFLAGAVLPVPVWLLSRAFPEKKWIALINVPVISYGFAGMPPATPTNIASWLVTGTIFNYFVFKYRKGWWQKYNYVLSAALDXAGTAFXMGVLIFFALQNAHHELKWWGTAVDHCPLASCPTAPGIAVKGCPVF

SEQ ID NO: 22069 - protein, 298 aa, Oryza sativa
  unsure (1)..(298): unsure at all Xaa locations
XQILGYGWAGMLRRYLKQSLSFLCALLIVLTTQILGYGWAGMLRRYLVDPADMWWPSNLAQVSLFRALHEKEGGDGGKGSSSRGPTRMRFFLIFFFASFAYYALPGYLLPILTFFSWACWAWPHSITAQQVGSGYHGLGVGAFTLDWAGISAYHGSPLVAPWSSIANTAAGFVMFIYLIVPLCYWKFDTFDARKFPIFSNQLFTASGQKYDTTKVLTREFDLNVAAYESYGKLYLSPLFAISIGSGFLRFTATIVHVALFHGGDIWRQSRSAMSSAAAKMDVHAKLMRRYKQVPQWWX

SEQ ID NO: 22070 - protein, 520 aa, Oryza sativa
  unsure (1)..(520): unsure at all Xaa locations
MRLGSPEENSPVEQVALTVPVGDDPATPVLTFRIWVLGTASCVVLSFLNTFFWYRKEPLTVTAISAQIAVVPLGRLMAAALPERVFFRGRPWEFTLNPGPFNVKEHVLITIFANAGAGSVFAINVITAVRVFYGKRISFFVSLLVVLTSQVLGFGWAGIFRRYLVEPAAMWWPSNLVQVSLFSFAYYIFPGYLFQMLTSLSWICWIFPKSVLAQQLGSGLHGLGIGAIGLDWSSISSYLGSPLASPWFATANIAAGFFIYIYVITPIAYWINLYKAQNFPIFSDGLFTVTGQXXNDKPGLNIITEYIMGYLYPGRPVANMCFKVYGYIGPQQALAFLQDFKLGHYMKIPPRTMFMAQVVGTLIAAFVYLGTAWWLMDTIPNICNTELLPPGSPWTCPYDHLFYDASVIWGLIGPRRIFGDLGTYSAVNWFFLGGAIAPLLVWFAHKAFPGQKWILLVNMPVLIAGISQMPPATSVNYTAWIFVAFLSGYVVYSEALSNTWWNTGDLEARGARGAGAGEVX

SEQ ID NO: 22071 - protein, 546 aa, Oryza sativa
  unsure (1)..(546): unsure at all Xaa locations
HSGSLAHWHSSQLLPLSIHGVLPSPRSTRARPXEMERKRNKIIAKSXXLHLRSSMRLGSPEENSPVEQVALTVPVGDDPATPVLTFRIWVLGTASCVVLSFLNTFFWYRKEPLTVTAISAQIAVVPLGRLMAAALPERVFFRGRPWEFTLNPGPFNVKEHVLITIFANAGAGSVFAINVITAVRVFYGKRISFFVSLLVVLTSQVLGFGWAGIFRRYLVEPAAMWWPSNLVQVSLFSFAYYIFPGYLFQMLTSLSWICWIFPKSVLAQQLGSGLHGLGIGAIGLDWSSISSYLGSPLASPWFATANIAAGFFIYIYVITPIAYWINLYKAQNFPIFSDGLFTVTGQXXNDKPGLNIITEYIMGYLYPGRPVANMCFKVYGYIGPQQALAFLQDFKLGHYMKIPPRTMFMAQVVGTLIAAFVYLGTAWWLMDTIPNICNTELLPPGSPWTCPYDHLFYDASVIWGLIGPRRIFGDLGTYSAVNWFFLGGAIAPLLVWFAHKAFPGQKWILLVNMPVLIAGISQMPPATSVNYTAWIFVAFLSGYVDX

SEQ ID NO: 22072 - protein, 419 aa, Oryza sativa
  unsure (1)..(419): unsure at all Xaa locations
RTGGTKTTTRENXEGSQHTQPXMLHHEAMRPSTSGSSPENGEEENSPVELVALTVPVSDEPETPVLTFRMWVLGTAXFFWYRKEPLTITAISAQIAVVPLGRLMAATLPEHAFFRGRPWEFTLNPGPFNVKEHVLITIFANSGAGTVYAIHVITGVRVFYGKTLSFFISLLVVLTTQYHQMLGFGWAGIFRRYLVEPASMWWPSNLVQVSLFSSVLAQQLGSGLRGLGVGAIGLDWSSISSYLGSPLASPWFATVNVGVGFFIVMYIITPIAYWFNFYKAQNFPIFSDGLFTSTGQKYNVSSIVDSHFHFDTKAYEKNGPLYLSTSLLVTYGVGFATLAATIVHALLFHGSEIWLLSKSAFQEKRMDIHTKLMRRYKQVPEWWFICILIANIGTTIFACEYYNEELQLPWDYQSNNKSX

SEQ ID NO: 22073 - protein, 188 aa, Oryza sativa
  unsure (1)..(188): unsure at all Xaa locations
XVIXVNQLSKKKGYEKNGPLYLSTFFAVTYGVGFASLTATIVHVLLFHGXXKFHLELDSLLHTKLMRRYKQVPEWWFVCILIANIAVTIFACEYYIEQLQLPWWGVLLACAIAFFFTLPIGIITATTNQTPGLNIITEYIMGYRTRGRPVANMCFKVYGYISMSQALTFLQXFKLGHYMKIPPRTMFX

SEQ ID NO: 22074 - protein, 343 aa, Triticum aestivum
  unsure (1)..(343): unsure at all Xaa locations
FKEEXRVDVHKRLXRRYKQVPEWWFICILTVNIAVTVFACEYYIEQLQLPWWGVLLACAIAFFFTLPIGIITATTNQTPGLNIITEYIMGYLYPGRPVANMCFKVYGYISMSQALTFLQDFKLGHYMKIPPRTMFMAQVVGTLIAAFVYLGTAWWLMDSIPNICDTELLPAGSPWTCPGDHVFYDASVIWGLISPRRIFGDLGTYSAVNWFFLGGAIAPLLVWFAHKAFPGQNWILLINMPVLIGSTGQMPPATAVNYITWIFVGFLSGYVVYRYRRDWWERHNYLLSGALDAGLAFMAVLIYLCLGLENISLNWWGNDLDGCPLASCPTAKGIFVEGCPVYT

SEQ ID NO: 22075 - protein, 279 aa, Triticum aestivum
  unsure (1)..(279): unsure at all Xaa locations
XRPGSLTVLAEFIGGSFVEGNALAMNYFKSFGYVTCAHAVMFSNDLKLAHYVKIPPRHTFFAQIIATFISTFVCVGVLNFQMTQIDGVCTEDARWKMTCPSVNTFFTASVLWGTVGPSKIFGKNGLYTEVLIGFPLGVVVVLVVWAINKRFPHWTWTRQIHPVAIMYGGIVWAPYNMSYVWPSVPIAYFSFYLKSRYLVSWSKYNFVLSAAWSCGIAIAGIIIFFSLQLEGTEFKWWGNTVGYTGCEDDACPLQPLXXGSDYFGPXEWRVSLSRRVLAS

SEQ ID NO: 22076 - protein, 213 aa, Triticum aestivum
  unsure (1)..(213): unsure at all Xaa locations
XPLFATANIAAGFFIYIXXPIAYWFNVYEAWNFPIFSDGLFTVTGQKYNISSIVDSEFHFDANAYEKNGPLYISTFFAVSYGLGFACLTATIVHVLLFHGSEIWELSKSAFQDRKMDVHTKLMRRYGQVPEWWFICILVASAAITVFTCEYYIEQLQLPWWGILLACALSIFYTLPIGIITATTNQTPGLNIITEYIMGYLYPGRPVANMCFX

SEQ ID NO: 22077 - protein, 213 aa, Triticum aestivum
PPRCMYTAQLVGTVVAGVVNLAVAWWMLDSIDNICDVEALHPDSPWTCPKYRVTFDASVIWGLIGPGRLFGQHGLYRNLVWLFVVGAVLPVPVWLLSRAFPEKKWIALVNVPVISYGFAGMPPATPTNIASWLVTGTVFPAVPFRYRKGWWQKYNYVLSAALDAGTAFMGVLIFFALQNAHHDLKWWGTEVDHCPLATCPTAPGIVVKGCPVF

SEQ ID NO: 22078 - protein, 149 aa, Triticum aestivum
  unsure (1)..(149): unsure at all Xaa locations
RVRPIGIITATTNQTPGLNIITEYIMGYLYPGRPVANMCFKVYGYISMTQALAFLQDFKLGHYMKIPPRTMFMAQVVGTLIAALVYIGTAWWLMDSVPNICSTELLPADSPWTCPMDHVFYDASVIWGLIGPRRIFGDLGTYSAGNWFX

SEQ ID NO: 22079 - protein, 158 aa, Triticum aestivum
  unsure (1)..(158): unsure at all Xaa locations
GQKYDTTKVLTADFDLNVAAYDSYGKLYLSPLFAISIGSGFLRFSATIVHVLLFHGADMWRQSRRAIGAAAKLDVHARLMQRYKQVPQWWFLVLLAGSIAVSLLMCFVWKEQVQLPWWGMLFAFAXLAFVVTLPIGVIQATTNQQPGYDIIAQFMIGY

SEQ ID NO: 22080 - protein, 199 aa, Triticum aestivum
  unsure (1)..(199): unsure at all Xaa locations
XIFGPHGNYEAVNWFFLIGAAGPVIVYIFHRIFPSQRWILMINLPVLIGATANMPPATAVNYNSWLLIGTIFNFFVFRYRKKWWQRYNYILSAALDAGVAFMAVLLYFTLTMENRTVNWWGTAGEHCPLASCPTAKGVDLGPDSVCPVFXAKSLSPSRYSYKISHDPFELCECNSMIIDFYCTLHQKRERTKLLDACKL

SEQ ID NO: 22081 - protein, 196 aa, Triticum aestivum
  unsure (1)..(196): unsure at all Xaa locations
XDHLXYXASVIXXLISPRRIFGDLGTYXAVNWFFLGGAIAPLLXWLAHKAFPGQKWILLVNMPVLLGGISHMPPATAVXXTXWICVAFLSGYVVYKYXHNWWKRXNYLLSGALDCGLAFMAVLIYLCLELDNITLNWWGNVSDGCPLASCPTAKGIIVHGCPVHNXEYSHASTAGLRIKLRAKKRRKKAARMGGFA

SEQ ID NO: 22082 - protein, 138 aa, Triticum aestivum
  unsure (1)..(138): unsure at all Xaa locations
XLLASGDYEDVHVRLMRAYPEVSEYWYFGVLVVAAATGMAGIDTYPTYTTIGVVPYGIILALLFVVPTGIIRAMTGVEVTLNVLAEFIGGMWVRGQXALAMNFFKSFGYVTCAHALSFSNDLKLAHYLKIAPRQTFAA

SEQ ID NO: 22083 - protein, 164 aa, Triticum aestivum
  unsure (1)..(164): unsure at all Xaa locations
XQEXEDHGDQITAPLLPNRPSTSRSSPEHHDEENSPIEQVALTVPVGDDLDTPVLTFRMWVLGMASCAVLSFLNQFFWYRKEPLTITAISAQIAVVPLGRLMAAALPERAFLRGTRWEFTLNPGPFNVKEHVLITXFANAXAGTVYAIHVVTAVRVFYGKTSLP

SEQ ID NO: 22084 - protein, 138 aa, Triticum aestivum
  unsure (1)..(138): unsure at all Xaa locations
XQVPTLLTMASSSHQGEEAENSPVEQVALTVPVGDDPSTPVLTFRMWVLGATACVALSFLNTFFGYRKEPLEITAISAQVAVVPLGRLMAAALPERAFFRGRRWEFTLNPGPFNVKEHVLITIFANAGAGSVFAINLX

SEQ ID NO: 22085 - protein, 744 aa, Zea mays
  unsure (1)..(744): unsure at all Xaa locations
MASRKSPVAAEERAGTGEGKGERCAVEEVALVVPETDDPSLPVMTFRAWALGLGSCVVLIFLNTFFTYRTQPLTISGILAQILVLPAGRFLAAVLPDREVRILGGRLGSFNLNPGPFNVKEHVIITIFANCGVSYGGGDAYSIGAITVMKAYYKQTLSFACALLIVLTTQILGYGWAGLLRRYLVDPAEMWWPSNLAQVSLFRALHEKEDKSRGPSRMRFFLIVFFASFAYYALPGYLLPILTFFSWACWAWPHSITAQQVGSGYHGLGVGAFTLDWAGISAYHGSPLVAPWASIANTAVGFVMFIYVIVPLCYWQFNTFDARRFPIFSNQLFTASGQKYDTTKVLTKDFDLNVAAYDSYGKLYLSPLFAISIGSGFLRFTATIVHVLLFHGSDMWKQSKSAMNAVKLDVHAKLMQRYRQVPQWWFLMLLLGSVVVSLLMSFVWKEEMQLPWWGMLFAFALAFVVTLPIGVIQATTNQQPGYDIIAQFMIGYALPGKPIANLLFKIYGRISTVHALSFLADLKLGHYMKIPPRCMYTAQLVGTVVAGVVNLAVAWWMLDNIENICDVEALHPDSPWTCPKYRVTFDASVIWGXLIGPGRLFGRHGLYRNLVWLFLVGAVLPVPVWLLSRAFPEKKWIALINVPVISYGFAGMPPATPTNIATWLVTGTIFNYFVFRYRKGWWQKYNYVLSAALDAGTAFMGVLIFFALQNAHHELKWWGTEVDHCPLASCPTAPGIAVKGCPVF

SEQ ID NO: 22086 - protein, 775 aa, Zea mays
  unsure (1)..(775): unsure at all Xaa locations
MGEIGTDHRGLAEAEAGVGGKEEGIVLGGHEEEEASPVEQVRLTVPSTDDPSLPVWTFRMWSIGLLSCALMSFLNQFFSYRTEPLIVTQITVQVASLPLGHFMARALPRARFRAPALLGGGEWSLNPGPFNIKEHVLISIFANAGFAFGNGSAYAVAIIDIIRAFYHRHISFFTAWLLVVTTQVLGYGWAGLLRKYVVQPAHMWWPGTLVQVSLFRALHEKDESAKASRQISRSKFFLXGLACSFAWDAVPGYLFPTLTSISWVCWVFSRSVTAQQLGSGMSGLGLGAFTLDWSTVSSFLFSPLISPFFATANIFFGYVFFVYVIMPAAYWGFDLYSAKTFPIFSSHLFMSNGSSYDVQSIVNNRFELDLDAYGKNGKVSLSVFFALSYGFSFATIAATITHVGLFYGKEIYYRFRSSQKEKPDIHTKLMERYSEIPAWWFYSLMALSIVVSLLLCTVLKREVQLPWWGLIFACGMAFVFTLPISIITATTNQTPGLNVITEYAMGLIMPGSPIAVVCFKVYGYMSMAQAVAFLSDFKLGHYMKIPPKSMFLVQFVGTIVAGTVNIGTAWWLLGSIDGICSDSLPPDSPWTCPNDRVFFDASVIWGLVGPRRIFGPDGNYGALNWFFLIGAAGPVIVYALHRTFPGQRWIPLINLPVLFGATAYMPPATAVNYNSWLLVGTVFNFFVFRYRKKWWTRYNYILSAALDAGVAFMGVVLYFSLTMQNKSIDWWGTAGEHCPLARCPTAKGVDLGDGVCPVFXSSLEFHVFTSGTSTG

SEQ ID NO: 22087 - protein, 420 aa, Zea mays
  unsure (1)..(420): unsure at all Xaa locations
LSANQNFDHYAQPYNTSRILNXXDYTVNLTAYKEYSPILLGPAFSLSYGMGFAGLISTLTHIALFYGPDVXASVCXXSRSEEPDIHLKLMRKYKEAPEWWFLAVFLVSFGFGLAACLGWQTHLPAWAYILCIIIGLFFFIPVGMVQAITNQQTGLNIITEMIFGYMLPGXRPVAMMLFKSWGYMMTFNGLQYVSDMKVGHYMKIPPRSMFGAQAFAVIWLSIVQIASYNFLRGNIEGICTPHQAQGLTCPNARTFYNASVIWGVIGPKLVFGAGQLYSWTNYFWLIGFLCPFIQWLLARRYPRSPLRYVVFPALFGAAGMIPPATTWYLAQWCIIGLVFNWWIRRRWLGWWTQYNYVLSGALDIGTALCTVVIGLGLGLGNAEFPDWWGNSVVANNLDYNGAAVLKVAPTSGPGIGPSTW

SEQ ID NO: 22088 - protein, 533 aa, Zea mays
  unsure (1)..(533): unsure at all Xaa locations
XACLQFFLTVLATSFAYYIVPNYLFPTISTVSVACLIWRRSVTAQQIGSGVYGLGVGAFGLDWATVAGFLGTPLSTPAFAIANIMAGFFLIVYVIVPFAYWSDAYGARRFPIISSHVFMANGSRYDVNRVLGAGTFQFSQAGYDGAGQIHLSIFFAFSYGLSFATLAATLSHVALYHGRSIWXXQTRATVRAAGGDVHARLMRRNYAAVPQWWFQVLLLLVLGLSLFTCEGFGRQLQLPYWGVLLAAGLAFFFTLPIGIITATTNQQPGLNVVTELIIGYLYPGRPLANVAFKTYGYISMSQAIMFLQDFKLGHYMKIPPRSMFAVQLVGTVLASSVYFATSWWLLESVPGICDPARLPEGSPWTCPGDDVFFNASIIWGVVGPLRMFGRLGLYAKMNYFFLAGALAPVPFWALARAFPDRPWLRLVNMPVLLGATGMMPPARSVNYLMWGAVGLAFNYVVYRRYKAWWARHNYVLSAGLDAGVAFMGILSYAVLQSRGVNGIDWWGLQVDDHCALARCPTAPGVRAPGCPVH

SEQ ID NO: 22089 - protein, 536 aa, Zea mays
  unsure (1)..(536): unsure at all Xaa locations
AHMPHPPRATTTMASSPQPPPHPPPRQEEDQQREEGHHHGDGGDDDQITTPLLVEAATTSSPSPSEGDDPENSPIEQVALTVPVGDDPSTPVLTFRMWVLGTASCALLSFLNQFFWYRKEPLTITAISAQIAVVPLGRLMAAALPARAVLRGTRWEFSLNPGPFSVKEHVLVTIFANSGAGTVYAIHVITAVRVFYGKHITFFVSLLVVLTTQVLGFGWAGIFRRYLVEPAAMWWPSNLVQVSLFRALHEKERRVKGGMTRNQFFLVAFVCSFAYYVFPGYLFQMLTSLSWLCWAFPRSVVAQQLGSGLSGLGVGAVGLDWSTISSYLGSPLASPWFATANVAAGFVLIMYVITPAAYYWLGLYGARSFPIFSDGLFTAAGQTYNISSIVDSNFRFDTEAYERNGPLYLSTFFAVTYGVGFASLTATVVHVFLFHGSEIWQLSRSAFQEKKVDVHTRLMRRYRQVPEWWFICILVANVAVTIFACEYYIEQLQLPWWGVLLACAIAFFFTLPIGIITWSTEENMAMQXWTSVSRAM

SEQ ID NO: 22090 - protein, 385 aa, Zea mays
  unsure (1)..(385): unsure at all Xaa locations
FLLSIAHLGPLCXSTHEAKIAVFSHSEIWQLSKSAFEDKKMDIHTKLMRRYRQVPEWWFICILVASVSATMLTCEYYIEQLQLPWWGVLLACALAIFYTLPIGILKATTNQAPGLNVITEYIMGYLYPGRPMANMCFKVYGYVGPHQALEFLQDFKLGHYMKIPPRAMFTAQVVGTLIAGSVYLGTIWWLLDTIPDVCNTELLPAGSPWTCPYDHVFYDASVLWGLIGPRRIFGDLGTYSAVNWFFLGGAIAPLLVWCTHKAFPAQKWIRHVNAPVLIGATTFMPPATAANYTTWILVAFLSGYVVYKYRRNWWERHNYLLSGALDAGLAFMAVLLYLCLGLENKSLNWWGNDLDGCPLASCPTAKGITVDGCPVHNXERSPFSI

SEQ ID NO: 22091 - protein, 312 aa, Zea mays
  unsure (1)..(312): unsure at all Xaa locations
XSRPAEFACEYYXEQLQLPWWGVLLACAIAFFFTLPIGIITATTNQTPGLNIITEYIMGYLYPGRPVANMCFKEYGYISMTQALAFLQDFKLGHYMKIPPRTMFMAQVVGTLIAALVYIGTAWWLMDSVPNICSTELLPADSPWTCPMDHVFYDASVIWGLIGPRRIFGDLGTYSAVNWFFLGGAVAPLLVWLAHRVFPSQSWILLVNMPVLIGSTGMMPPATAVNYTTWIIAGFLSGYVVYRYRRHWWERHNYLLSGALDAGLAFMAVLIYLCLGLENVGLNWWGNDLDGCPLASCPTAKGIVVEGCPVYT

SEQ ID NO: 22092 - protein, 355 aa, Zea mays
  unsure (1)..(355): unsure at all Xaa locations
MGEIGTDHRGLAEAEAGGSGKEEGMVLGDEEEEEETSPVEQVRLTVPSTDDPSLPVWTFRMWSIGLLSCALMSILNQFFSYRTEPLIVTQITVQVASLPLGHFMARALPRARFRAPALLGGGEWSLNPGPFNIKEHVLISIFANAGFAFGNGSAYAVAIIDIIRAFYHRHISFFTAWLLVVTTQVLGYGWAGLLRKYVVQPAHMWWPGTLVQVSLFRALHEKKDESAKASRQISRSKFFVVVLACSFAWYAVPGYLFPTLTSTSWLCWVFSKSVTAQQLGSGMKGLGLFAFTLDWSTVSSFLFSPLISPFFATXNIFVGYVVFVYVIMPXAYWGXXDLYSXKTFPIFSSHLFMSX

SEQ ID NO: 22093 - protein, 218 aa, Zea mays
  unsure (1)..(218): unsure at all Xaa locations
XHLPRWGVLLACALAIFYTLPIGILKATTNQAPGLNVITEYIMGYLYPGRPMANMCFKVYGYVGPHQALEFLQDFKLGHYMKIPPRAMFTAQVVGTLIAGSVYLGTIWWLLDTIPDVCNTELLPAGSPWTCPYDHVFYDASVLWGLIGPRRIFGDLGTYSAVNWFFLGGAIAPLLVWCTHKAFPAQKWIRHVNAPVLIGATTFMPPATAXVDYTESAG

SEQ ID NO: 22094 - protein, 310 aa, Zea mays
  unsure (1)..(310): unsure at all Xaa locations
MGEIGTDQLGLAEAEAAAAAVKEEGILDDDASPIEQVRLTVPTTDDSSLPVWTFRMWSIGLLSCALMSFLNQFFSYRTEPLVVTQITVQVASLPVGHFMARALPRTRFRAPALLGGGAWSLNPGPFNIKEHVLICIFAXNAGFAFGGGSAYAVGIINIIRAFYGRHISFLTAWLLVVTTQVLGYGWAGLMRKYVVQPAHMWWPGTLVQVSLFQALHEKKDESAKASRQISRSKFFVVVLACSFAWYAVPGYLFPTLTSTSWLCWVFSKSVTAQQLGSGMKGLGLFAFTLDWSTVSSFLFSPLISPFFATX

SEQ ID NO: 22095 - protein, 241 aa, Zea mays
  unsure (1)..(241): unsure at all Xaa locations
XLHGLGIAAIGLDWASISSYLGSPLVSPWFATANVAAGFFIVMYIIVPIGYWFDFYKAQTFPIYSSGLFTSAGQKYNISAIVDDHFHLDIEAYEKNGPLYLSTLFAVTYGIGFASLTATIVHVILFHGREILQLSRSAFQGKSVDIHTKLMRRYKQVPEWWFICILVVNIAVTVFACEYYIEQLQLPWWGVLLACSIAFFFTLPIGIITATTNQTPGLNIITEYIIGYLYPGRPVANMCFX

SEQ ID NO: 22096 - protein, 214 aa, Zea mays
LPYWGLLLACAIAFAFTLPVGVIFATTNMQPGLNIVTELIIGYLYPGKPLANVVFKTYGFISMGQALAFLADLKLGHYMKIPPRSMFFAQLAGTLTASTVHFATAWWLLTTVKDICDVGRLPAGSPWTCPGDDVFYNASIIWGVVGPLRMFGSLGNYWQMNYLFLVGLLAPLPVWLLQRAYPTNRVLAGVNLPLVFAGASGLVPARSVDFIMWG

SEQ ID NO: 22097 - protein, 172 aa, Zea mays
  unsure (1)..(172): unsure at all Xaa locations
XWSSXXAVAAALELPPPLIQATTNQQPGYDIIGQFIIGYILPGKPIANLIFKIYGRISTVHALSFLADLKLGHYMKIPPRCMYTAQLVGTVVAGVVNLGVAWWMLESIQDICDIEGDHPNSPWTCPKYRVTFDASVIWGLIGPRRLFGPGGMYRNLXWLFLIGAXLPXPXXX

SEQ ID NO: 22098 - protein, 231 aa, Zea mays
  unsure (1)..(231): unsure at all Xaa locations
XSTCSFAYYLIPSYLFPSLSTVSVLCWLYRDSVTAQQIGSGLRGLGIGSFGLDWNTVAGFLGNPLVSPAFTVVNVMAGFALTTYVALPLLYWTDTYYARRFPLISPHVYDDAGRPYDTGRVLNRDTFTLNLGGYDAYSRINVSVLFAVNYGIGFASLMSTLSHVALYHGREVWDGLCRKRQHQKTDVDDVHTRIMRRNYKPVPQWWFHLMLAVVLALSLFTCEGFGQQLQX

SEQ ID NO: 22099 - protein, 228 aa, Zea mays
  unsure (1)..(228): unsure at all Xaa locations
TRGRGRASSAPPWPKPTKRXXAGAEAEEVNEHPIEEVRNTVPTTDDPSEPCLTFRTWVLGMSSCVLLSFVNEFFNYRSSQLSIGTVLVQIASLPIGRLMASTLPGRPVRVPLIAWSFSLNPGPFSLKEHCLITIFAGAGCSGVYALNIVAIVKVFYRRQINPYAAMLLAQTTQLLGYGWAGLFRKFLVDSAYMWWPINLVQVTLLRAMHEEEKRPRGGVTRLQFFVIV

SEQ ID NO: 22100 - protein, 851 aa, Schizosaccharomyces pombe
MTARNSASIPTSIRKTSENEVSGDETPAGVGNLSTKTASKTSLTFRQSSSDESTSSYSGNHHNINIQHHPNRPFRTNSSSFSPNDYSISESPSKSKKDGVHVSAVQLDNETDSEVESEVEELERELEAIEDSVYPEVRAAVNPTDDVNLPVNTWRTWVLTTIFVIVFAAVNQFFSLRYPALSISFIVAQLILFPLGKLLNLLPNWKIGYGRFSFYLNSSPFNVKEHAAITIAVSLTSSTAYATNILSAQTSFYKQNLSWGYKILIVLTSQMLGYGFAGLTRRWIVYPAAMIWPQTLVSTVLFRTLHGNSGNDIGVLKNNRISANGWTISRYRFFAYVMIGSFVFYWFPGFIFKGLSYFTVLCWIWPKNRVVNQLFGYNSGLGILPLTFDWQQVVYNSNPLASPWWVICNTFGSVVLIFWIVVPILYYKGVWFSNYLPMLSSSTFDHTGVSYNSSRVLNSDYSFNHTKYESYSPLYMPMSYSMSTALNFAAVTAIFTHCALYNGKDIWQRLWKESGKDECIHRKLMRNYKEAPQWWYATLFIVVFGLTIFTVRYYDTQCPVWALIVALLIFIVNFIPQGVLEGITNQHVGLNIITELIGGYILPGKPLANLMIKLYGFIPMRQGLEFSRDLKLAQYMKIPPRILFFVQLFATILGGITQVAVQEWMNYHIPGICTTSQSNGFTCPNGRSIYNASLIWGAIGPAKMFSKGKPYYPLIFFFLIGAVAPFITWGLRKRFPKSWIGKLNAPVLFTGPGNIPPATGINYSSWAIVGFIFNYVIRKRAIHWWRKYNYVLAAAMDSGVAVAGVVIFLCVSYPGGKITWWGNTVYTKTYDWKSVPYRSLGPNETFGYTNW

SEQ ID NO: 22101 - protein, 785 aa, Schizosaccharomyces pombe
MIGSINESPIEEHMNDSPSTKEKADSVDISDYIVSHSDDSLSKDIKKDTKSFLDVEHGEISTVDEFEEDSPYPEVRAAVPPTDDPSMPCNTIRMWTIGLIYSTVGAAVNMFFSLRNPTVTLSVLISELLAYPALQIWDLIFPDREFRIGRLKFNFKPGPFNVKEHALIVVMSSVSFGNAYSTDIILAQRVHYKQRFGFGYEICLTLATQLIGYGLAGLSRRLLVRPASMLWPVNLVQCTLIKTLHRKDLRNAVANGWRISPFRFFLYVFIASFIWNWFPSYIFQALSLFAWVTWIRPNSPTVNQIFGESTGISILPMTFDWNQISAYILSPLMAPADALMNILLGVILFFWIVTPALNFTNTWYGDYLPISSSGIIDHFGNSYNVTRILTKDATFDLDAYQNYSPIFMSTTYALAFGLSFASITSVIFHVILYHGKEIYDRLRDPPAPDIHEKLMKAYDEVPFYWYLSVFLAFFGMMMGTIYGWKTETPWWVIIVGVIFSAVWFIPIGIVQAITNIQLGLNVFTEFIVGYMYPGRPLAMMIFKTVGYITMTQGLAFAADLKFGHYMKLPPRIMFYTQMIATIWSCFVQIGVLDWALGNIDNVCQADQPDNYTCPNATVFFNSSVIWGVIGPKRMFSGKNTYTGLQYFWLAGVLGTILFWALWKKWPQKWWGQLNGPLIFGGTGYIPPATPVNYLAWSGIGLFFNYYLKKIFADWWQKYNFTLSAALDTGTQLSVIILFFCLQLPMVNFPDWWGNDGAFNTLDATGAAVRKLVNESAGEFFGPAEW

SEQ ID NO: 22102 - protein, 776 aa, Schizosaccharomyces pombe
MIGSINESPIEEHMNDSPSTKEKADSVDISDYIVSHSDDSLSKDIKKDTKSFLDVEHGEISTVDEFEEDSPYPEVRAAVPPTDDPSMPCNTIRMWTIGLIYSTVGAAVNMFFSLRNPTVTLSVLISELLAYPALQIWDLIFPDREFRIGRLKFNFKPGPFNVKEHALIVVMSSVSFGNAYSTDIILAQRVHYKQRFGFGYEICLTLATQLIGYGLAGLSRRLLVRPASMLWPVNLVQCTLIKTLHRKDLRNAVANGWRISPFRFFLYVFIASFIWNWFPSYIFQALSLFAWVTWIRPNSPTVNQIFGESTGISILPMTFDWNQISAYILSPLMAPADALMNILLGVILFFWIVTPALNFTNTWYGDYLPISSSGIIDHFGNSYNVTRILTKDATFDLDAYQNYSPIFMSTTYALAFGLSFASITSVIFHVILYHGKEIYDRLRDPPAPDIHEKLMKAYDEVPFYWYLSVFLAFFGMMMGTIYGWKTETPWWVIIVGVIFSAVWFIPIGIVQAITNIQLGLNVFTEFIVGYMYPGRPLAMMIFKTVGYITMTQGLAFAADLKFGHYMKLPPRIMFYTQMIATIWSCFVQIGVLDWALGNIDNVCQADQPDNYTCPNATVFFNSSVIWGVIGPKRMFSGKNTYTGLQYFWLAGVLGTILFWALWKKWPQKWWGQLNGPLIFGGTGYIPPATPVNYLAWSGIGLFFNYYLKKIFADWWQKYNFTLSALDTGTQLSVIILFFCLQLPMVNFPDWWGNDGAFNTLDATGAAVRKLVNESAR

SEQ ID NO: 22103 - protein, 738 aa, Schizosaccharomyces pombe
  unsure (1)..(738): unsure at all Xaa locations
MVHELNYPLIEQFPVYGSYALQAAQFPHCSLFLHLDDPSMPCNTIRMWTIGLIYSTVGAAVNMFFSLRNPTVTLSVLISELLAYPALQIWDLIFPDREFRIGRLKFNFKPGPFNVKEHALIVVMSSVSFGNAXXXXXILAQRVHYKQRFGFGYEICLTLATQLIGYGLAGLSRRLLVRPASMLWPVNLVQCTLNKTLHRKDLRNAVANGWRIPPFRFFLYGFIASFXWNWFPSYIFQALSLXAWVTWIRPNSPTVNQIFXESTGISILPMTFXWNQISAYILSPLMAPADALMNILVGVILFLWIVTPALNFTNTWYGDYLPISSSGIIDHFGNSYNVTRILTKDATXDLDAYQNYSPIXMSTTYALAFGLSFAXXXSVIFHVILYHGKEIYDRLRDPPAPDIHEKLMKAYDEVPFYWYLSVFLAFFGMMMGTIYGWKTETPWWVIIVGVIFSAVWFIPIGIAQAITNIQLGLNVFTEFIVGYMYPGRPLAMMIYKTVGYITMTQGLAFAADLKFGHYMKLPPRIMFYTQMIATIWSCFVQIGVLDWALGNIDNVCQADQPDNYTCPNATVFFNSSVIWGVIGPKRMFSGKNTYTGLQYFWLAGVLGTIXFWALWKKWPQKWWGQLNGPLICGGTGYIPPATPVNYLAWSGIGLFXXYYLKKIXADWWQKYNFTLSAALDTGTQLSXIILXXXLQLPMVNXPDWWGNDGAXNTLDATGAAVRKLVXESAGEFFGPAEW

SEQ ID NO: 22104 - protein, 791 aa, Schizosaccharomyces pombe
MKTPKFITYVTRGFKGLESKSVENNKDHIVENSSPIASKFHEFDEQKKSFEIINYAGHEKFVDDITERESSVPGNAVYDITVRDIDAIVPVTDDVDIPASTFRMWILAFGLATVIAGVDAFFLMRYPSVSIAAIVALLVAYPLGQLWYYIIPQWEIKLPRGIRVSLNPGRFNRKEHACLYIFVNICVSAKLVNTLIIEQIKFFGVNIGIGRAILFNLCSYLSSFGWSGLALPILVYPPTLIWPSVLSSCALFKIFHDNDNTKACNWTISRLRYFFIVFVASFIWYWFPDLIFPALSSLGAWISWCKPSSAVLSQIFGVKTGLGLFPLTLDWAQISSLSNPLITPWWATCCIFTSFVFWIWIVLPGLYYQNYWQVAHFPIMTNSIYTVSGKSYDAQKVVDSKWELVTQKYQEYSPVMLPIAFIINIALSLGAFSSMMISFFLRFPTDVIQPICHVFKYSDIHTKLLKKYKRVHWGFYLASIIVSLGLGFAFTEGWHDIQIRSYGFVVSMVIGAALYIPLSLIESRSSFTISMQAFFEIVAAFWFNGQPMALLYFYSFGFGTLQHAMHMTQSAKIGHYMKVPPRLVAALLFTSGIWSSLVNSAVTGWIMYHVRDVCTSNAENNMTCRSPKTQFNSHLIWGLVGNHIFSSDGRYSFVMWFFLVGAVVSVVVYLLQISFPKSSWKHVNPALLLGGAAQIPSVTGINYSTWAAVAFCFNYLIRRGYYSWWKKYNLITAAAMDCGVAIAGLFIYFCVVYTGGSSNFSWWGTTVSSAGCDKKGCAHLSVSDISKPSGW

SEQ ID NO: 22105 - protein, 143 aa, Schizosaccharomyces pombe
MIGSINESPIEEHMNDSPSTKEKADSVDISDYIVSHSDDSLSKDIKKDTKSFLDVEHGEISTVDEFEEDSPYPEVRAAVPPTDDPSMPCNTIRMWTIGLIYSTVGAAVNMFFSLRNPTVTLSVLISELLAYPALQIWDLIFPD

SEQ ID NO: 22106 - protein, 836 aa, Yarrowia lipolytica
MSQYSRHAFDTDSDSDTELTPIYIDDRYSSMVSNDSRAGLLRRGGDLERDAESEKTREEKEEELRNHSFSKSRDKTRETVADATLESSSCVDSQYDTVETTSIFSVGRKKAINSPYPEVRAAVPATDDPLMPQNTPRMWVIGIFLVTICSGLNILFTLHWPAFVISSFFAAMVAWPLGRIWDQFVPNWRIPLTNIYLNNSPFNIKEHCLIIVMANVSYGTGVSYVPVIVLTMKHRYNNTYFGWGFSIVSSICVQCLGYGMAGICRRILVYPASLIWPSNLVTTTFLTNIHMNVNHTADGWKISRLRFFLIVFSAYFVWNWLPGYLAPFLSNFAFVTYAAPDNVIVNQIFGSSSGLGLIPINFDWNVIAGYIGSPLVPPFFSIGNVAAGVVVIFWIITPILHYSNAWYGRYLPMSDSNSYDRFQRTYDAERVLKPLVKGGKKKFELDVEKYKEYSPLYLSTTFALSYGVSFAAITSTVVHTILFHGKEIMYYWKHSRKEPEDVHMELMRKYPEVPEWWYALVLAICFALACVTVSVWETDLPIWALIIALLIAGGLLIPAGMIAALTNVTMGLNVLTEFVVGYILPGRPVGMMFFKTFGYISNAQALNFLVDLKLGHYLKLAPRVMFCAQILATTWGSICQLAVVEWAQMAIPDLCEESQKTNFSCPQVQVFYSASVIWGLVGPGRIFGEGQLYHGLLWMFLVGAALPFFSWLWLKRHPNSRLKFIHWPVFFNGPSQIPPATPYNYASWCVVGYIFNWLIKRRWFNWWAKYNYTLSAGLDVGMAVSAAVIFVSLQLPNINPPSWWGTNIFTPTMDIQGNAFQEVLKEGESFGMKTWK

SEQ ID NO: 22107 - protein, 801 aa, Neurospora crassa
MLRNFFRRRHGDEDVMPDMVDDGSLEGDSTGIEALTALKRFEKMHRLDPNLPLDELDEVETALNSANIEKGTEIDQILAEDNSPYPEVRASVRNYDVEMPVNTIRAWTIGMLLCTIGSAVNMLLSLRNPSISLSTLAIQLIAYPIGLGWDLIFPDRVFTVFGIKFNLKPGPFNFKEHVIIVVMSNAAYGGGALYATDVILAQEIWYKQSFGWAWQILFGISTLCTGYGLAGLARRFLVWPAAMIWPADLINCTLFYTLHDHSPSDPARTNGWSISRYRWFLIVMAGSFAWYWFPGYLFQGLSWMCWITWIWPDNVIVNQLFGGQSGYGLFPITLDWSIISGYLLSPLASPFHAIANVVGGVTFFFVIVSLGIQYSNIWYSAYLPVQESHSYDNTGKRYVVLRILNENLHFDEAKYHAYSPLYLPTQFALAYGLSFAAVAAVIVHVGLYHGKDIWNQWKLARHQEDDVHMRLMKKYRDAEDWWYIILFAVMLGMSFAVVCAWDTGFPWWAFIICILIPVVWTIPIGIIQAITNIQLGLNVLTEYVIGYMLPGRPLVMMMFKNYGYLVMSQALYFIQDLKLGHYMKVPPRVMFWSQLIASVWSAIVQIAVMNWALGAIPDICTDGQANQFDCPSAKVFFTASVIWGAIGPARMFSGKALYSSLQWFWLVGAVAPVISWFFVRRYPRSLWRYVNFPLVFGGSGWIPPATVYIYYCWGIVGTVFNFFIRRRKTGWWLQYNYLTSAALDVGLLLSTLVIFFSLTLSHTKAPEWFGNTVAKSTMDTTATAVQKLVPPGEIFGPREWP

SEQ ID NO: 22108 - protein, 1094 aa, Neurospora crassa
MENATLTPTLYPLIEAVDPLQIELAMTMTRGQENRFRMTPDRDRSPSPDIPFFLDDSDHHPSFPLRELLHQAVLPAGTNSSTTTRGQPTPTSSHSSQDFEVSLIGSTQDRDRVNTLPGRDEPVQTLPGNAHGLLQQLHLHEETGGDNADSDNDSTPSEPVSEEFMTTRQPSLLSVAPGRDSPSYGAITSAPARATSAPQSEGGEPSARAESRSESSARFRTGHDPTGRSSTGDSCDGSVGRSSERLSLSLQKSGEWGGSMTMRGIEGRFEAEVPLEGESLLDHIDELNEFDETEEDPADNSPYAQVRASVAPTDNTTLSINTPRMWTLAVLFSIIGSSTNLFFSLRYPSVAITPVIALLSTHPLGLMWDFFLKRADDPPEEYVDGCRTDSANIPVDHPTDEQPRVFVPWEKRSKLDQLRLWLAQGRWNEKEHSCVYVSSNVSFGFAFATDVIVEQTQFYKQDAPILYQILLTLSTQIMGYTFAGLTRGFLVRPSGMIWPGTLMSAAMFTTIHKQENHVANGWKMTRWKFFMVVFLAGFLFYFVPGLLFPALSYFNVITWFAPKNVVVANLFGVVSGLGLFPMTFDWAQIAYIGSPLLTPFWAAMNVVGGLVVVMWIIAPIAYYSNWLYSSYMPILSAAVFDNTGQVYDVSRILTEDFVFDREAYSKYSRVFLPITYVLGYAVQFAGLASLLTHTICWHGRDIWAQWKQTLGEMHGAEPKGSYEPVAVSTEGLSRTWSRLSSRSSFTRSNSSTENIMNREDVHNRLMRRYKDAPMSWYLITCILMLAIGIFVVEYYPVHLPWYGLLLALGICSILFIPIGIIMAVTNQHSSIYLICQLVAGAVFPGRPVANMVFVTYGYISSAQGIKFAADLKLGHYMKIPPRILFSVQMVATIVSSLTQIGVLNWMFKNVPGLCTPEALNGFTCPIARVHFNGSILWGVVGPSEFFGPGATYRPLVWAFAVGAVLPIPLWLYARKRKDSIVRKLNLPVLFGSLGWIPPATGLNFSVWALVCYVFNYVIKNRARAWWAKYTMTLSAALDSGLAFGIVVVFFGFIYPGVVKGFSWWGTEVYKQGCDWQACAYQAVPEGGRFGPDVW

SEQ ID NO: 22109 - protein, 777 aa, Schizophyllum commune
MATEDALPKLPHRPEPAREKTDGSLDEKIDEKLNNNKGEGFQDEPFELETQAQLDRQHVVTTGQDVSRYVVNLRDDEDPALTFRSLVLGTVIAGLGAALCQIYIFKPVLVSVSTVFLLLLIYCIGNAWAVFLPKRSLVKGTRFERYGGIIEFINPGPFMIKEHVVSTLVASTAAYGATSVNNFAVQRLYYDTHVGPLTAVFATFSTLTFGMGLVGILRPLTVYPAEMVYWSNLPQVTVFQALHFNRHESTKRVRVFWWGFTIMFIYELFPAYIFPLLNSVSIFCLASQKAKPSTRDVFTNIFGGGNANEGLGLLNFSFDWQYIGSNYMSYPLLQQANSWIGLGACYVIMAAIYYSNAWDSKNYKMLSTSIFNHNGTVYDQAAVFGKNGILNETALEEYGLPAMTGSNAWANFAQNLAIGALIAHVTLFWSGDMRDAVLHFRNGKKTNDDPHYLAMQKYKEAPWWWYFILLFLAFIAGLIVCIKGETSLPWWSYIVSLAVGAFITPFSTILYGRMGNGIATNNLMKMIPGALNPGRPVANLYFSMWSHDVVSTSIGLAGDLKVGQYTKVPPRVMFLTQLWGCILGAIVNYVVMISIVDAQREVLLDASGTNVWSGQTIQSLNSQAVTWSLAKELYSASGPYVIVPIGLAIGLVPPFIQWLISKRWPTIKGIKVESIILPIIFNYAQTMSKGITSYVSTSIVIGLVSQLWLRQHHPVWYRKYNYILGGAFDGGAQVMVFILSFAVFGASGVERPFPSWAGNPAKGNIDYCNGNGALDAS

SEQ ID NO: 22110 - protein, 783 aa, Candida albicans
MDKIRAVISGGEKPPVDTDNDHNTDFEADRKMPDLDIVVSKSQEFDPVTSHLVNDIMEDEYAAVHVEDDSPYPEVRAAVPSTDDPTLPQNTIRAWVIGLILTTVGCGMNMLFSFHSPSFAITTFVTSILAWPIGNFWAWIVPDWKIFGASLNPGPFNVKEHTIITIMANVSFGTGAAYATDILLAQNMFYKSNFGWGYNLLLIWSTQCIGFAFGGVMRRFVVDSPGAIWPSNLVTATFLTNMHINENHTANGWKISRLAFFVIVFVASFVWYWFPGYIFQALSYFSWITWIKPNNVIINQVFGSSSGLGMIPNNIALDWNQIAGYIGSPLIPPASVIATIFGSIVLIFWIVVPAIHYSNTWYSQYLPISSTGSFDRFQQTYNVSKIIDHKTLSFNEAEYKKYSPLFLSTTFAISYGLSFASILATITHTICFHGRDLIASLKAKEKPDVHNRLMKAYKPVPEWWYLVVFLVFFGMSIATVRAWPTEMPVWGLVFALIIAIIFLLPVAIIYAKTNIAVGLNVVTEFIVGYVLGGRPLCMMLFKTFGYITNNQAVTFVQDMKLGHYMKIDPRTLFWAQFAATIWGSLVQIAVLEWAYGAIDNLCAADQKNHYTCPNGKVFFNASIIWGVIGPQRQFSHGQIYYGLLFFFIIGAVTPVINWLILKKWPNSPVKYLHWPVFFSGTGYIPPATPYNYTSYCAVGLFFGWWIKKKWFHWWSKYNYSLSAGLDIGLAWCSLIIFLCLSLTNTDFPSWWGNDVINTTLDTQVVTNIRHILKEGEAFGPSSW

SEQ ID NO: 22111 - protein, 471 aa, Streptomyces coelicolor A3(2)
MAQPATEPAKGSSSTPSPEHTEDAVTSVHPVDEKLHPSRLVPAALQHIAAMYAGVVTPPLIIGQACGLDIEGRTRLIAASLLIAGVATLLQTLGVKGFVGNRLPFVNAASSAGIAPILAIVETNAKGSQLPAVYGAVMVAGVFCLAVGPFFGRLLRFFPPLVTGVVITLIGVTLMPVPVGWAQGGDKTAADFGSMRNLALAAFTLAVILVIQRFGKGFVKQVALLFGLLIGTLAAIPFGMADFGALRSAPVAALPTPFAFGAPEFQPAAILSLCIVMLVLMTESSAGMLALGEICDRRADARVITRGLRTDGLATLVGPVFGGFPTSAFAQNVGVVSLTRVRSRYVVAVAGATLLVLGAFPVLGAVVSLVPMPVLGGAGIVLFGSIAVSGIRTLSEAGLDDSSNIILVAVALGAGIIPLAAPTFYAEFPAWAQTVLGSGISAGAIVAVALNLFFHHLGTRSRGTVPALKSS

SEQ ID NO: 22112 - protein, 462 aa, Streptomyces coelicolor A3(2)
MADHPVDEKLPPLKMATTGLQHVAAMYAGVVAPPLIVGAAIGLSATELTFLTGACLFTAGLATFLQTLGIWKIGARLPFVNGVTFAGVAPMTAVVASTDDKSDALPIIFGAVIVAGLLGFVAAPFFSKAIRFFPPVVTGTVITLIGISLLPVAFGWAQGPSPTADDFGSATNLGLAGITLAIVLFLRRFTRGFVKQIAVLLGLVAGTLVAIPFGVTDFGPVADADVVGFPTPFHFGAPQFQIAAIISMCVVMVVSMTESTADMLALGEIVDRPADEKTIAAGLRADTLGSALSPVFNGFMCSAFAQNIGLVAMTKIRSRYVVAVGGGFLVLMGLCPMAASLIAVVPRPVLGGAGVVLFGSVAASGIQTLVRASLDKDNNVLIVAVSLAVGIIPIAAPEFYHSFPENARIILDSGISTGCVAAVLLNLVFNHIGGRGRDAEDVTHPMEAGDEITESSREAAMK

SEQ ID NO: 22113 - protein, 478 aa, Streptomyces coelicolor A3(2)
MDLGVRWKLHGDGKVPAPGAVVRPDERLSWPRTAGLGAQHVVAMFGASFVAPVLMGLDPNLAIMMSGVATVIFLLATRGRVPSYLGCSLSFVGVAAVIRAQGGTSATVTGAVLVVGVALFLVGLAVQRFGARIIHAAMPPVVTGAVVMLIGFNLAPVTASTYWPQDQWTALFVMLFTGLAVVCLRGFWSRIAIFLGLVFGYVLSWALDRIFGKIHSVDGSGKPTDHWRLDFSAVGQADWIGLPSFHGPSFEWSAILVALPVVIALIAENAGHVKAVGEMTGDNLDDKLGTAISADGIGSVLSTAVGGPPNTTYSENIGVMAATRVYSTAAYWAAAGFALLFGLCPKFGAVVAAIPGGVLGGITVILYGMIGLLGAQIWINAKVDMRNPLNLVPAAAGIIIGVGNVSMEFTDTFSLSGIALGTLVVITGYHALRAFAPAHLKTQQPLLDEGTSSYDAKTGSGGAGGDGGGDGGAQRARS

SEQ ID NO: 22114 - protein, 647 aa, Mus musculus
MGIGKNTASKSVEAGGSTEGKYEEEAKHSNFFTLPVVINGGATSSGEQDNEDTELMAIYTTENGIAEKSSLAETLDSTGSLDPQRSDMIYTIEDVPPWYLCIFLGLQHYLTCFSGTIAVPFLLADAMCVGDDQWATSQLIGTIFFCVGITTLLQTTFGCRLPLFQASAFAFLAPARAILSLDKWKCNTTEITVANGTAELLEHIWHPRIQEIQGAIIMSSLIEVVIGLLGLPGALLRYIGPLTITPTVALIGLSGFQAAGERAGKHWGIAMLTIFLVLLFSQYARNVKFPLPIYKSKKGWTAYKFQLFKMFPIILAILVSWLLCFIFTVTDVFPSNSTDYGYYARTDARKGVLLVAPWFKVPYPFQWGMPTVSAAGVIGMLSAVVASIIESIGDYYACARLSCAPPPPIHAINRGIFVEGLSCVLDGIFGTGNGSTSSSPNIGVLGITKVGSRRVIQYGAALMLGLGMVGKFSALFASLPDPVLGALFCTLFGMITAVGLSNLQFIDLNSSRNLFVLGFSIFFGLVLPSYLRQNPLVTGITGIDQILNVLLTTAMFVGGCVAFILDNTIPGTPEERGIKKWKKGVSKGSKSLDGMESYNLPFGMNIIKKYRCFSYLPISPTFAGYTWKGFGKSENSRSSDKDSQATV

SEQ ID NO: 22115 - protein, 592 aa, Mus musculus
MAIYTTENGIAEKSSLAETLDSTGSLDPQRSDMIYTIEDVPPWYLCIFLGLQHYLTCFSGTIAVPFLLADAMCVGDDQWATSQLIGTIFFCVGITTLLQTTFGCRLPLFQASAFAFLAPARAILSLDKWKCNTTEITVANGTAELLEHIWHPRIQEIQGAIIMSSLIEVVIGLLGLPGALLRYIGPLTITPTVALIGLSGFQAAGERAGKHWGIAMLTIFLVLLFSQYARNVKFPLPIYKSKKGWTAYKFQLFKMFPIILAILVSWLLCFIFTVTDVFPSNSTDYGYYARTDARKGVLLVAPWFKVPYPFQWGMPTVSAAGVIGMLSAVVASIIESIGDYYACARLSCAPPPPIHAINRGIFVEGLSCVLDGIFGTGNGSTSSSPNIGVLGITKVGSRRVIQYGAALMLGLGMVGKFSALFASLPDPVLGALFCTLFGMITAVGLSNLQFIDLNSSRNLFVLGFSIFFGLVLPSYLRQNPLVTGITGIDQILNVLLTTAMFVGGCVAFILDNTIPGTPEERGIKKWKKGVSKGSKSLDGMESYNLPFGMNIIKKYRCFSYLPISPTFAGYTWKGFGKSENSRSSDKDSQATV

SEQ ID NO: 22116 - protein, 648 aa, Mus musculus
MMGIGKNTASKSVEAGGSTEGKYEEEAKHSNFFTLPVVINGGATSSGEQDNEDTELMAIYTTENGIAEKSSLAETLDSTGSLDPQRSDMIYTIEDVPPWYLCIFLGLQHYLTCFSGTIAVPFLLADAMCVGDDQWATSQLIGTIFFCVGITTLLQTTFGCRLPLFQASAFAFLAPARAILSLDKWKCNTTEITVANGTAELLEHIWHPRIQEIQGAIIMSSLIEVVIGLLGLPGALLRYIGPLTITPTVALIGLSGFQAAGERAGKHWGIAMLTIFLVLLFSQYARNVKFPLPIYKSKKGWTAYKFQLFKMFPIILAILVSWLLCFIFTVTDVFPSNSTDYGYYARTDARKGVLLVAPWFKVPYPFQWGMPTVSAAGVIGMLSAVVASIIESIGDYYACARLSCAPPPPIHAINRGIFVEGLSCVLDGIFGTGNGSTSSSPNIGVLGITKVGSRRVIQYGAALMLGLGMVGKFSALFASLPDPVLGALFCTLFGMITAVGLSNLQFIDLNSSRNLFVLGFSIFFGLVLPSYLRQNPLVTGITGIDQILNVLLTTAMFVGGCVAFILDNTIPGTPEERGIKKWKKGVSKGSKSLDGMESYNLPFGMNIIKKYRCFSYLPISPTFAGYTWKGFGKSENSRSSDKDSQATV

SEQ ID NO: 22117 - protein, 605 aa, Mus musculus
MKTPEDPGSPKQHEVVDSAGTSTRDRQAPLPTEPKFDMLYKIEDVPPWYLCILLGFQHYLTCFSGTIAVPFLLAEALCVGRDQHMVSQLIGTIFTCVGITTLIQTTVGIRLPLFQASAFAFLVPAKSILALERWKCPSEEEIYGNWSMPLNTSHIWHPRIREVQGAIMVSSMVEVVIGLMGLPGALLSYIGPLTVTPTVSLIGLSVFQAAGDRAGSHWGISARSILLIVLFSQYLRNLTFLLPVYRWGKGLTLFRVQIFKMFPIVLAIMTVWLLCYVLTLTDVLPADPTVYGFQARTDARGDIMAISPWIRIPYPCQWGLPTVTVAAVLGMFSATLAGIIESIGDYYACARLAGAPPPPVHAINRGIFTEGICCIIAGLLGTGNGSTSSSPNIGVLGITKVGSRRVVQYGAGIMLILGAIGKFTALFASLPDPILGGMFCTLFGMITAVGLSNLQFVDMNSSRNLFVLGFSMFFGLTLPNYLDSNPGAINTGIPEVDQILTVLLTTEMFVGGCLAFILDNTVPGSPEERGLIQWKAGAHPHSETSASLKSYDFPFGMGMVKRTTFFRYIPICPVFRGFFKKTQNQPPVLEDTPDNIETGSVCTKV

SEQ ID NO: 22118 - protein, 605 aa, Mus musculus
MKTPEDPGSPKQHEVVDSAGTSTRDRQAPLPTEPKFDMLYKIEDVPPWYLCILLGFQHYLTCFSGTIAVPFLLAEALCVGRDQHMVSQLIGTIFTCVGITTLIQTTVGIRLPLFQASAFAFLVPAKSILALERWKCPSEEEIYGNWSMPLNTSHIWHPRIREVQGAIMVSSMVEVVIGLMGLPGALLSYIGPLTVTPTVSLIGLSVFQAAGDRAGSHWGISACSILLIVLFSQYLRNLTFLLPVYRWGKGLTLFRVQIFKMFPIVLAIMTVWLLCYVLTLTDVLPADPTVYGFQARTDARGDIMAISPWIRIPYPCQWGLPTVTVAAVLGMFSATLAGIIESIGDYYACARLAGAPPPPVHAINRGIFTEGICCIIAGLLGTGNGSTSSSPNIGVLGITKVGSRRVVQYGAGIMLILGAIGKFTALFASLPDPILGGMFCTLFGMITAVGLSNLQFVDMNSSRNLFVLGFSMFFGLTLPNYLDSNPGAINTGIPEVDQILTVLLTTEMFVGGCLAFILDNTVPGSPEERGLIQWKAGAHANSETSASLKSYDFPFGMGMVKRTTFFRYIPICPVFRGFSKKTQNQPPVLEDTPDNIETGSVCTKV

SEQ ID NO: 22119 - protein, 605 aa, Mus musculus
MKTPEDPGSPKQHEVVDSAGTSTRDRQAPLPTEPKFDMLYKIEDVPPWYLCILLGFQHYLTCFSGTIAVPFLLAEALCVGRDQHMVSQLIGTIFTCVGITTLIQTTVGIRLPLFQASAFAFLVPAKSILALERWKCPSEEEIYGNWSMPLNTSHIWHPRIREVQGAIMVSSMVEVVIGLMGLPGALLSYIGPLTVTPTVSLIGLYVFQAAGDRAGSHWGISACSILLIVLFSQYLRNLTFLLPVYRWGKGLTLFRVQIFKMFPIVLAIMTVWLLCYVLTLTDVLPADPTVYGFQARTDARGDIMAISPWIRIPYPCQWGLPTVTVAAVLGMFSATLAGIIESIGDYYACARLAGAPPPPVHAINRGIFTEGICCIIAGLLGTGNGSTSSSPNIGVLGITKVGSRRVVQYGAGIMLILGAIGKFTALFASLPDPILGGMFCTLFGMITAVGLSNLQFVDMNSSRNLFVLGFSMFFGLTLPNYLDSNPGAINTGIPEVDQILTVLLTTEMFVGGCLAFILDNTVPGSPEERGLIQWKAGAHANSETSASLKSYDFPFGMGMVKRTTFFRYIPICPVFRGFSKKTQNQPPVLEDTPDNIETGSVCTKV

SEQ ID NO: 22120 - protein, 543 aa, Mus musculus
MPTSFCSALQHFLTALGGLVAVPLILAKDLCLQHDPLTQSYLISTIFFVSGICTLLQVFLGVRLPILQGGTFAFVAPSLAMLSLPAWKCPEWTLNASQVNTSSPEFIEEWQKRIRELQGAIMVASCVQMLVGFSGLIGFLMRFIGPLTIAPTISLVALPLFDSAGSDAGIHWGISALTIFLIVLFSQYLKNVMVPVPVYGRRKKCHISRFNLFQVFPVLLALCLSWLFCFVLTVTNTLPESPTAYGYMARTDTKGSVLSQAPWFRFPYPGQWGLPTISLAGVFGIIAGVISSMVESVGDYHACARLVGAPPPPKHAINRGIGIEGLGCLLAGAWGTGNGTTSYSENVGALGITRVGSRMVIVAAGCVLLVMGMFGKIGAAFATIPTPVIGGMFLVMFGIISAVGISNLQYVDMNSSRNLFVFGFSIYCGLAIPNWVNKNPEKLQTGILQLDQVIQVLLTTGMFVGGFLGFVLDNTIPGSTTPPCSCFYSSGSQVPGVGLTKLDSRCGHSCSRRQLHLPSSQPPFIVSSLIYRKSKNIEEETPF

SEQ ID NO: 22121 - protein, 481 aa, Mus musculus
QHYLTCFSGTIAVPFLLADAMCVGDDQWATSQLIGTIFFCVGITTLLQTTFGCRLPLFQASAFAFLAPARAILSLDKWKCNTTEITVANGTAELLEHIWHPRIQEIQGAIIMSSLIEVVIGLLGLPGALLRYIGPLTITPTVALIGLSGFQAAGERAGKHWGIAMLTIFLVTDYGYYARTDARKGVLLVAPWFKVPYPFQWGMPTVSAAGVIGMLSAVVASIIESIGDYYACARLSCAPPPPIHAINRGIFVEGLSCVLDGIFGTGNGSTSSSPNIGVLGITKVGSRRVIQYGAALMLGLGMVGKFSALFASLPDPVLGALFCTLFGMITAVGLSNLQFIDLNSSRNLFVLGFSIFFGLVLPSYLRQNPLVTGITGIDQILNVLLTTAMFVGGCVAFILDNTIPGTPEERGIKKWKKGVSKGSKSLDGMESYNLPFGMNIIKKYRCFSYLPISPTFAGYTWKGFGKSENSRSSDKDSQATV

SEQ ID NO: 22122 - protein, 611 aa, Mus musculus
MSRSPLHPIPLLSEGYQDTPAPLPPLLPPLQNPSSRSWASRVCGPSTWGLSCLLALQHFLVLASLLWASHLLLLHGLPPGGLSYPPAQLLASSFFSCGLSTVLQTWMGSRLPLIQAPSLEFLIPALVLTNQKLPLTTKTPGNASLSLPLCSLTRSCHGLELWNTSLREVSGAVVVSGLLQGTIGLLGVPGRVFPYCGPLVLAPSLVVAGLSAHKEVAQFCSAHWGLALLLILLMVVCSQHLGSCQIPLCSWRPSSTSTHICIPVFRLLSVLAPVACVWFISAFVGTSVIPLQLSEPSDAPWFWLPHPGEWEWPLLTPRALAAGISMALAASTSSLGCYALCGQLLRLSPPPPHACSRGLSLEGLGSVLAGLLGSPLGTASSFPNVGTVSLFQTGSRRVAHLVGLFCMGLGLSPRLAQLFTSIPLPVLGGVLGVTQAVVLSAGFSSFHLADIDSGRNVFIVGFSIFMALLLPRWLREAPVLLNTGWSPLDMFLRSLLAEPIFLAGLLGFLLENTISGTRAERGLGQRLPTSFTAQEIQMLQQSRRKAAQEYGLPLPIRNLCSCIPQPLHCLCPMPEDSGDEGGSSKTGERADLLPNSGESYSTASREGVRSQ

SEQ ID NO: 22123 - protein, 611 aa, Mus musculus
MSRSPLHPIPLLSEGYQDTPAPLPPLLPPLQNPSSRSWASRVFGPSTWGLSCLLALQHFLVLASLLWASHLLLLHGLPPGGLSYPPAQLLASSFFSCGLSTVLQTWMGSRLPLIQAPSLEFLIPALVLTNQKLPLTTKTPGNASLSLPLCSLTRSCHGLELWNTSLREVSGAVVVSGLLQGTIGLLGVPGRVFPYCGPLVLAPSLVVAGLSAHKEVAQFCSAHWGLALLLILLMVVCSQHLGSCQIPLCSWRPSSTSTHICIPVFRLLSVLAPVACVWFISAFVGTSVIPLQLSEPSDAPWFWLPHPGEWEWPLLTPRALAAGISMALAASTSSLGCYALCGQLLRLSPPPPHACSRGLSLEGLGSVLAGLLGSPLGTASSFPNVGTVSLFQTGSRRVAHLVGLFCMGLGLSPRLAQLFTSIPLPVLGGVLGVTQAVVLSAGFSSFHLADIDSGRNVFIVGFSIFMALLLPRWLREAPVLLNTGWSPLDMFLRSLLAEPIFLAGLLGFLLENTISGTRAERGLGQRLPTSFTAQEIQMLQQSRRKAAQEYGLPLPIKNLCSCIPQPLHCLCPMPEDSGDEGGSSKTGERADLLPNSGESYSTASREGVRSQ

SEQ ID NO: 22124 - protein, 505 aa, Mus musculus
MGSRLPLIQAPSLEFLIPALVLTNQKLPLTTKTPGNASLSLPLCSLTRSCHGLELWNTSLREVSGAVVVSGLLQGTIGLLGVPGRVFPYCGPLVLAPSLVVAGLSAHKEVAQFCSAHWGLALLLILLMVVCSQHLGSCQIPLCSWRPSSTSTHICIPVFRLLSVLAPVACVWFISAFVGTSVIPLQLSEPSDAPWFWLPHPGEWEWPLLTPRALAAGISMALAASTSSLGCYALCGQLLRLSPPPPHACSRGLSLEGLGSVLAGLLGSPLGTASSFPNVGTVSLFQTGSRRVAHLVGLFCMGLGLSPRLAQLFTSIPLPVLGGVLGVTQAVVLSAGFSSFHLADIDSGRNVFIVGFSIFMALLLPRWLREAPVLLNTGWSPLDMFLRSLLAEPIFLAGLLGFLLENTISGTRAERGLGQRLPTSFTAQEIQMLQQSRRKAAQEYGLPLPIKNLCSCIPQPLHCLCPMPEDSGDEGGSSKTGERADLLPNSGESYSTASREGVRSQ

SEQ ID NO: 22125 - protein, 592 aa, Rattus norvegicus
MAIYTTENGIAEKSSLAETLDSTGSLDPQRSDMIYTIEDVPPWYLCIFLGLQHYLTCFSGTIAVPFLLADAMCVGDDQWATSQLIGTIFFCVGITTLLQTTFGCRLPLFQASAFAFLAPARAILSLDKWKCNTTEITVANGTAELLEHIWHPRIQEIQGAIIMSSLIEVVIGLLGLPGALLRYIGPLTITPTVALIGLSGFQAAGERAGKHWGIAMLTIFLVLLFSQYARNVKFPLPIYKSKKGWTAYKLQLFKMFPIILAILVSWLLCFIFTVTDVFPSNSTDYGYYARTDARKGVLLVAPWFKVPYPFQWGMPTVSAAGVIGMLSAVVASIIESIGDYYACARLSCAPPPPIHAINRGIFVEGLSCVLDGVFGTGNGSTSSSPNIGVLGITKVGSRRVIQYGAALMLGLGMIGKFSALFASLPDPVLGALFCTLFGMITAVGLSNLQFIDLNSSRNLFVLGFSIFFGLVLPSYLRQNPLVTGITGIDQVLNVLLTTAMFVGGCVAFILDNTIPGTPEERGIKKWKKGVSKGNKSLDGMESYNLPFGMNIIKKYRCFSYLPISPTFAGYTWKGFGKSENRRSSDKDSQATV

SEQ ID NO: 22126 - protein, 604 aa, Rattus norvegicus
MKAQEDPGSSKQHECPDSAGTSTRDQQAPLPAEPKFDMLYKIEDVPPWYLCILLGFQHYLTCFSGTIAVPFLLAEALCVGRDQHMISQLIGTIFTCVGITTLIQTTVGIRLPLFQASAFAFLVPAKAILALERWKCPPEEEIYGNWSMPLNTSHIWHPRIREVQGAIMVSSVVEVVIGLLGLPGALLSYIGPLTVTPTVSLIGLSVFQAAGDRAGSHWGISACSILLIVLFSQYLRNLTFLLPVYRWGKGLTLFRIQIFKMFPIVLAIMTVWLLCYVLTLTDVLPADPTVYGFQARTDARGDIMAISPWIRIPYPCQWGLPTVTVAAVLGMFSATLAGIIESIGDYYACARLAGAPPPPVHAINRGIFTEGVCCIIAGLLGTGNGSTSSSPNIGVLGITKVGSRRVVQYGAGIMLILGAIGKFTALFASLPDPILGGMFCTLFGMITAVGLSNLQFVDMNSSRNLFVLGFSMFFGLTLPNYLDSNPGAINTGVPEVDQILTVLLTTEMFVGGCLAFILDNTVPGSPEERGLIQWKAGAHANSETLASLKSYDFPFGMGMVKRTTFFRYIPICPVFRGFSKTENQPAVLEDAPDNTETGSVCTKV

SEQ ID NO: 22127 - protein, 864 aa, Rattus norvegicus
MESTVDALDSHRLKLLDVIASVTAASVVTLSKCVCDFYVDAWDLIYTSGVTLLLRVIREQLQLLDVPTVQILYEAVVTLSASACIPPRPGLVLFHDAYFWIGLSFDELCPALDELKQVENFSTNTAATFPGPSEAIVDSSRGRQTHVPVAPLLRPLTPRSSLLSRLRSCLLAAPEPLRSMPSPNSSKRSPNSVSSQPFLSSRGRQKESSLWLPPVAMNSAVCSLESPNSRRGDGALSSHTEDQGKTKDRQQKDFSSSHLAYGILDRPPWYLCIFLGIQHFLTALGGLVAVPLILAKDLCLQHDPLTQSYLISTIFFVSGICTLLQVLLGVRLPILQGGTFAFVAPSLAMLSLPAWKCPEWTLNASLVNTSSPEFTEEWQKRIRELQGAVMVASCIQMLVGFSGLIGYLMRFIGPLTIAPTISLVALPLFDSASNDAGTHWGISALTIFLIVLFSQYLKNVMVPVPVYGGGKRCHISKFNLFQVFPVLLALCLSWLFCFVLTVTNTFPESPTAYGYMARTDTKGSVLSQAPWFRFPYPGQWGLPTISLAGVFGIIAGVISSMVESVGDYHACARLVGAPPPPKHAINRGIGIEGLGCLLAGAWGTGNGTTSYSENVAQCGTLGTAARAASEVQYSSVKGAGPDAQGIYLPWFSYPSSLGVQVGSRMVIVAAGCVLLLMGMFGKIGAAFATIPTPVIGGMFLVMFGIISAVGISNLQYVDMNSSRNLFVFGFSIFCGLAVPNWVNKNPEKLQTGILQLDQVIQVLLTTGMFVGGFLGFVLDNTIPGSLEERGLLAWGEIQEDSEETPKASKVYGLPWGIGTKFCTSSCTRILPFWPRIDHHGDECPVSRLKQKQQAYWILFCGPAG

SEQ ID NO: 22128 - protein, 1003 aa, Rattus norvegicus
MDLAGLLLDEEGTFSLSGFQDFTFLPGHQKLSARIRRRLYYGWDLETDCSLEELSSPVADITVELLQKAAPSPIRRLQKKYVAHVSREACISPCAMMLALVYIERLRHRNPDYLQHVSSSDLFLISMMVASKYLYDEGEEEEVFNDEWGAAGGVAVPTLNALERSFLSAMDWRLYTDPREIFEVLSWLESCVAEQQGRRRGWYTYTDLCVLLEQPMWQLSLGSLCQRLVKLSCLLAVAYVSSVALAVASMAVIHQSLGLSSSPSPSPPELTLVPKNLLQPCIPAPVPQCLTNVSSCLEDSVELPSLWGSLLDPLTPPLMPPPDPPAPPTPFHKCPFCQKFQRNPPNCRACHQPNRSLLPLLGLLVWAFHLGAQLSSGSTAFPGLDISALGLPPAAASQSPPRRALIPTCSAPGFQFLLMWHVYGPADLDGQQAASNPGSVPRVSYPCTGADKPEATSDDQDTWKCLTRSCHGPELWNTSLREVSGAVVMSGLLQGTMGLLGVPGRVFPYCGPLVLAPSLVVAGLSAHKEVAQFCSAHWGLALLYAHPAHGGMLPALGVLPGTPLLLEASFNLFNSHLYSYLPTPFGEWEWPLLTPKALAAGISMALAASTSSLGCYALCGQLLHLSPPPPHACSRGLSLEGLGSVLAGLLGSPLGTASSFPNVGTTGSRRVAHLVGLFCMGLGLSPRLAQLFTNIPLPVLGGVLGVTQAVVLSAGFSSFHLADIDSGRNVFIVGFSIFMALLLPRAFLQMEELEQGLLMQPWAWLQLAENSLLAKASITKHGYALLISDLQQVWHEQVDTLEVSQRAKELNKRLTAPPAAFLHHLDEVLRPLFKDSAHQDAAHPSKATFSCDRGEEVLILRVRSELSGLPFNWHFHCLPASSLLVSQHLICPLMGVSLALHSHVRELAALLRMKDLEIQAYQESGAVLSRGRLKTEPFEENSFLEQFMVEVFFKMDVEFLHQVFSCDSDHCHIGVFHSTESEIQVWLSPMKDRLICAQLLLAV

SEQ ID NO: 22129 - protein, 332 aa, Cavia porcellus
TIAVPFLLAEALCVGRDQHMVSQLIGTIFTCVGVTTLIQTTLGIRLPLFQASALAFLVPAKAILALEKWKCPPEEEIYGNWSLPLNTSHIWHPRIREIQGAIMVSSLVEVVIGLMGLPGALLNYIGPLTVTPTVSLIGLSVFQAAGDRAGSHWGISACSILLIVLFSQYLRNVTFLLPGYRWGKGLTFFRIQIFKMFPIVLAIMTVWLLCYVLTLTDVLPVDPTDYGFQARTDARGDIITISPWVRIPYPCQWGVPTVTMAAVLGMFSATLAGIIESIGDYYACARLAGAPPPPVHAINRGIFTEGICCIIAGLLGTGNGSTSSSPNIGVLG

SEQ ID NO: 22130 - protein, 425 aa, Thermoanaerobacter tengcongensis
MPNKVYEIEETPPIKQMVPLSLQHVFAMFGATILVPLLTGLDPSVTLFTSGLGTLIFHLMTKGKVPAYLGSSFAFIAPIIAATKQFGLKGAFFGMFAAGLVYVVVFIIISLTGIDWLEKLLPPVVVGPVVMIIGLSLAPVAIAQAQKDLATALFTAALIIIFSMFGKGFIKVIPILLGTIGGYIFAITRGLVDFGPVAKASWIAIPKFSFLTGHTPEVAWGAVALVAPLALVAIIEDLGHVLVIGNIVERDLIKNPGFHRVMLGNGLATSIAALFGGPPSTTYGENIGVLAITRVYSSKVIQGAAIIAILLSFIQKIGALIEVIPQAVMGGVTIILFGMIAAAGMRTLVENKVDFSDSRNLIIASVILTLGVGGIKIPLGNFVFEGIGPATLAGILLNLVLPKINLGEEKMTEKVKSSKEAVQKA

SEQ ID NO: 22131 - protein, 445 aa, Ralstonia metallidurans
METLLYKVEDRPPILTTVLLAAQHLLAALGGIIAVPLVLGGALKLPPDQIVALVNAALLGSGIVTIIQCKGVGPVGIRLPCVMGTSFTFVGAGISVGLEHGVPGILGASLAGSLVMIVGSFFMPTIRKLFPHTVTGVVVTMIGLSLTPVAIDWAAGGAGSANYAAPGSLAIAGIVLLLVIGFVQWGKGIVSASAVVLGIMIGYLICLALGMVDFSQLHDAPVFALPQPASFGMKFPISGIAAMSLAFLVTIVETTGTFMALGSATRTPMPGKTLARGILCDGVGSAFAALLSSPPVSTFAQNVGVVSLTGVASRHVVALTGGMLVLAGLFPVLGALVVTIPQPVLGGAGLMMFAMIVSAGIRMLGHSAPTKRNSLIIAVSIGCGLAVTIRPDLLAKLPAFVKEVFGSGITVGALVAVVLNLCLPGREVDAIDEEVEGETLVQELA

SEQ ID NO: 22132 - protein, 526 aa, Ralstonia metallidurans
MPGQRPRPPPADASGSAPGSTIAGWYALCLRHEVPFARPGVRSIMRNATADSGRRAVQSDKTIEQDQPTGVPGVNRAAAEKGENNMANGQGNAGGEGFFPKWRLKTEGVIGPDERLPAGQTLLAGIQHVVAMFGSTAIAPILMGFHPNIAILFSGIGTLLFFLFVRGRVPSYLGSSFAFIAVVIAATGYAGSGPNPNIPLALGGIIAAGALYTVIGLIVQAVGYGWVEKLMPPVVTGAIVAAIGLNLAPVAVKAVSAAPLDTWVGLLTVLAVGLIAVRAPGMLGRLPVLLGGLAGYLAYYIATNLMGLGKAIDFSGVAAANWFGMPEFTAPVFQANAMLLIAPVAIVLVAENLGHIKAIGVMTGRNLDPYIGRAFIGDGVATMLSAAGGGTGVTTYAENMGVMAVTKIYSTLIFVVAAAVAILLGFSPKFGALILTIPGPVIGGLTIVVFGLISATAGRIWVQNHVDFSSSRNLITVGATLTVAAGDLTLKLGGLTLGGIGTATFGAILLYHLLGKGRTQEQGLTH

SEQ ID NO: 22133 - protein, 403 aa, Neisseria meningitidis MC58
MNQLKLAVSGAQILFVAFGAMVLVPLLTGLNPALALLGAGLGTLLFQITTKRKVPIFLGSSFAFIAPIIYSVGEWGLPSTMFGLFAAGFMYFVFAALIRWRGLAAVHKLLPPVVIGPVIMVIGLSVAVAASSMAMGQADGKQVIDYTDSLILSGFTFAVTAIVSVFGSRMMKLIPILIGVASGYVLALLMGLVDTASIAHAPWFAVPHFETPQINWQAALFMLPVAVAPAIEHIGGIMAIGNVTGKDYTKDPGLDKTLAGDGLGVCVAGLIGGPPVTTYGEVTGAVMITKNSNPVIMTWAAVFAVCMAFFGKFNAFLASIPMPVMGGIMLLLFGTIASLGVKTLIDAKVDLMLPKNLVIVSSVLTTGIGGMTLKLGSFSFAGVGLCAVLAIMLNSLLPDPKES

SEQ ID NO: 22134 - protein, 403 aa, Neisseria meningitidis Z2491
MNQLKLAVSGAQILFVAFGAMVLVPLLTGLNPALALLGAGLGTLLFQITTKRKVPIFLGSSFAFIAPIIYSVGEWGLPSTMFGLFAAGFMYFVFAALIRWRGLAAVHKLLPPVVIGPVIMVIGLSVAVAASSMAMGQADGKQVIDYTDSLILSGFTFAVTAIVSVFGSRMMKLIPILIGVASGYVLALLMGLVDTASIAHAPWFAVPHFETPQINWQAALFMLPVAVAPAIEHIGGIMAIGNVTEKDYTKDPGLDKTLAGDGLGVCVAGLIGGPPVTTYGEVTGAVMITKNSNPVIMTWAAVFAVCMAFFGKFNAFLASIPMPVMGGIMLLLFGTIASLGIKTLIDAKVDLMLPKNLVIVSSVLTTGIGGMTLKLGSFSFAGVGLCAVLAIMLNSLLPDPKES

SEQ ID NO: 22135 - protein, 480 aa, Deinococcus radiodurans
MRFPAQALSSAHSKLSHPRRERVTATPSPTVHPVDEVPAAQNLLVFGLQHVMSMYAGIVAVPLILAGALGLDATTAARIVSASFFMCGLATLVQTLGVGPFGAKLPIVQGTTFAAVGTMILVGKEFGLPGIYGAVIAGGLFTILLAPYFSRLLRFFPPVVSGTVITMIGISLLPVAFNWAGGGVGNPNFGSPGNLGLAAITLLIVLLISRFGRGYLGRIAVLLGLVIGSVIAALFGQVNGAPISSAAWVGFTPPLAFGAPTWHLVPILSMLLVMLVVMVETTADLLAIGEITGKKVGPREVAAGLRADGLSTAVGGLFNSFPFTAFAQNVGLVRFTGIKSRFVVAAAGVILLLMGFFPKLSALVASIPLPVLGGAGLVLFASVAVSGIQTLAKVDLSDTRNLTVVSVSLALGLIPSTVPGLYAHLPAQAQLFLGSGITAASLCAILLNILFNIVGSDRPRPSATATVAEHAPEPGDLAEH

SEQ ID NO: 22136 - protein, 496 aa, Deinococcus radiodurans
MHLAVMARAGQCSSSAWGGLDARDFYRREARALRARRPWRSAFLRWTWSSEKKATAEACFCLSSPPPAHYTFPMTQTAAPPPLPDLPPQRRVVLGLQHSIAMFGSTVLVPILVGLSPSVALFGAGVATLIFHLLTRGQVPIFLGSSFAFIAPTALVIKEMGPAAAAGGLIAAGLMYVLFSGLVKLFGTERLLRVFPPVVTGPVIIVIGLGLSSVAVDQAKTNWGLALVTLLAAIIASIYGRGLFRMIPILIGVVTGYLVALATGQVGAKALADIAAAPLLGLPPFHGPALDWRAVAIIAPVAIVTFIEHVGDVVVNGRVVGKNFLANPGLSRTLLADGIANMSSAVMGGPAATTYAENTGVLALTRVYDPRVIQIGAVFAILFGCSPKLAAVLQGLPQGVLGGVSILLFGMIASVGIRTLAEAQVDFAHSRNLIIVSLILVLGLGGASFPLNVAGTKLELHGMALAALVGIVANLLLPRQRPEISGKADGMGPGVG

SEQ ID NO: 22137 - protein, 368 aa, Streptococcus thermophilus
MQNKEKHSQVAILGLQHLLAMYSGSNLVPIMIAGALGYSAHQLTYLISTDIFMCGVATFLQLQLNKHFGIGLPVMLGVAFQSVAPLNMIGKSHGSGAMFGALIISGIYVIFVSGVFSKFANLFPSIVTGSVITTIGLTSLSLSLSEIWGTTLTNQLVKAFFLAAITVLIILLVNIFTKGFIKSISILIDLVIGTVIAASMGLIDFSPVAAEPVVHVPTPFYFGMPKFELSSIIMMCIIATVSMVESTGVYLALSDITKDPIDSTRLRNGYRAEGMAVLLGGLFNTFPYTGFSQNVGLVKLSGIKKRLPIYYTAGFLVLLGLLPKFGAWLKSSQAPSTWWCYASHVQFCFYFKGCKFLTRVDFANNEHN

SEQ ID NO: 22138 - protein, 475 aa, Burkholderia fungorum
MVETDDMQSNAVHPCDQRLPAGQLLTLGIQHVLVMYAGAVAVPLIIGAALKLPKDQIAFLISADLFSCGIATLIQTLGLWIFGIRLPVIMGCTFAAVGPMVAIGTNPSLGILDIFGSTIAAGVVGILLAPAVGKLLRFFPPVVIGVVISVIGLSLMEVGINWAAGGVGNPDYGNPVYLGLSLIVLMLILLINKFARGFLANISVLLGIVAGFVIALALGRVNMEGVTHAPWVGFIMPFHFGLPHFDPLSIATMVTVMFVTFIESTGMFLAVGDMVDRPVDQKTLVRGLRVDGLGTLIGGIFNSFPHTSFSQNVGLIGVTGVKSRFVCAMGGVILVLLGLFPKMAQVVASVPAFVLGGAGIVMFGMVAANGIKVLSKVDFVKNHHNLFIVAVSIGLGLVPVVSPHFFSKLPPALSPLLHSGILLASVSAVVLNLIFNGVKSEKKARCEIRSAGHDFDGRGGNEPRRDEMLRAADLH

SEQ ID NO: 22139 - protein, 435 aa, Burkholderia fungorum
MADSYFPRWRAQPAAAEGRIVGTDERLAWPQMFAMGVQHVVAMFGSTVLAPLLMGFDPNLCIFMSGIGTLLFFVLVGGRVPSYLGSSFAFIGLVIAVTGYGGHGPNLNIPVALGGIIACGVVYAVIGLIVSAVGTRWIETLMPPVVTGAIVCVIGLNLAPIAVHGVSGSNFDSWMALVTVLCVGAVAVFARGMLQRLLILVGLLMAYVIYAIVTNGLGMGKPIDFTIVANAAWFGMPHFTAPVFNMQAMTLLAPIAVILVAENLGHIKAVSAMTGQNLDRYVGRAFLGDGLATIVSGFAGGTGVTTYAENIGVMAVTKIYSTLVFVIAAVIALVLGFSPKFGAVIQTIPGPVLGGVSIVVFGLIAVTGARIWVVNKVDFSDNRNLIVAAVTLVLGAGDFSLKLGGFGLGGIGTATFGAIILYALLRRKPVQGPVA

SEQ ID NO: 22140 - protein, 392 aa, Enterococcus faecium
MFGATVLVPILVGIDPGIALVSSGLGTLVYLFTTKGKIPAYLGSSFAFIAAMQLLMKTDGYPAIAQGAVTTGLVYLIVALIIKKIGSAWLDKILPPIVVGPVIMVIGLGLAANAATNAMYNQGTYDFKYIAVALITLGLTIFFNMWLRGFLGLIPILLGIISGYIVALLFGIVDTKPIVDAAWFAVPNFEIPFVQYEPKLYLGAITTMAPIAFVTMTEHIGHLMVLNKLTKRNFFEEPGLHKTLTGDGLAQIVAAFVGGPPVTSYGENIGVLAITRVHSVFVIGGAAVFAVILGFVGKLSALILSIPGPVISGISFILFGVIAASGMKILIENKIDFDKKKNLLIASVILVVGIGGLVFEVGTFTLSAMALATVLGIILNLILPETSRSEEN

SEQ ID NO: 22141 - protein, 430 aa, Lactococcus lactis
MHDNDIILKVDEKPAASQWFGLSFQHLFAMFGSTVLVPILVGINPAIALLSSGLGTLAHMSVTKFKVPAYMGSSFAYIGAMTLLMKNGGMPAIAQGAMTGGLVYLIVALIVKFAGKGWIDKVLPPIVVGPIVMVIGLSLAPTAINDAMYTDVANLKGYSLAYIIIALITVLSIVVYSIYGKGFLSVVPILLGIITGYVAAMIIGKITGMNIVSFTGISQAKWLTLPPMEIPFASYKWAFYPSAILTMAPIAFVTMTEHFGHIMVLNSLTKKDYFKEPGLEKTLTGDGLAQIIAGFIGAPPVTSYGENIGVMAITKIHSIYVIAGAAVLAIVVSFVGKITALLQSIPAPVIGGASIALFGVIAASGLKILVENKVDFDIKRNLLISSVVLVIGIGGMIINITQNLQISSVAIATILGIVLNLVLPKDASEI

SEQ ID NO: 22142 - protein, 434 aa, Lactococcus lactis subsp. lactis
MSQKNEQSQEQSNSKSAVLGLQHLLAMYSGSILVPIMIAGALNYSATQLTYLISADIFMCGLATFLQLQLRKHFGIGLPVVLGVAFQSVAPLIIIGQRHGSGAMFGSLMVAGVFVILVSGIFSKIRKLFPPIVTGSVITTIGLSLIPVAIGNMGNNVDKPTIQSLILAVSTIVIILLINIFTTGFIRSIAILIGLIAGTILAASMGLVDFSVVSQAPWAHLPQPFYFSAPKFYLADSLMMIIIAIVSLVESTGVYLALADITGENLDEKRLRNGYRAEGFAVFLGGVFNTFPYTGFSQNVGLVQLSGIKTRKPIYFTAGFLIVLGLIPKFAAVAQLIPTPVLGGAMLIMFGMVATQGIRMLAKVEFEGNQNLLIAAVAIAMGVGFNSTNLFTALPSFIQPFVSNGIVMSTVSAIILNLVFNHGKKDELVTDETK

SEQ ID NO: 22143 - protein, 430 aa, Lactococcus lactis subsp. lactis
MHDNDIILKVDEKPAASQWFGLSFQHLFAMFGSTVLVPILVGINPAIALLSSGLGTLAHMSVTKFKVPAYMGSSFAYIGAMTLLMKNGGMPAIAQGAMTGGLVYLIVALIVKFAGKGWIDKVLPPIVVGPIVMVIGLSLAPTAINDAMYTDVANLKGYSLAYIIIALITVLSIVIYSIYGKGFLSVVPILLGIITGYVAAMIIGKITGMNIVSFTGISHAKWLTIPPMEIPFANYKWAFYPSAILTMAPIAFVTMTEHFGHIMVLNSLTKKDYFKEPGLEKTLTGDGLAQIIAGFIGAPPVTSYGENIGVMAITKIHSIYVIAGAAVLAIVVSFIGKITALLQSIPAPVIGGASIALFGVIAASGLKILVENKVNFDIKRNLLISSVVLVIGIGGMIINITQNLQISSVAIATILGIVLNLVLPKDPSEI

SEQ ID NO: 22144 - protein, 432 aa, Bacillus caldolyticus
MNKPVLDIQDRPTVGQWITLSLQHLFAMFGATILVPYLVGLDPSIALLTSGLGTLAFLLITKWQVPAYLGSSFAYIAPIIAAKTAGGPGAAMIGSFLAGLVYGVVALIIKKAGYRWVMKLLPPVVVGPVIIVIGLGLAGTAVGMAMNGPDGKYSLLHFSVALVTLAATIVCSVLARGMLSLIPVLVGIVVGYLYALAVGLVDLSKVAAAKWFEWPDFLIPFADYPVRVTWEIVMLMVPVAIVTLSEHIGHQLVLSKVVGRDLIQKPGLHRSILGDGTATMISALLGGPPKTTYGENIGVLAITRVYSVYVLAGAAVIAIAFGFVGKITALISSIPTPVMGGVSILLFGIIASSGLRMLIDSRVDFGQTRNLVIASVILVIGIGGAVLKISDSFQITGMALSAIVGVLLNLILPGRPQAAENLFEENQSDHVA

SEQ ID NO: 22145 - protein, 435 aa, Clostridium acetobutylicum
MEEKIKKETQIELSYGVEDKPELLSRILLAFQHIFAAFGGIIVVPIIVASSLKLDAKTSTALLSAAILMAGVATLIQSKGVYSVGARVACIMGTDITFVAPAAVVGKKFGLAGIFGATILGAVIVVILSFFIKYIMKFFPPIVTGIVVCLIGLTLLPVSIDWAAGGSGTKNYGSLQNISIALIVMVITLLINHYGRGLVSSASILIGMVVGYIICIPLGMVNFSTISNLKIISIPSIFQYGVKFNISALLPFIPAYFVSVISTVGNLRAINEISGIKDDSKISKGVLSDGIGSILAGMFGAMPNTSFSQNVGLIPLTKVASRYVTLVAGIILMVLGLVPKFSGIINIMPQPVLGGVGIVMFGTVAAAGIQTLSHVNLNNRNILIIATSIGLGLGVTFRPEILSSLPESLKMIFSSGISTGTIAALVLNLILKEKK

SEQ ID NO: 22146 - protein, 430 aa, Clostridium acetobutylicum
MKNFIDVEEKLPIGKTIPLSFQHLFAMVGATILVPILTHMNPSIGLFCSGVGTILYILCTKAKLPAYIGSSFAFITPMVTASQNYGPNAMLSGVISAGIVYIIVSTIIRYTGVNWLNKILSPVVVGSVVIVIGLSLASSAIGWAGLDPHQAITSGASRTSWIVVSMVTLAVGVIGSMYFKGFLGVIPILIAIICGYVLALLLGVVPDKTIHTILSAKLFEIPPFMTPKFNINAMIIMAPVSFVTIAEHIGHVYVTNNVVGRDFTKEPGIHRSMLGDGVATIFAGLVGGPPNTTYGENIGVMAITKVYSVWVIGIAAVIAIILSFIGPVASVIANMPRPVMGGVSILLFGIIASSGYRMFVDGKIDFSLKKNLIVTSVIIVLGIGGASINFKFNGSPVVISGVALATIVGIVLNLILPEKSLSERQEEKTA

SEQ ID NO: 22147 - protein, 505 aa, Escherichia coli O157:H7 EDL933
  unsure (1)..(505): unsure at all Xaa locations
MCLDSFINVNGCFLLWRAKGETLMSAIDSQLPSSSGQDRPTDEVDRILSPGKLIILGLQHVLVMYAGAVAVPLMIGDRLGLSKEAIAMLISSDLFCCGIVTLLQCIGIGRFMGIRLPVIMSVTFAAVTPMIAIGMNPDIGLLGIFGATIAAGFITTLLAQLIGRLMPLFPPLVTGVVITSIGLSIIQVGIDWAAGGKGNPQYGNPVYLGISFAVLIFILLITRYAKGFMSNVAVLLGIVFGFLLSWMMNEVNLSGLHDASWFAIVTPMSFGMPIFDPVSILTMTAVLIIVFIESMGMFLALGEIVGRKLSSHDIIRGLRVDGVXTMIGGTFNSFPHTSFSQNVGLVSVTRVHSRWVCISSGIILILFGMVPKMAVLVASIPQFVLGGAGLVMFGMVLATGIRILSRCNYTTNRYNLYIVAISLGVGMTPTLSHDFFSKLPAVLQPLLHSGIMLATLSAVVLNVFFNGYQHHADLVKESVSDKDLKVRTVRMWLLMRKLKKNEHGE

SEQ ID NO: 22148 - protein, 429 aa, Escherichia coli O157:H7 EDL933
MTRRAIGVSERPPLLQTIPLSLQHLFAMFGATVLVPVLFHINPATVLLFNGIGTLLYLFICKGKIPAYLGSSFAFISPVLLLLPLGYEVALGGFIMCGVLFCLVSFIVKKAGTGWLDVLFPPAAMGAIVAVIGLELAGVAAGMAGLLPAEGQTPDSKTIIISITTLAVTVLGSVLFRGFLAIIPILIGVLVGYALSFAMGIVDTTPIINAHWFALPTLYTPRFEWFAILTILPAALVVIAEHVGHLVVTANIVKKDLLRDPGLHRSMFANGLSTVISGFFGSTPNTTYGENIGVMAITRVYSTWVIGGAAIFAILLSCVGKLAAAIQMIPLPVMGGVSLLLYGVIGASGIRVLIESKVDYNKAQNLILTSVILIIGVSGAKVNIGAAELKGMALATIVGIGLSLIFKLISVLRPEEVVLDAEDADITDK

SEQ ID NO: 22149 - protein, 464 aa, Escherichia coli O157:H7 EDL933
MVRSQLSRADAPCLLTSLRRQLMAMFGLPHWQLKSTSTESGVVAPDERLPFAQTAVMGVQHAVAMFGATVLMPILMGLDPNLSILMSGIGTLLFFFITGGRVPSYLGSSAAFVGVVIAATGFNGQGINPNISIALGGIIACGLVYTVIGLVVMKIGTRWIERLMPPVVTGAVVMAIGLNLAPIAVKSVSASGFDSWMAVMTVLCIGLVAVFTRGMIQRLLILVGLIVACLLYGVMTNVLGLGKAVDFTLVSHAAWFGLPHFSTPAFNGQAMMLIAPVAVILVAENLGHLKAVAGMTGRNMDPYMGRAFVGDGLATMLSGSVGSSGVTTYAENIGVMAVTKVYSTLVFVAAAVIAMLLGFSPKFGALIHTIPAAVIGGASIVVFGLIAVAGARIWVQNRVDLSQNGNLIMVAVTLVLGAGDFALTLGGFTLGGIGTATFGAILLNALLSRRLVDVPPPEVVHQEP

SEQ ID NO: 22150 - protein, 422 aa, Staphylococcus aureus subsp. aureus Mu50
MKNLILSVQHLLAMYAGAILVPIIVGTSLKFTPEQIAYLVTVDIFMCGVATFLQANKVTGTGLPIVLGCTFTAVAPMILIGQTKGIDVLYGSLFLSGILVIIIAPFFSHLVKFFPPVVTGSVVTIIGINLMPVAMNYLAGGQGAKDYGDVKNILLGLMTLIIILVLQRFTTGFIKSIAILIGLVLGTIGAGLLGMVDINQVNHAGWLGIPVPFRFSGFSFDVTSTLVFFILAIVSLIESTGVYHALSEITGKKLERKDFRKGYTAEGLAIVLGSIFNSFPYTAYSQNVGLVSLSGAKKNNVIYGMVVLLLICGCIPKLGALANIIPLPVLGGAMIAMFGMVMAYGVSILGHIDFKNQNNLLIIAVSVGLGTGISAVPQAFKGLGEQFAWLTQNGIVLGAISAIILNFFFNGIKYKQTEENVK

SEQ ID NO: 22151 - protein, 435 aa, Staphylococcus aureus subsp. aureus Mu50
MQNDEMFERTVKPVLDVNEKPQPAQWAFLSLQHLFAMFGATVLVPFLTGLPISAALLASGIGTLLYILITKAQIPAYLGSSFAFITPIITGLSTHSLGDMLVALFMSGVMYVIIGILIKLSGTAWLMKLLPPVVVGPVIMVIGLSLAPTAVNMAMYENPGDMKGYNISFLIVAMITLLVTIVVQGFFKGFLSLIPVLVGIIVGYVVAIFMGIVKFDAIMSAKWIDFPHIYLPFKDYVPSFHLGLVLVMIPIVFVTVSEHIGHQMVLNKIVGRNFFEKPGLDKSIIGDGVSTMFASIIGGPPSTTYGENIGVLAITRIYSIYVIGGAAVIAIVLAFIGKFTALISSIPTPVMGGVSILLFGIIAASGLRMLVESKVDFANNRNLVIASVILVVGIGNLVFNLKEIGINLQIEGMALAALSGIILNLILPKEKKQNN

SEQ ID NO: 22152 - protein, 426 aa, Lactobacillus plantarum
MTKKAAFHNDEVVLDIHDRPKLGSWLGLSVQHLFSMFGSTVLVPILVGLNPGIALFSSGVGTLMYILITRGKIPAYMGSSFSFIVVMQSLMKTAGYPAIAQGTVAVGCVYLLVSLLVTLIGSDWIDKALPPIVVGPIVMVIGLSLAGTAAKDATMNGSSYDIKYFGVAMATMLLTVIFNMYLRGFMSLVPILLGIVCGYIIAVLVGIVDFSGVEKAQWFAMPAFQLPFISYHPGIYWGAILSMAPIAFVTMSEHMGHIMVLNKLTKRNFFKNPGLNHTLAGDGTASIIAGFVGGPPVTSYGENIGVLAITRVHSIYVLGGAAFFAIVFSFVGKLSALIESIPSPVIGGVSFLLFGVIASSGMRILIDNKVDFNQKRNLMIASAILVIGIGNAYLQLGSFQFSGLAVATVLGIVMNLVLPKTAVNEK

SEQ ID NO: 22153 - protein, 443 aa, Lactobacillus gasseri
MKKMPKDTFHNNDAILDVYEKPELGQGILLSMQHLFAMFGSTVLVPILVGINPSIALLSSGVGTLVHMLLTHFKIPAYLGSSFAFVATMQALMRQDGYPAIAQGAIAAGLVYVVVALVIAKVGSDWVNKVLPPIVVGPIIIVIGLSLATTAANDAMMKGTKYNLTYFGVAIFTLIMTLIFQMCFKGFTSLVSIMLGIICGYALSCVLGIVDFSGVAKAAWFSMPALDVPGISYHFKWYPAAILTMAPIAFVTMTEHMGHIMVLNSLTKRNFFKNPGLHRTMMGDGLSTIIAGFIGGPPTTSYGENIGVLAMTKVHSVWVLAGAAVFAIIFSFVGKVAAVIESIPMPVIGGISFLLFGTIASNGLKILVDDKIDFGEKRNMLIASVILVIGIGGAYLQLGSFQLTSVALCTIFGMLMNWILPKKAASEKALEAEKKEKEQKYFN

SEQ ID NO: 22154 - protein, 276 aa, Lactobacillus gasseri
MKHMQVNHKKAALLGLQHLLAMYSGAIAVPLLIGTALKFNSTQMTYLVSIDIFMCGLATALQLLRNRYFGIGLPVVLGCAIQAVAPLQMIGKKFTIGTMYGAIIVAGIFVFLVAGYFSKIKKLFPPVVTGSLITVIGLSLIPVSIQNLGGGNSAAKNFGDPKNLLTGFITVAIILALQVWGRGFIKSIAVLVGLIAGTLIASTLGMVSLTPVAQASWFHLPQPFYFGMPQFEWSSSLTMIIIALVSMVESTGVFFAIGDLLHKDISSDDLKKGYRA

SEQ ID NO: 22155 - protein, 451 aa, Pseudomonas putida KT2440
MSESRKAYIPIAPPREPLPLFQLILVGLQHVLLMYGGAIAVPLIIGQAAGLSREEVAFLINADLLVAGVATIIQSFGIGPVGIRMPVMMGASFAAVGSMVAMAGMPGVGLQGIFGATIAAGFFGMLIAPFMSKVVRFFPPLVTGTVITSIGLSLFPVAVNWAGGGHEAETFGSPIYLLVAGLVLAVILLINRFMRGFWVNVSVLVGMGLGYILAGSIGMVDLSGLNEAPWLQVVTPLHFGMPTFSLAPILSMCLVVVIIFVESTGMFLALGKVTDREVTPGMLRRGLLCDAGASFIAGFFNTFTHSSFAQNIGLVQMTGVRCRYVTIVAGALLILLSLLPKAAFLIASIPPAVLGGASIAMFGMVTATGIKILQEADIGDRRNQLLVAVSVGFGLIPVVRPEFFAQMPQWMEPITHSGIAMATVCALVLNVLFNILGGADRAMHNDVCHQH

SEQ ID NO: 22156 - protein, 505 aa, Pseudomonas putida KT2440
MTTSPSTSPAKRPEDENLGLGANLAYGLQHVLTMYGGIVAVPLILGQAAGLNGAEIGMLIAASLFAGGLATLLQTLGLPFFGCQLPLVQGVSFAGVATMGAILSSEGGGGLPGVLGAVMAASLIGFLITPVFSRITKFFPPLVTGIVITTIGLTLMPVAARWVMGGNSASPEFGSMANIGLAALTFAIVLLLSKLGSATISRLSILLAMVVGTLIAWALGMTDFSKVGEGPMFAFPTPFHFGMPEFHIAAILSMCIVIMVTLVETSADILAVGEIIDTKVDSKRLGNGLRADMASSILAPIFGSFTQSAFAQNVGLVAVTGVKSRYVVATGGVILVVLGLLPVMGRVIAAVPTPVLGGAGIVLFGTVAASGIRTLSKVSYKNNVNLIIVAASLGFGMIPIAAPTFYHHFPNWFETIFHSGISSAAIMAILLNLIFNHFTTGNSENQSVFAAAYERTIQYSDISALRDGDYFKDGKLFDAEGNEVPMLELDEHGNETVRRTAVAEH

SEQ ID NO: 22157 - protein, 421 aa, Pseudomonas putida KT2440
MQDGFNDPLWRQVVSGAQMLFVAFGALVLMPLITGLDPNVALFTAGIGTLLFQLVTGRQVPVFLASSFAFITPIILAKGQFGLAETMGGVMAAGFVYTFMGLMVKIKGTGFIDRMLPPVVIGPVIISIGLAMAPIAANMAMGKGGDGTALMPYKTAMLISMPALLTTLIVAVFGKGIFRLVPIISGVLVGFALSFAFGVVDTARIAAAPWLEIPNFTAPAFNWQAILFIVPVALAPAIEHIGGVIAVGSVTGRDYLKKPGLHRTLLGDGLATTAAGLFGGPPNTTYAEVTGAVMLTKNYNPKIMTWAAVFAITLAFIGKFGALLQSIPVPVMGGILCLLFGSIAAVGMNTMIRHKIDLGEARNLVIVSVTLVFGIGGVLIGSGDGPDDWGLKGIALCAIVAIALNLILPGNDSWKHKKLDV

SEQ ID NO: 22158 - protein, 427 aa, Streptococcus pyogenes M1 GAS
MTHSTKQEHSHSQSAVLGLQHVLSMYAGSILVPIMIAGALGYSARELTYLISTDIFMCGVATFLQLKLTKHTGVGLPVVLGCAFQSVAPLSIIGAQQGSGAMFGALIASGIYVILVAGIFSKIARFFPPIVTGSVITVIGLSLVGVAMGNMGDNVKEPTAQSMMLSLLTIVIILLVQKFTKGFVKSISILIGLVAGTLVSAMMGLVDTTPVVEASWIHVPTPFYFGMPTFEITSIVMMCIIATVSMVESTGVYLALSDLTNDQLDEKRLRNGYRSEGIAVFLGGLFNTFPYTGFSQNVGLVQISGIKTRRPIYYAAGILVVIGLLPKFRAMAQMIPSPVLGGAMLVLFGMVALQGMQMLNRVDFQKNEYNFIIAAVSISAGLGFNGTNLFASLPETAQMFLTNGIVIATLTSVVLNLVLNGKDKQDE

SEQ ID NO: 22159 - protein, 419 aa, Streptococcus pyogenes M1 GAS
MKDVIYDVEEVPKAGMLVGLSFQHLFAMFGATVLVPILVGIDPSVALLSSGLGTLAHLSVTKFKIPAYMGSSFAYIAAMQLLMKTNGIGAVAQGAMTGGLVYLIVALIVKAIGNDWIDNILPPIVVGPIVMVIGLSLASTAVNDVMLKNGNYNLTYLVIGLVTLLSVIFFNIYGKGIVAIVPLLLGLLVGYVVALLVGVLTGQEIVDFTNVAQAKWFSIPSVEIPFLTYGVKFYPSAILTMAPIAFVTMTEHFGHIMVLNSLTKRDYFKDPGLEKTLTGDGFAQIIAGFLGAPPVTSYGENIGVMALNKIFSVYVIAGAAVIAALLSFIGKVSALIQSIPTPVIGGISVALFGVIASSGLKILIESKVDMDNKKNLLIASVILVSGIGGLMLQVNGLQISGVAFSTLLGIILYQVLPEK

SEQ ID NO: 22160 - protein, 435 aa, Listeria innocua
MLGKGKIAALGFQHVLAMYAGAVIVPLLIGGALGFNGEEMTYLVSIDIFMCGIATLLQLTVNRFFGIGLPVVLGCAVQAIAPIILIGQDMGIGAIYGSIIVSGLFVLLIAPFFSKVVRFFPPVVTGSVVTVIGLTLIPVAINNLAGGAGAKDFGSMYNLGLGFGTLLLIILVYRFGQGFSKAIAVLIGLVGGSLFAALYKGISLGPVSEASWFHMPKPFYFGTPTFEWPAIITMILIALVSMVESTGVYFALSDITERKLTQKDLTRGYRAEGLAIMLGGVFNTFPYTAYSQNVGLVQLSGIKTRKVIYAAAGFLIVLGLIPKIGAVTTIIPTPVLGGAMVAMFGMVVAQGIKMLGKVNFTSQENLLIIACAVGVGLGVTVVPDLFNAFPSFVRLFTSNGIVAGSVTAITLNIIFNMIPHRKDKKLADPEPQHAE

SEQ ID NO: 22161 - protein, 435 aa, Listeria monocytogenes EGD-e
MLGKGKIAALGFQHVLAMYAGAVIVPLLIGGALGFNGEEMTYLVSIDIFMCGIATLLQLTVNRFFGIGLPVVLGCAVQAIAPIILIGQDMGIGAIYGSIIVSGLFVLLIAPFFSKVVRFFPPVVTGSVVTVIGLTLIPVAINNLAGGEGAKDFGSMYNLGLGFGTLLLIILVYRFGQGFSKAIAVLIGLVGGSLFAALYKGISLGPVSEASWFHMPKPFYFGTPTFEWPAIITMILIALVSMVESTGVYFALSDITERKLTQKDLTRGYRAEGLAIMLGGVFNTFPYTAYSQNVGLVQLSGIKTRKVIYAAAGFLIVLGLIPKIGAVTTIIPTPVLGGAMVAMFGMVVAQGIKMLGKVNFTSQENLLIIACAVGVGLGVTVVPDLFNAFPSFVRLFTSNGIVAGSVTAITLNIIFNMIPHRKDKKVADPEPQHAK

SEQ ID NO: 22162 - protein, 420 aa, Streptococcus pneumoniae TIGR4
MQTQEKHSQAAVLGLQHLLAMYSGSILVPIMIATALGYSAEQLTYLISTDIFMCGVATFLQLQLNKYFGIGLPVVLGVAFQSVAPLIMIGQSHGSGAMFGALIASGIYVVLVSGIFSKVANLFPSIVTGSVITTIGLTLIPVAIGNMGNNVPEPTGQSLLLAAITVLIILLINIFTKGFIKSISILIGLVVGTAIAATMGLVDFSPVAVAPLVHVPTPLYFGMPTFEISSIVMMCIIATVSMVESTGVYLALSDITKDPIDSTRLRNGYRAEGLAVLLGGIFNTFPYTGFSQNVGLVKLSGIKKRLPIYYAAGFLVLLGLLPKFGALAQIIPSSVLGGAMLVMFGFVSIQGMQILARVDFANNEHNFLIAAVSIAAGVGLNNSNLFVSMPTAFQMFFSNGIVVASLLAIVLNAVLNHKKK

SEQ ID NO: 22163 - protein, 439 aa, Streptococcus pneumoniae TIGR4
MGSFLMPKSEVYMKQESTVDLLLDVDQRPSAGKGILLSFQHVFAMFGATILVPLILGMPVSVALFASGVGTLIYMIATGFKVPVYLGSSFAFITAMSLAMKEMGGDVSAAQTGVILTGLVYVLVATSIRFVGTKWIDKLLPPIIIGPMIIVIGLGLAGSAVTNAGLVADGNWKNALVAVVTFLIAAFINTKGKGFLRIIPFLFAIIGGYLFALTLGLVDFTPVLKANWFEIPGFYLPFSTGGAFKEYNLYFGPEAIAILPIAIVTISEHIGDHTVLGQICGRQFLKEPGLHRTLLGDGIATSVSAFLGGPANTTYGENTGVIGMTRIASVSVIRNAAFIAIALSFLGKFTALISTIPNAVLGGMSILLYGVIASNGLKVLIKERVDFAQMRNLIIASAMLVLGLGGAILKLGPVTLSGTALSAMTGIILNLILPYENKD

SEQ ID NO: 22164 - protein, 420 aa, Streptococcus pneumoniae R6
MQTQEKHSQAAVLGLQHLLAMYSGSILVPIMIATALGYSAEQLTYLISTDIFMCGVATFLQLQLNKYFGIGLPVVLGVAFQSVAPLIMIGQSHGSGAMFGALIASGIYVVLVSGIFSKVANLFPSIVTGSVITTIGLTLIPVAIGNMGNNVPEPTGQSLLLAAITVLIILLINIFTKGFIKSISILIGLVVGTAIAATMGLVDFSPVAVAPLVHVPTPLYFGMPTFEISSIVMMCIIATVSMVESTGVYLALSDITKDPIDSTRLRNGYRAEGLAVLLGGIFNTFPYTGFSQNVGLVKLSGIKKRLPIYYAAGFLVLLGLLPKFGALAQIIPSSVLGGAMLVMFGFVSIQGMQILARVDFANNEHNFLIAAVSIAAGVGLNNSNLFVSMPTAFQMFFSNGIVVSSLLAIVLNAVLNHKKK

SEQ ID NO: 22165 - protein, 439 aa, Streptococcus pneumoniae R6
MGSFLMPKSEVYMKQESTVDLLLDVDQRPSDGKGILLSFQHVFAMFGATILVPLILGMPVSVALFASGVGTLIYMIATGFKVPVYLGSSFAFITAMSLAMKEMGGDVSAAQTGVILTGLVYVLVATSIRFVGTKWIDKLLPPIIIGPMIIVIGLGLAGSAVTNAGLVADGNWKNALVAVVTFLIAAFINTKGKGFLRIIPFLFAIIGGYLFALTLGLVDFTPVLKANWFEIPGFYLPFSTGGAFKEYNLYFGPEAIAILPIAIVTISEHIGDHTVLGQICGRQFLKEPGLHRTLLGDGIATSVSAFLGGPANTTYGENTGVIGMTRIASVSVIRNAAFIAIALSFLGKFTALISTIPNAVLGGMSILLYGVIASNGLKVLIKERVDFAQMRNLIIASAMLVLGLGGAILKLGPVTLSGTALSAMTGIILNLILPYENKD

SEQ ID NO: 22166 - protein, 422 aa, Staphylococcus epidermidis ATCC 12228
MKNFILSVQHLLAMYAGAILVPIIVGTSLKFSAEEIAYLVTVDIFMCGVATFLQANKVTGTGLPIVLGCTFTAVAPMILIGQTKGLDVLYGSLLISGILVVLIAPFFSYLVKFFPPVVTGSVVTIIGINLMPVAMNYLAGGEGAKNYGDTKNLILGGVTLLIILILQRFTKGFLKSIAILIGLAIGTALAGIFGMVDIKQVGDAHWFGFPVPFRFSGFGFDVSSILVFFIVAVVSLIESTGVYHALSEITGRKLERKDFRKGYTAEGLAIILGSIFNAFPYTAYSQNVGLVSLSGAKKNNVIYGMVILLLICGCIPKLGALANIIPLPVLGGAMIAMFGMVMAYGVSILGNINFQNQNNLLIIAISVGLGAGISAVPQAFKGLGEQFAWLTQNGIVLGAISAIILNFFFNGIKYKQTEENVK

SEQ ID NO: 22167 - protein, 435 aa, Staphylococcus epidermidis ATCC 12228
MENEQMFERTVQPVLDVKDKPKPAQWAFLSLQHLFAMFGSTVLVPFLTHLPISAALLASGIGTLLYILITKAKIPAYLGSSFAFITPIITGLSTHSLGDMLVALFMSGLMYVIIGIFIKLSGTHWLMHLLPPVVVGPVIMVIGLSLAPTAVNMAMFENSAEMKGYNLSYLIVALITLAVTIIVQGFFKGFLSLIPVLIGIIVGYIVSIFMGIVKFAPIAQAKWIDFPHIYLPFKDYTPSFHLGLILVMIPVVFVTVSEHIGHQMVINKIVGRNFFENPGLDKSIIGDGVSTMFASMIGGPPSTTYGENIGVLAITKIYSIYVIGGAAVIAIILAFIGKFTALISSIPTPVMGGVSILLFGIIAASGLRMLVESQVDFASNRNLVIASVVLVVGIGNLLINLKGIGINLQIEGMALSALSGIILNLILPKDKNQIN

SEQ ID NO: 22168 - protein, 571 aa, Anopheles gambiae str. PEST
TMDTERQCAPEQSTESKPEGKARGADINYGIDDNPPWYFCIMMALQHYLTMIGAIVSIPFILTPALCMRDEDPARGTIISTMIFVTGLITYLQATWGCRLPLVQGGTISFLVPTLAILNLPQWKCPPADAIDAMTDTDRTELWQVRMRELSGAIAVAAVTQLVLGFSGLVGKLLRIITPLTIVPTVALVGITLFQHASETASKQWGIAVGTTAMLTLFSQVMGEVPFPGIAYRKGHGLRVVWFPLFKLFPVLLTIAIMWTVCGVLTATGVFPEGHPARTDVRLRVLQDAEWFRVPYPGQFGLPTVSLAGVLGMLAGVLACTVESISYYPTIAQMCAAPPPPLHAINRGIGIEGLGTMLAGLWGSGNGTNTFGENVGAIGVTKVGSRRVIQWAALIMVLQGVLNKFGAAFIMIPDPVVGGIFCVMFGMITAFGLAALQYVDLRSSRNLYILGVSFFFPLVLCLWLQEHPGAIQTGNQTVDSTLSVLLGTTILVGGVLGCVLDNLIPGTPEERGLVAWSKEMALETVQANDDLPAGGLVWEKSTFDFPYGMQLMRRWKWTRYVPFLPTYRMKL

SEQ ID NO: 22169 - protein, 440 aa, Agrobacterium tumefaciens str. C58 (U. Washington)
MSDTGGYFPRWRLKTEGRIMPDERLPAGQTAVLGLQHVVAMFGSTVLAPLIMGFDPNVSILFSGISTLIFFIAVGGRVPSYLGSSFAFIGPVLVATGAAAGAASPDIALALGGIIAAGVLYALIGVIVMIVGHNWIEKLMPPVLTGAIVAAIGLVLAPIAIASASGTGPGNPDGDQLSRWIAILTVTSVGAIAVYAPGMTRRLPILLGGAIAYLAYLVLANGFGLGKPVDFAGVAAAAWFGLPAFTTPVFSAPAIALIAPVVVILVAENLGHIKAIGAMTGRNLDPYLGRAFIGDGIATIFSGAFGGTGMTTYAENMGVMAITRIFSTLVFIVAALVAIILGFSPKFGALIQTIPGPVIGGLSVVVFGLIAATAGRIWVENKVDFSEPRNLITVGIALVLGAGNFKLNVAGFTLDGIGTATIGAIAFYHLLGLGRPAQGR

SEQ ID NO: 22170 - protein, 502 aa, Agrobacterium tumefaciens str. C58 (Cereon)
MGNNPIPMTAAGNRANREKMRRQPIRSRATGANHKEQIFLHGDEPGWESPEDACRAFPGGTTMSDTGGYFPRWRLKTEGRIMPDERLPAGQTAVLGLQHVVAMFGSTVLAPLIMGFDPNVSILFSGISTLIFFIAVGGRVPSYLGSSFAFIGPVLVATGAAAGAASPDIALALGGIIAAGVLYALIGVIVMIVGHNWIEKLMPPVLTGAIVAAIGLVLAPIAIASASGTGPGNPDGDQLSRWIAILTVTSVGAIAVYAPGMTRRLPILLGGAIAYLAYLVLANGFGLGKPVDFAGVAAAAWFGLPAFTTPVFSAPAIALIAPVVVILVAENLGHIKAIGAMTGRNLDPYLGRAFIGDGIATIFSGAFGGTGMTTYAENMGVMAITRIFSTLVFIVAALVAIILGFSPKFGALIQTIPGPVIGGLSVVVFGLIAATAGRIWVENKVDFSEPRNLITVGIALVLGAGNFKLNVAGFTLDGIGTATIGAIAFYHLLGLGRPAQGR

SEQ ID NO: 22171 - protein, 427 aa, Streptococcus pyogenes MGAS8232
MTHSTKQEHSHSQSAVLGLQHVLSMYAGSILVPIMIAGALGYSARELTYLISTDIFMCGVATFLQLKLTKHTGVGLPVVLGCAFQSVAPLSIIGAQQGSDAMFGALIASGIYVILVAGIFSKIARFFPPIVTGSVITVIGLSLVGVAMGNMGDNVKEPTAQSMMLSLLTIVIILLVQKFTKGFVKSISILIGLVAGTLVSAMMGLVDTTPVVEASWIHVPTPFYFGMPTFEITSIVMMCIIATVSMVESTGVYLALSDLTNDQLDEKRLRNGYRSEGIAVFLGGLFNTFPYTGFSQNVGLVQISGIKTRRPIYYAAGILVGIGLLPKFGAMAQMIPSPVLGGAMLVLFGMVALQGMQMLNRVDFQKNEYNFIIAAVSISAGLGFNGTNLFASLPETAQMFLTNGIVIATLTSVVLNLVLNGKDKQDE

SEQ ID NO: 22172 - protein, 419 aa, Streptococcus pyogenes MGAS8232
MKDVIYDVEEVPKAGMLVGLSFQHLFAMFGATVLVPILVGIDPSVALLSSGLGTLAHLSVTKFKIPAYMGSSFAYIAAMQLLMKTNGIGAVAQGAMTGGLVYLIAALIVKAIGNDWIDKILPPIVVGPIVMVIGLSLASTAVNDVMLKNGNYNLTYLVIGLVTLLSVIFFNIYGKGIVAIVPLLLGLLVGYVVALLVGVLTGQEIVDFTNVAQAKWFSIPSVEIPFLTYGVKFYPSAILTMAPIAFVTMTEHFGHIMVLNSLTKRDYFKDPGLEKTLTGDGFAQIIAGFLGAPPVTSYGENIGVMALNKIFSVYVIAGAAVIAALLSFIGKVSALIQSIPTPVIGGISVALFGVIASSGLKILIESKVDMDNKKNLLIASVILVSGIGGLMLQVNGLQISGVAFSTLLGIILYQVLPEK

SEQ ID NO: 22173 - protein, 427 aa, Pyrococcus furiosus DSM 3638
MGPDIKVKIDEKVEPKRAILFGLQHVLAMFGATVTVPLVVGTTVGLSTREIATMIQAVLLAMGIATILQTTIGSRYPIVQGSSFAFIPGLISIGKSLGMAATQGALIVGGIIEALVGGLGIVGKIKKLFTPVVTGVTIMLIGFSLAHVSVKYFFNYFADPSGASIPRATIVALITFGTTVYVALKSRGTLRAMPVIVGAFVGYLVSIPLGLADFQLVKELPVVSVPKIFPWGTPVFDVGAIITLLFAFMVSIIESVGDYHAISAIAEAPITNKHINRGIMSEGIACSIAGVLGACGTTSYSENIGLVALTKVASRYVVQVGGIILIVISLFPKFAGLLAAMPAPVLGGLTLALYGMISVTGLRLIKEKVELNDRNTIIIATALIAGLGAPQLPPEFLEHFPQIIASILESGMAVGAITAIVLEQVLR

SEQ ID NO: 22174 - protein, 363 aa, Magnetospirillum magnetotacticum
MDGRAASAAPAASEEPVPGTKIRPSALGLLGLQHVLVMYAGAVAVPLIVGRALKLSPEEVAILVSADLFACGIATLIQSWGLPGIGIRMPVMMGVTFASVTPMIAIGTNPALGLTTIYGSVIVAGLFGLLAAPLVGRLLPLFPPVVTGTIILVIGISLMRVGVNWAAGGVGSPHYGAPLNLGISAFVLLTILALTRFTTGFVSSASVLIGIVLGMLVAAMAGLVDPAKVVAAPWLDVVKPFHFGWPTFDPVSAATLCIVMIVVMIESTGMFLALSAITGDPVGEERLTRGLRADGLGTLLGGVFNTFPYTSFSQNVGLVGVTGVRSRLVTVVGGVIMLGLGLIPKLAALVERSRPACSAAPGS

SEQ ID NO: 22175 - protein, 407 aa, Fusobacterium nucleatum subsp. nucleatum ATCC 25586
MKILGLKTKIILGMQHVLAMFGATVLVPFLTGLNPSIALICAGVGTLMFHSVTKGIVPVFLGSSFAFIGATALVLREQGIAILKGGVISAGLVYVMMSFIVLKFGVERIKSFFPPVVVGPIIMVIGLRLSPVALSMAGYSNNTFDRDSLIIALIVVISMIFISILKKSFFRLVPILISVAIGYIVAYFMGDVDLSKIHEASWIGLPEGAWDTITTVPKFTFSGVVALAPIALVVFIEHIGDITTNGAVVGKDFFKNPGVHRTLLGDGIATMAAGLLGGPANTTYGENTGVLAVTKVYNPAILRIAACFAIVLGLIGKFGVILQTIPQPVMGGVSIILFGMIAAVGVRTIVEAQLDFTHSRNLMIAALIFVLGIAIGDITIWGTISISGLALAALVGIVLNKILPEDK

SEQ ID NO: 22176 - protein, 440 aa, Bacillus anthracis str. A2012
MKQHPFKIASLGMQHMLAMYAGAIIVPLIVGGGLGLNQKELTYLVSIDLLMCGVATILQALSNRFFGIGLPVVLGCTFTAVGPMIAIGKQYGVSSIYGAIIAAGLFVVIFAKLFGKLVKLFPPVVTGSVVTVIGVTLVPAAINDMAGGVGSKDFGSLENLALAFGVLLFIIIMYRFFDGFIRSISILLGLLFGTIVAAFMGKVSLQAVGEADWFHGIQPFYFGTPTFELTPIITMILVACVGIVEATGVYFALSDICNKKIGEKELTKGYRAEGLAMVLGGIFNAFPYTTYSQNVGLVQLTGVRNRVIIYTCGGMLIALGFIPKIAAITTIIPKSVLGGAMLAMFGMVMAYGIKMLSSVDFGRQENLLIVACSVGIGLGVTVVPTLFSQLPESIRILTDNGIVLGSASAVLLNIVFNMVPQRKVKVKDEPVPMQSAVREA

SEQ ID NO: 22177 - protein, 427 aa, Bacillus anthracis str. A2012
MEQKPVLDVNEVPKPGKWLFLSIQHLFAMFGSTVLVPFLTGLNPSVALISSGLGTLAFLLITKGQVPAYLGSSFAFIAPIITAKTAGGPGAAMLGGLLAGLVYILISLGIKKSGSKWIMKLLPPIVVGPVVMVIGLALAHTAVNMAMNGADGKYSFTHFSVALVTLAITIICSIFGRGFFSIIPVLLGIIGGYIFAYFQGLVDLKPVAEAKWFVVPDFTVPFVTYTPEFSWKIVLLMVPVALVTISEHIGHQIVLGNVIKRDLIEKPGLHRSIFGDGVATLIASLIGGPPNTTYGENIGVLAITRAYSVYLFIGSAVFAIMFGFIGKISALIHSIPTPVMGGVSILLFGVIASSGLRMMVDDKTDLSDKRNLMIASVILVIGIGGAVLHVGESFQVEGMALAAIVGVLLNLLLPETKQIKQSKQIAS

SEQ ID NO: 22178 - protein, 427 aa, Bacillus anthracis str. A2012
MKTFLSALQWALFILAGSLIVPISVATSYGLDGAEAIAFVQRTLFVLGFAGLLQAIFGHKLPIQEGPAGLWWGIFSLYASLGVVLFGSSNETLKVLQYAFLLSGIICIILSVFGLIDKLVRYFTPTVIGTYLFLLVAQLSGAFLKGMFGLDGQHTEVQADVFILSLIVILLSFFIMKLPIIGQYSVLFSIVCGWILFACFGLSNPITPVTDIIRLPSLFVFGMPRIEWNMAITVVFVTLLLLTNMLASIRVVQKVVSKYEENATPDRFKQAGIITGINQLLGGLFSAIGPVAISGSAGFIATTNIYKRLPFMLGSSFIIVVSIFPKITSFFAAIPVAVGYAAIYPVFASMIGLAFREYDTVQNKERLFKVAGLSIFTGVGVMFVPAGAFSTLPPFLASFLSNGLVLGSVMAILLEILFSRSTEKQLS

SEQ ID NO: 22179 - protein, 428 aa, Bacillus anthracis str. A2012
MDNQHNQNHIMGTLQWFIFLLANSIALPIVVGGLFHLTTEEIFYLMQRTFFVVGISSFLQGWLGHRLPIADGPAGSWVGVFTVLAYATAGQDQLHSTLQILELGMIISGVILIGLGVTGFIGRILFLFTPIVTGTFLLLLCLQLSGVFLKGMLGITATASQIDGFTAIIAFSIFLFVIILSNFGKGFVKSYAVLIGLISGWILFLIAGKVTISSQVTHFVQLPQIFAWGLPKWNTGMAVSSFVMVCILVSNTVAAIIAINQATIQKGTIEQKQLKDGTWVGGISHIISSVFSTVGVVPLPATAGFIRLTKQKYIRSFLLACMLLVVMSLFPSIIRYLASLPSAVASAVLMASFVQLIGIGLNNIKQVELNERNVTILGVAVLFGSGVMFLPSGALQSLPSVMQYIFGNGLFVGTVVSILLEQIWRIGK

SEQ ID NO: 22180 - protein, 452 aa, Clostridium perfringens str. 13
MEKQNLKNTEVNLIYGVDDDLDLPKKVLFGLQHIFAAFGGIIVVPLVIATSLGFDSKVTTALISASILGSGLATIIQAKGVGKVGARVACIMGTDFTFVSPAISVGSVLGLPGIIGATILGSLFEVILSFFIKPLMKFFPPLVTGTVVALIGLTLLPVSIDWAAGGAGSANYASLENLAVAMFVLVITLLLNNYGKGMISSASILIGIVVGYIVCIPLGLVDFTPVKEASWLSFPKILEFGVTFDAKAVMAFIPAYFVATIGTVGCLKAIGETSNIDIGDKRVAAGVLSDGVGSALGGLVGSCPNTSFSQNIGIISLTKVASRHVAVMAGILLVILGFLPKVAAIITGIPNPVLGGVGIMMFGTVAAAGIRTLSNIKLTERNLLIIAISMGLGLGVTFRPDVIHNLPEAIRMIFSSGISTGTIAALILNAVLKESPTSMEFENMYDEEKKAS

SEQ ID NO: 22181 - protein, 436 aa, Clostridium perfringens str. 13
MAQQVISKEQGSIKTLGIFSYFKNGILGLQHLVAMFGATILVPLVTGLDPSVALFTAGIGTLIFHLCTKGKVPVFLGSSFAFIPVIQVIAAKYGDLRYAQGGIFFAGLAYVLISFGIKKIGVDKIKRFLPARVVGPMIMVIGLNLIPNALEMAGVKSLIAGETGAMTSVLIACTTLGLALIISKFGKGFFSQLAIITAVCVGYTLSLILGQVDTSLIQQSTMVAVPNFTLPKFDFGAIMITLPVILAVSMEHIGDITTNGQVVGKNFIEDPGLNRTVLGDGLATLVASLLGGPANTTYGENTGVLAITKNYNPSILRLTAVFAIILSFIAKFGAVIRTIPQSVMGGISLMLFSMIALVGVKTIKNEGVKLNKTNLILMGSIIFVGLSGLFMSEPIGIEISEAVSISGLSLAALIGVILNLIITKFESAKSRKEVIA

SEQ ID NO: 22182 - protein, 644 aa, Corynebacterium efficiens YS-314
MTTQTPIRTVHPVDQVPPAPKLAALGLQHVLAFYAGAVIVPLLIAQSLNLDAATTIHLINADLLTCGIATLIQSVGIGRHIGVRLPIVQGVTTTAVAPIIAIGLGVTDGEGGVASLPAIYGAVIVAGLFTFFAAPVFTRFLRFFPPVVTGTVLLVMGTSLLSVSANDFVNYADGVPAARDLAYGFGTLLIIILAQRFLRGFLGTLAVLLGLVVGTVTALLLGDANLDEVSNADAFGITTPFYFGLPEFNLVAIFSMIIVMIITMVETTGDVFATGEIVRKRTRRYDITRALRADGLSTFIGGIMNSFPYTCFAQNVGLVRITGVKSRWVAASAAVFMIILGVLPKAGAIVASIPSPVLGGASLALFANVAWVGLQTIAKSDLRDSRNAVIVTSALGLAMLVTFRPDIAQAFPEWARIFVSSGMSVGAITAIILNLLFFHVGRQTGANVAVSGSGEKLTLDQINAMDREQFVDTLSPLFNSRTWPLEIAWESRPFANVTALREAIQISVLTAPLEAREDLIHDYPDMAQLLLADQDEAAEISRDRGSIGLEELDDVDRDKLLTVTSNYRDRFGMPYVAYYDTTDTVDDVVAEGLRRLDNSDEQEHRQALSEIIEIANDRFDIVLEDANPARTAFDRKFTDTDFMS

SEQ ID NO: 22183 - protein, 431 aa, Corynebacterium efficiens YS-314
MLVTSTWGWTVHGDGRKIEPGAVVAPRERLSWGRTIGIGMQHVVAMFGATLLVPTLTGFPVNTTLLFSGLGTIFFLLITRNRLPSYLGSSFAFIAPLTATQAQGISVQIGGVLVSGLVLMGIGFLVKAAGRRVIDAVMPPTVTGAIVALIGLNLAPTAASNYQAQPFVATVTLMVILLATVAGRGMVARLGILIGVVVGWVFAALTDNLAEGSVEAISSASWIGLPQFHTPEFQLSAILVTLPVVIVLVAENIGHVKAVSEMTGENLDDLAGNALIADGLATSVAGGFGGSGTTTYAENIGVMAATRVYSTAAYWVAAFTAIALAFIPKFGALIFTIPVGVLGGATLVLYGLIGMLGIRIWQDNRVNFNNPVNLTMAAVALVAGIGNLTLTIFGVTLEGIAWGSVGIIVLYPLMKKLYVTLGEGKGAKFYN

SEQ ID NO: 22184 - protein, 422 aa, Staphylococcus aureus subsp. aureus MW2
MKNLILSVQHLLAMYAGAILVPIIVGTSLKFTPEQIAYLVTVDIFMCGVATFLQANKVTGTGLPIVLGCTFTAVAPMILIGQTKGIDVLYGSLFLSGILVIIIAPFFSHLVKFFPPVVTGSVVTIIGINLMPVAMNYLAGGQGAKDYGDVKNILLGLMTLIIILVLQRFTTGFIKSIAILIGLVLGTIGAGLLGMVDINQVNHAGWLGIPVPFRFSGFSFDVTSTLVFFIVAIVSLIESTGVYHALSEITGKKLERKDFRKGYTAEGLAIVLGSIFNSFPYTAYSQNVGLVSLSGAKKNNVIYGMVVLLLICGCIPKLGALANIIPLPVLGGAMIAMFGMVMAYGVSILGHIDFKNQNNLLIIAVSVGLGTGISAVPQAFKGLGEQFAWLTQNGIVLGAISAIILNFFFNGIKYKQTEENVK

SEQ ID NO: 22185 - protein, 659 aa, Corynebacterium glutamicum ATCC 13032
MDKFHIEDEGTTPNAVTTSTTTRVKHPVDQVPPAPKLAALGLQHVLAFYAGAVIVPLLIAQSLNLDTATTIHLINADLLTCGIATLIQSVGIGRHIGVRLPIVQGVTTTAVAPIIAIGLGVTDGQGGVASLPAIYGAVIVSGIFTFFAAPVFARFLKFFPPVVTGTVLLVMGASLLSVSANDFVNYADGVPAARDLAYGFGTLAVIILAQRFFRGFMGTLAVLIGLVGGTAVALILGDANLDEVGNAEAFDITTPFYFGVPEFNAVAIFSMIIVMIITMVETTGDVFATGEIVGKRTRRSDVTRALRADGLSTLMGGVMNSFPYTCFAQNVGLVRITGVKSRWVAAAAAGFMIILGVLPKAGAIVASIPSPVLGGASLALFANVAWVGIQTIAKSDLADSRNSVIVTSALGLAMLVSFRPDVAQAFPEWARIFVSSGMSVGAITAILLNLLFFHVGRQSGGQVATSKSGERINLDAVNKMDRTDFVETFAPLFNSKTWPLETAWESQPFANVTELREAIQVAVLTAPLSDREELIHDYPDMAQLILATEEEAATISQDRGSIGLDDLDDVDQEKLITVTEQYRERFNMPYVAYFDTMDSVDTVVAAGLRRLDNSDEQEHRQALSEIIEIANDRFDILLADANPARSAFDRKFTETDFLG

SEQ ID NO: 22186 - protein, 629 aa, Corynebacterium glutamicum ATCC 13032
MPPAPKLAALGLQHVLAFYAGAVIVPLLIAQSLNLDTATTIHLINADLLTCGIATLIQSVGIGRHIGVRLPIVQGVTTTAVAPIIAIGLGVTDGQGGVASLPAIYGAVIVSGIFTFFAAPVFARFLKFFPPVVTGTVLLVMGASLLSVSANDFVNYADGVPAARDLAYGFGTLAVIILAQRFFRGFMGTLAVLIGLVGGTAVALILGDANLDEVGNAEAFDITTPFYFGVPEFNAVAIFSMIIVMIITMVETTGDVFATGEIVGKRTRRSDVTRALRADGLSTLMGGVMNSFPYTCFAQNVGLVRITGVKSRWVAAAAAGFMIILGVLPKAGAIVASIPSPVLGGASLALFANVAWVGIQTIAKSDLADSRNSVIVTSALGLAMLVSFRPDVAQAFPEWARIFVSSGMSVGAITAILLNLLFFHVGRQSGGQVATSKSGERINLDAVNKMDRTDFVETFAPLFNSKTWPLETAWESQPFANVTELREAIQVAVLTAPLSDREELIHDYPDMAQLILATEEEAATISQDRGSIGLDDLDDVDQEKLITVTEQYRERFNMPYVAYFDTMDSVDTVVAAGLRRLDNSDEQEHRQALSEIIEIANDRFDILLADANPARSAFDRKFTETDFLG

SEQ ID NO: 22187 - protein, 429 aa, Corynebacterium glutamicum ATCC 13032
MLVTSTWGWTVHGDGKKIEPGAVVAPKERLSWGRTIGIGMQHVIAMFGATLLVPTLTGFPVNTTLLFSGLGTILFLLITRNRLPSYLGSSFAFIAPLTATQVHGIGVQIGGILVAGLVLVAIGFVVKAAGKRVIDAVMPPAVTGAIVALIGLNLAPTAAGNFSSQPLVATATLFAILIATVAGRGMIARLGILIGVVIGWVFAAITGNLSEGAADTIREAAWFGLPQFHKPEFQLSAILVTLPVIIVLIAENVGHVKAVSEMTGEDLDDLAGDALIADGFGTTLAGAFGGSGTTTYAENIGVMAATRVYSTAAYWVAACTAIALAFIPKFGALIFTIPAGVLGGACLVLYGLIGMLGIRIWQDNKVNFNNPVNLTMAAVALVAGIGNLTLTVFGVTLEGIAWGSVGIIVLYPIMKRLYLSIGEGKNAKF

SEQ ID NO: 22188 - protein, 505 aa, Shigella flexneri 2a str. 301
MCLDSFINVNGCFLFWRAKGETLMSAIDSQLPSSSGQDRPTDEVDRILSPGKLIILGLQHVLVMYAGAVAVPLMIGDRLGLSKDAIAMLISSDLFCCGIVTLLQCIGIGRFMGIRLPVIMSVTFAAVTPMIAIGMNPDIGLLGIFGATIAAGFITTLLAPLIGRLMPLFPPLVTGVVITSIGLSIIQVGIDWAAGGKGNPQYGNPVYLGISFAVLIFILLITRYAKGFMSNVAVLLGIVFGFLLSWMMNEVNLSGLHDASWFAIVTPMSFGMPIFDPVSILTMTAVLIIVFIESMGMFLALGEIVGRKLSSHDIICGLRVDGVGTMIGGTFNSFPHTSFSQNVGLVSVMRVHSRWVCISSGIILILFGMVPKMAVLVASIPQFVLGGAGLVMFGMVLATGIRILSRCNYTTNRYNLYIVAISLGVGMTPTLSHDFFSKLPAVLQPLLHSGIMLATLSAVVLNVFFNGYQHHADLVKESVSDKDLEVRTVRMWLLMRKLKKNEHGE

SEQ ID NO: 22189 - protein, 443 aa, Shigella flexneri 2a str. 301
MSKAPITHNTEDNTMTRRAIGVSERPPLLQTIPLSLQHLFAMFGATVLVPVLFHINPATVLLFNGIGTLLYLFICKGKIPAYLGSSFAFISPVLLLLPLGYEVALGGFIMCGVLFCLVSFIVKKAGTGWLDVLFPPAAMGAIVAVIGLELAGVAAGMAGLLPAEGQTPNSKTIIISITTLAVTVLGSVLFRGFLAIIPILIGVLVGYALSFAMGIVDTTPIINAHWFALPTLYTPRFEWFAILTILPAALVVIAEHVGHLVVTANIVKKDLLRDPGLHRSMFANGLSTVISGFFGSTPNTTYGENIGVMAITRVYSTWVIGGAAIFAILLSCVGKLAAAIQMIPLPVMGGVSLLLYGVIGASGIRVLIESKVDYNKAQNLILTSVILIIGVSGAKVNIGAAELKGMALATIVGIGLSLIFKLISVLRPEKVVLDAEDADITDK

SEQ ID NO: 22190 - protein, 464 aa, Shigella flexneri 2a str. 301
MVRSQLSRADAPCLLTSLRRQLMAMFGFPHWQLKSTSTESGVVAPDERLPFAQTAVMGVQHAVAMFGATVLMPILMGLDPNLSILMSGIGTLLFFFITGGRVPSYLGSSAAFVGVVIAATGFNGQGINPNISIALGGIIACGLVYTVIGLVVMKIGTRWIERLMPPVVTGAVVMAIGLNLAPIAVKSVSASAFDSWMAVMTVLCIGLVAVFTRGMIQRLLILVGLIVACLLYGVMTNVLGLGKAVDFTLVSYAAWFGLPHFSTPGFNGQAMMLIAPVAVILVAENLGHLKAVAGMTGRNMDPYMGRAFVGDGLATMLSGSVGGSGVTTYAENIGVMAVTKVYSTLVFVAAAVIAMLLGFSPKFGALIHTIPAAVIGGASIVVFGLIAVAGARIWVQNRVDLSQNANLIMVAVTFVLGAGDFALTLGGFTLGGIGTATFGAILLNALLSRRLVDVPPPEVVHQEP

SEQ ID NO: 22191 - protein, 429 aa, Shigella flexneri 2a str. 2457T
MTRRAIGVSERPPLLQTIPLSLQHLFAMFGATVLVPVLFHINPATVLLFNGIGTLLYLFICKGKIPAYLGSSFAFISPVLLLLPLGYEVALGGFIMCGVLFCLVSFIVKKAGTGWLDVLFPPAAMGAIVAVIGLELAGVAAGMAGLLPAEGQTPNSKTIIISITTLAVTVLGSVLFRGFLAIIPILIGVLVGYALSFAMGIVDTTPIINAHWFALPTLYTPRFEWFAILTILPAALVVIAEHVGHLVVTANIVKKDLLRDPGLHRSMFANGLSTVISGFFGSTPNTTYGENIGVMAITRVYSTWVIGGAAIFAILLSCVGKLAAAIQMIPLPVMGGVSLLLYGVIGASGIRVLIESKVDYNKAQNLILTSVILIIGVSGAKVNIGAAELKGMALATIVGIGLSLIFKLISVLRPEEVVLDAEDADITDK

SEQ ID NO: 22192 - protein, 427 aa, Streptococcus pyogenes MGAS315
MTHSTKQEHSHSQSAVLGLQHVLSMYAGSILVPIMIAGALGYSARELTYLISTDIFMCGVATFLQLKLTKHTGVGLPVVLGCAFQSVAPLSIIGAQQGSSAMFGALIASGIYVILVAGIFSKIARFFPPIVTGSVITVIGLSLVGVAMGNMGDNVKEPTAQSMMLSLLTIVIILLVQKFTKGFVKSISILIGLVAGTLVSAMMGLVDTTPVVEASWIHVPTPFYFGMPTFEITSIVMMCIIATVSMVESTGVYLALSDLTNDQLDEKRLRNGYRSEGIAVFLGGLFNTFPYTGFSQNVGLVQISGIKTRRPIYYAAGILVVIGLLPKFGAMAQMIPSPVLGGAMLVLFGMVALQGMQMLNRVDFQKNEYNFIIAAVSISAGLGFNGTNLFTSLPETAQMFLTNGIVIATLTSVVLNLVLNGKDKQDE

SEQ ID NO: 22193 - protein, 404 aa, Streptococcus pyogenes MGAS315
MLVGLSFQHLFAMFGATVLVPILVGIDPSVALLSSGLGTLAHLSVTKFKIPAYMGSSFAYIAAMQLLMKTNGIGAVAQGAMTGGLVYLIVALIVKVIGNDWIDKILPPIVVGPIVMVIGLSLASTAVNDVMLKNGNYNLTYLVIGLVTLLSVIFFNIYGKGIVAIVPLLLGLLVGYVVALLVGVLTGQEIVDFTNVAQAKWFSIPSVEIPFLTYGVKFYPSAILTMAPIAFVTMTEHFGHIMVLNSLTKRDYFKDPGLEKTLTGDGFAQIIAGFLGAPPVTSYGENIGVMALNKIFSVYVIAGAAVIAALLSFIGKVSALIQSIPTPVIGGISVALFGVIASSGLKILIESKVDMDNKKNLLIASVILVSGIGGLMLQVNGLQISGVAFSTLLGIILYQVLPEK

SEQ ID NO: 22194 - protein, 525 aa, Escherichia coli CFT073
MPPQFLSLTPLPRKNWHSTSMCLDSFMNINGCFLLWRAKGETLMSAIDSQLPSSSGQDRPTDEVDRILSPGKLIILGLQHVLVMYAGAVAVPLMIGDRLGLSKEAIAMLISSDLFCCGIVTLLQCIGIGRFMGIRLPVIMSVTFAAVTPMIAIGMNPDIGLLGIFGATIAAGFITTLLAPLIGRLMPLFPPLVTGVVITSIGLSIIQVGIDWAAGGKGNPQYGNPVYLGISFAVLIFILLITRYAKGFMSNVAVLLGIVFGFLLSWMMNEVNLSGLHDASWFAIVTPMSFGMPIFDPVSILTMTAVLIIVFIESMGMFLALGEIVGRKLSSHDIIRGLRVDGVGTMIGGTFNSFPHTSFSQNVGLVSVTRVHSRWVCIASGIILILFGMVPKMAVLVASIPQFVLGGAGLVMFGMVLATGIRILSRCNYTTNRYNLYIVAISLGVGMTPTLSHDFFSKLPAVLQPLLHSGIMLATLSAVVLNVFFNGYQHHADLVKESVSDKDLKVRTVRMWLLMRKLKKNEHGE

SEQ ID NO: 22195 - protein, 443 aa, Escherichia coli CFT073
MSKAPITHNTEDNTMTRRAIGVSERPPLLQTIPLSLQHLFAMFGATVLVPVLFHINPATVLLFNGIGTLLYLFICKGKIPAYLGSSFAFISPVLLLLPLGYEVALGGFIMCGVLFCLVSFIVKKAGTGWLDVLFPPAAMGAIVAVIGLELAGVAAGMAGLLPAEGQTPDSKTIIISITTLAVTVLGSVLFRGFLAIIPILIGVLVGYALSFAMGIVDTTPIINAHWFALPTLYTPRFEWFAILTILPAALVVIAEHVGHLVVTANIVKKDLLRDPGLHRSMFANGLSTVISGFFGSTPNTTYGENIGVMAITRVYSTWVIGGAAIFAILLSCVGKLAAAIQMIPLPVMGGVSLLLYGVIGASGIRVLIESKVDYNKAQNLILTSVILIIGVSGAKVNIGAAELKGMALATIVGIGLSLIFKLISMLRPEEVVLDAEDADITDK

SEQ ID NO: 22196 - protein, 464 aa, Escherichia coli CFT073
MVRSQLSRADAPCLLTSLRRQLMAMFGFPHWQLKSTSTESGVVAPDERLPFAQTAVMGVQHAVAMFGATVLMPILMGLDPNLSIFMSGIGTLLFFFITGGRVPSYLGSSAAFVGVVIAATGFNGQGINPNISIALGGIIACGLVYTVIGLVVMKIGTRWIERLMPPVVTGAVVMAIGLNLAPIAVKNVSASAFDSWMAVMTVLCIGLVAVFTRGMIQRLLILVGLIVACLLYGVMTNVLGLGKAVDFTLVSHAAWFGLPHFSTPAFNGQAMMLIAPVAVILVAENLGHLKAVAGMTGRNMDPYMGRAFVGDGLATMLSGSVGGSGVTTYAENIGVMAVTKVYSTLVFVAAAVIAMLLGFSPKFGALIHTIPAAVIGGASIVVFGLIAVAGARIWVQNRVDLSQNGNLIMVAVTLVLGAGDFALTLGGFTLGGIGTATFGAILLNALLSRRLVDVPPPEVVHQEP

SEQ ID NO: 22197 - protein, 468 aa, Thermobifida fusca
MQPGSHQNPQGDTDVPSPAPATGPRNGLSAGLTTLSLGIQHVVAMFGATFVFPLLMGLDPNLAIMMSGICTILFLLIVNGKVPSYLGSSASFVAAAVIIAADGGGPATITGAVLVTGVVLALAGFVIHLLGPNAIVRAFPPAVTGGVVMLIGFNLAPVVSESYWPYDQWTALLTMAFVILATVVLRGFLSRITVLLGLVFGFVLSWVFDRLFGMTPTPQEDGSVKDAFRVDLSGVADAPWFGLPEFHAPEFHLSAILVALPAVIALIAENAGHVKAVQEMTGNDLNPYMGRAIFADGVATALASSVGGAPTTTYAENIGVMAITRVYSTAPYYVAAVIAILIGLCPKFGALVYAIPQGVIGGITVILYGMIGLLGAKIWVENQVNFADPLVLVPIAAGLIAGIGNVSLVFTDGFQISGIALGTIVILAGYHLLHALAPRSKTHAAPSPGAPAGSGAEGGKAEQHAVQD

SEQ ID NO: 22198 - protein, 428 aa, Leuconostoc mesenteroides subsp. mesenteroides ATCC 8293
MMTPKHNRIMDHGLAGIQHVFVSNVWLDPIYVAAAAGLSLNLSTNLVNTIFIVSGLVTLTQATKLAKLPIVQGPSAAFDALMINAGKAGQLATASGSILLSALIVFLLSVTGLINKLIKLLTPAITGTLIFLVGISLSGFTLSEFLGGYPGDKGFSSPTTLILSVTTATIVILLSIFGKGFWKRFSFLIALIVGDILAVSLGVVDYSVLSTKSWFGMPHLLPYGSLKFNWVMFLTFFVAYVVAVVEALGVYQAAGDTLKENISPRRIQNGLIGESAGSMFSSLFGGFPTTAFAQNVGILNLTGNVSRIPVIIAGILFVVLGFVPKIGAFLAITPSPVIGGIFLPAATTLILTGFNILKRAPDNNENNMIIGLSIILAIALPNYATGWSGVTGELLSNSILVGALSAIILQFALVNLPRMIKNIRGSHD

SEQ ID NO: 22199 - protein, 452 aa, Leuconostoc mesenteroides subsp. mesenteroides ATCC 8293
MCLFLCNLSTLFWNFVYNKISIFCRRDPLMSKNQNNAIYDLHDKPPFFTWLGLSLQHLFSMFGATVLVPLLVGLNPGVALFTSGVGTLLHLLITRGKVPAYMGSSFAFIIPMTSLLKTVGYPAVAQGIISVGLVYLVVAFIVTFTGTAWIEHIFPAEVVGPIIMVIGLSLAGSAASSATTMNGHYDIRVFTVALVTLLATIAFNMFLRGFLGLLPVLLGIIFGYIVALITGLVDLSPVASAHWFQLPNFETFIGKDGFVFYPAAVLSMAPLALVTLSEHLGHLMVLSKITGTDFFENPGLKRTLTGDGTASVVAGLIGGPAVTSYGENIGVMQLSRVYSVWVIGGAAFFAVVFSFVGKLSALISTIPGAVTGGVGFMLYGVIAAAGLQVIVDNKVDYSKKRNLMIAAPIMVVGIGNFHLQLSTQVDFSGVAIATILGIVLNLVLPKVAASEK

SEQ ID NO: 22200 - protein, 461 aa, Oenococcus oeni MCW
MDKSFLVNKGKLRMSINNRESQNNLVDNYHSALLGIQHLLAMYSGAVLVPLLIGGALKFSAAQMTYLISIDIFMCGLATFLQLFTNRIFGIGLPVILGCAIQAVAPLEMIGQNFSIGTMYGAIIASAVFVFLIAGLFAKIRKFFPPLVTGTVITVIGLTLIPIGFVNLGGGSATAKSFGSGNNLIVGLFTILVVLVCSVYGRGFISRIAVLIGLLLGTILASLMGMVSFKAVVDASWFHFPQPFYFGTPRFEVSSILTMIAISLVSLVESTGVFFALGDITKKPIGEKDLKKGYRAEALAGILGGIFNTFPYTTFSQNVSLVQLSGIKSRQPIYYAAGFLMLLGLLPKIGALATIIPTPVIGGATVIMFGMIAIQGIRILEKMDFSNNKNILVAAISIGAGLGVSVEPNIFQSLPETVRLIFSNGVVIASLCAVLLNLIIQPDRVTNKIKNPAGSVKQQEN

SEQ ID NO: 22201 - protein, 423 aa, Oenococcus oeni MCW
MEEKRSNGAIYDVYERPPFPMLFGLSLQHLFSMFGATVLVPLVVGLNPGVAIFSSGVGTLLHMLITRGKIPAYMGSSFAFVIPMTSLMKSFGYPAVAQGVFSVGIIYLIVALIVAKAGSAWIDKIFPPAVVGPIVMVIGLSLAGSAATNATINSATNKYEIKIFIVALLTLAATIFYNMYFKGFLGMIPVLLGIITGYIFAIIFGLVDFQSVAQAHWFALPNFNSLFASKKLYPSAILDMAPLALVTISEHLGHIMVLNKITGRNFFRDPGLNKTLAGDGTASIAASLVGGPSVTSYGENIGVMQMSKVYSVWVIGGAAVLAVLLSFVGKLSALIQTIPGAVIGGVGFMLYGVIAAAGLQIIVDNKVDYSKKRNLMIAAPILVIGIGNFDLQLGNLEFTGVAMATVIGIVLNLVLPKVAASEK

SEQ ID NO: 22202 - protein, 426 aa, Brucella suis 1330
MGYFPSWRLTSNAVVLPDERLPAAAAVPMGIQHLLAMSGSTIVAPLLMGFDPNVAVFFSGIGTLLFFLITAGRVPSYLGSSFAFIAVVIAATGYSGSGPNPNIAIALGGIIACGAFYSLIGLIVMFLGTGWVEKLMPPAVTGAIGVSIGLNLAPVAIGQLKGTGAHTSIALLTVLCMAMISAYGPRGTRRLSVLFALLFGYLLVLIAGNGLGIVPGIDFTAVKNAAWFGLPHFTTPAFNWQAVTLIAPVAIVLVAENLGHIKALGSITGRNMDGYIGRGFFSDGLATMISGAGGGTGVTTYAENIGVMAMTKVYSTLIFVIAAIMALILGMSPKFGAILQTIPAPVLAGLAVSVFGLIASAMARIWIVNKVDFADSRNLFTVGVALIFGAGDFTLNIGNFALGGIATSTLAALVLYQLLGIGRSDS

SEQ ID NO: 22203 - protein, 450 aa, Bifidobacterium longum DJO10A
MSIRKELTAQNVLLGFQHVLVSNVWLDPVFVAGAIGLPIALSSNMINAIFIVSGLVTLVQATRLVRLPVVQGPSAAFDALMIAAGTAGMLGAASSSILIASLVFLLLCLTGVIERMRFLFSPMISGVVIFMVGVSLSGFTLSEFLGGAPGDKTFADPHILTVSILTTAIVLVLSLLGKGLLKSFSFLIALVVGTVVAAAFGMVDFSPVASKGWLGLPTFLPYGPFTFDWKIFIPFFIAYMVAVMEALGVYQAASEIQGTPLERKQVRYGLAGEAAGSAISSLIGGFTTTAYPQNVGLLNLTGEGKLRTRTPVIIAAVLLLILGFVPKAGALLSVIPSAVVGGIFLPAAASLIVTGLRALRKVADDERRQTVIGMSLLLGIALPKALSGLTGGASVFFGNNIMVGVFSAIILNALFVALPDLVAKHRAPASVDVPAADPADGTGAAAYDER

SEQ ID NO: 22204 - protein, 496 aa, Bifidobacterium longum DJO10A
MARIQAPVSLQWRFGGCGAGRRPTPAGVLRQIAFPGRETSQNLRELEWCVVRLVVNAVPQARARRVVMSNIFQWQLHGDGKTLAPGEVVEPDERLTWVRTAGIGAQHVIAMFGATFLVPILTGFDPSTTLFFTAMSTALFLLINRNVLPSYLGSSFGFIAPITAVTTANKGIAVASFGIMVTGILLALVGVLVHYAGSKWIDIIMPPVVNGAIVAIIGFNLAPSVWTNFQAAPDTALVTLLAVLLVAVLFKGLLGRLNILVGVIIGYVYACIRGQVDFSAIGDAAWIGFPKFHLPQADFSILPMFIPVVLVLVAENVGHVKSVAQMTGRDYDNQIGTALMADGLGTTLAGFGGGSGTTTYGENIGVMAATKVYSTAAYWCAAAFALILSLCPKFGAVINTIPAGVLGGVTTLLYGMIGMIGIRIWVENKVNFDKPLNIMVAAITMIIAIGQFAFTVGGISFNGIAIGTIVILVAYHGLKAIGKATGTIAKDDPDIL

SEQ ID NO: 22205 - protein, 413 aa, Haemophilus somnus 129PT
MTNQNIPVEISGKIKQAFIGLQMLFVAFGALVLVPLITGLDANTALLTAGIGTLLFQLCTGKKVPIFLASSFAFIAPIQYGVASWGIPATMGGLACAGLVYVALSLLVKLRGAGALQKIFPPVVVGPVIIIIGLGLAPVAVDMATGKGSNYEYGDAVLVSMITLLTTLIVAVFAKGMMKLIPIMFGIAVGYILSLFMGLIDFSPIAKASWFSLPNLTTPEFKLEAILYLLPIAIAPAVEHIGGIMAISSVTGKDFLKNPGLHRTLLGDGLATSAASLLGGPPNTTYAEVTGAVMLTRNFNPTIMTWAAVWAIAISFCGKVGAFLSTIPTFVMGGIMMLVFGSIAVVGMSTLIRGKVDVTEARNLCIISVVMTFGIGGMFVNLGELSLKGISLCAVVAIILNLILPSAKNQIED

SEQ ID NO: 22206 - protein, 441 aa, Pseudomonas syringae pv. syringae B728a
MPVTRFSAPNRRTRNPMTQQEFNDPLWRTILSGAQMLFVAFGALVLMPLITGLDPNVALFTAGLGTLLFQIVTGRQVPVFLASSFAFITPIILAKGQFGLAATMGGVMAAGFVYTFLGLAVKIKGTGFIDRLLPPVVIGPVIISIGLAMAPIAANMAMGKSGDGVQLIPYQTAMLISMPALLTTLIVAVFGKGIFRLVPIISGVLVGFALSFYFGVVDTKKIADAAWLALPHFTAPEFNWQAILFIVPVALAPAIEHIGGVIAVGSVTGRDYLKKPGLHRTLFGDGIATTAAGLFGGPPNTTYAEVTGAVMLTKNYNPQIMIWASFFAITLAFIGKFGALLQSIPVPVMGGILCLLFGSIAAVGMNTLIRHKIDLAEARNLVIVSVTLVFGIGGVLIGTGNGPNDFGLKGIALCAVTAIALNLILPGNDSWKNKQLDDQLP

SEQ ID NO: 22207 - protein, 491 aa, Pseudomonas fluorescens PfO-1
MGAGLPAIGRISGLPDAKRAAASNPAAVHHKNKKDPRCCMSELSKARIPDAPAIQRLPLLQLILVGLQHVLLMYGGAIAVPLIIGQAAGLSREEIAFLINADLLVAGIATIVQSLGIGPMGIRMPVMMGASFAAVGSMVAMAGMPGIGLQGIFGATIAAGFFGMIIAPFMSKVVRFFPPLVTGTVITSIGLSLFPVAVNWAGGGAGAAQFGSPIYLAIAALVLATILLIHRFMRGFWVNISVLIGMCLGYVLCGAIGMVDLSGMANAPWVQFVTPLHFGMPKFELAPILSMCLVVVIIFVESTGMFLALGKITGQEVCPRMLRRGLLCDAGASFFAGFFNTFTHSSFAQNIGLVQMTGVRCRSVTIVAGGLLIVLSLLPKAAFLVASIPPAVLGGAAIAMFGMVAATGIKILQEADIGDRRNQLLVAVSIGMGLIPVVRPEFFAHLPLWMSPITHSGIAMATLSALTLNLLFNILGGAERAAINDCHAHPH

SEQ ID NO: 22208 - protein, 451 aa, Pseudomonas fluorescens PfO-1
MSSASSSSTVHPVDRVLPVRQMLTLGLQHMAVSYIGAIAVPLIVASALKMSHADTVVLISTTLFCSGIATLLQTVGFWRFGVRLPILQGVAFSSVGPVIAIGSNPEVGFAGVCGAVIGAGIFTMLIAPFVGRLRRFFPPVVTGCIVTVIGLQLFPIAYEWVGGGRNASNFGAPAFLAVAVVVLLTILLVNRYGSPLLRNMAVLVGMLVGAGLAYGLGMGNFHSVEDAPWLTVPYPFYFGLPTFSLIPIATMVVVMIVQMVESMGLFVAIGDIVDKPVEDKQVINGLRANGLASTIAGMFAAFPFIAFMENVGLVILTGVRSRWVVAISGLLMCSIALVPKAGAIIASMPTAALGGAGIAMFGVVAAAGIQTLAKVDYERNRYNVLIVGFTIAAALVPVLAPTLFKQLPEWSQPFLHSSVVIACLVSVLLNAALNGVSMPETTAGKSASHIL

SEQ ID NO: 22209 - protein, 506 aa, Pseudomonas fluorescens PfO-1
MKTPHVSHQRPEDENLGVGANMAYGLQHVLTMYGGIVAVPLIIGQAAGLSPADIGLLIAASLFAGGLATLLQTLGLPFFGCQLPLVQGVSFSGVATMVAIVSSGGEGGFQSVLGAVIAASLIGLLITPVFSRITKFFPPLVTGIVITTIGLTLMPVAARWAMGGNSHAPDFGSMQNIGLAAVTLVLVLLLSKVGSSTISRLSILLAMVIGTVLAVFLGMADFSSVTQGPMFGFPTPFHFGMPTFHFAAILSMCIVVMVTLVETSADILAVGEIIGTKVDSKRLGNGLRADMLSSMFAPIFGSFTQSAFAQNVGLVAVTGIKSRYVVATGGIFLVILGLLPFMGRVIAAVPTSVLGGAGIVLFGTVAASGIRTLSKVDYRNNVNLIIVATSIGFGMIPIAAPNFYDHFPSWFATIFHSGISSSAIMAILLNLAFNHFTAGNSDQQSVFAAAEERTLRYRDLAALREGDYFSDGKLHDCDGNEVPVIDPDADHGHGAPKVHAKSSEHV

SEQ ID NO: 22210 - protein, 502 aa, Pseudomonas fluorescens PfO-1
MPDPCHRKKRWLLICFIAINVQIWPRFKRSPGRMHLSNALGMPAISTDAAPSGAWEMTTQRIHPVDEVLPLRQLFTFGLQHVLVMYAGAVAVPLILGSAMGLTSAQVVLLINANLLTSGVATLIQTLGFWKFGARLPLIQGCSFIALAPMIMIGKEFGLSQIFGAVIAAGFITVALAPVFSRLLRFFPPVVIGSLITIIGISLMPAAAIWLGGGNPDSADFGNPANLLLGLATVSVTLVIYARFKGFIGNLSVLIGLFVGSLIAAACGMTHFNRVSEAAWFELSAPMAFGAPEFAPVPILIMTLAMLVIMAETTGNCLAIGKLTGKPTTQQTLGNAFRADGLSTMLGGLFNSFPYNAFTQNTGLIALSNVKSRFVVAAAGAIMVLMGLFPKLGALIAAVPTPVLGGCAIVMFGMTTVAGIQELSRVQFEGTRNGIIVAVSVSAGVLPMSFPALFEHVGPTLKLVLDSGIFLGAITAIVLNVLLNDEKKPTETIGATSAELAD

SEQ ID NO: 22211 - protein, 424 aa, Pseudomonas fluorescens PfO-1
MQQEFNDPLWRTVLSGAQMLFVAFGALVLMPLITGLDPNVALFTAGLGTILFQIVTGRQVPVFLASSFAFITPIILAKGQFGLAATMGGVMAAGFVYTFLGLAVKIKGTGFIDRLLPPVVIGPVIISIGLAMAPIAANMAMGKAGDGSELIHYQTAMMISMPALLTTLIVAVFGKGIFRLVPIISGVLVGFAMSFYFGVVDTAKIAAAPWFALPHFTAPEFNWQAILFIVPVALAPAIEHIGGVIAVGSVTGRDYLKKPGLHRTLLGDGIATTAAGLFGGPPNTTYAEVTGAVMLTKNYNPKIMTWAAIFAISLAFIGKFGALLQSIPVPVMGGILCLLFGSIAAVGMNTLIRHKIDLGEARNLVIVSVTLVFGIGGVLVGTGTGPDDFGLKGIALCAVVAIALNLLLPGNDSWKQKKADEPLI

SEQ ID NO: 22212 - protein, 450 aa, Bifidobacterium longum NCC2705
MSIRKELTAQNVLLGFQHVLVSNVWLDPVFVAGAIGLPIALSSNMINAIFIVSGLVTLVQATRLVRLPVVQGPSAAFDALMIAAGTAGMLGAASSSILIASLVFLLLCLTGVIERMRFLFSPMISGVVIFMVGVSLSGFTLSEFLGGAPGDKTFADPHILTVSILTTAIVLVLSLLGKGLLKSFSFLIALVVGTVVAAAFGMVDFSPVASKGWLGLPTFLPYGPFTFDWKIFIPFFIAYMVAVMEALGVYQAASEIQGTSLERKQVRYGLAGEAAGSAISSLIGGFTTTAYPQNVGLLNLTGEGKLRTRTPVIIAAVLLLILGFVPKAGALLSVIPSAVVGGIFLPAAASLIVTGLRALRKVADDERRQTVIGMSLLLGIALPKALSGLTGGASVFFGNNIMVGVFSAIILNALFVALPDLVAKHRAPASVDVPAADPADGTGAAAYDER

SEQ ID NO: 22213 - protein, 429 aa, Bifidobacterium longum NCC2705
MSNIFQWQLHGDGKTLAPGEVVEPDERLTWVRTAGIGAQHVIAMFGATFLVPILTGFDPSTTLFFTAMSTALFLLINRNVLPSYLGSSFGFIAPITAVSTANKGIAVASFGIMVTGILLALVGVLVHYAGSKWIDIIMPPVVNGAIVAIIGFNLAPSVWTNFQAAPDTALVTLLAVLLVAVLFKGLLGRLNILVGVIIGYVYACIRGQVDFSAIGDAAWIGFPKFHLPQADFSILPMFIPVVLVLVAENVGHVKSVAQMTGRDYDNQIGTALMADGLGTTLAGFGGGSGTTTYGENIGVMAATKVYSTAAYWCAAAFALILSLCPKFGAVINTIPAGVLGGVTTLLYGMIGMIGIRIWVENKVNFDKPLNIMVAAITMIIAIGQFAFTVGGISFNGIAIGTIVILVAYHGLKAIGKATGTIAKDDPDIL

SEQ ID NO: 22214 - protein, 435 aa, Desulfovibrio desulfuricans G20
MSRNTELHLTVGVDEPVSPLKAFALGLQHVLAMDVYIAPFVMAGLLSLSVPETATFIQMTFVAAGLATLIQAGFGIRLPVMQGPSYVPIGALAAIGNSLGLGAMFGSLLPGALVMTLLGKPLRVFSRIVRFFIPPLVGGTVIVIVGIALMPVALKGCYGYFGDPAHNAVVALVSAAVLVVLTVAGSRPGRFNQVVRMGSVVFSMAAGTLTAAAFGMVNFDSVAAAPWLALPVIFPYGTPHIDVSAALTLVFIYLVVLVETTGTWFAVEAVTGSRLDDERINGGTFGEGVGCFLGAMLGGTPVTGYSTNAGIIAITGVASRWAIMAGGGILLVLGMVPKLMNVIASIPGPVISGVFAVICVVIAMNGFRVVRTVTLSERNMLVMGLPILLTLAAVFMPAELRDRLPALVRYLVESGIAVGAVSAVVLNLILPKDAE

SEQ ID NO: 22215 - protein, 415 aa, Desulfovibrio desulfuricans G20
MVSESTEYSFRLKDSLIGAQMLFVAFGALVLVPLLTGLDPNVALFTAGAGTLVFQLITKRQVPIFLASSFAFIAPIIHGVATWGIPATMGGLVAAGLLYVLLGTMIKIQGTQILDRVLPTIVTGPVIMVIGLVLAPAAVFMALGKTGDGSAELFARNDALVVSMISLVATIGASMFGRGVIRLIPIICGIAAGYTAALAYGMVDFTRVIEAPWLAVPSFVAPEFNIEAIIFIVPVAIAPAIEHVGDVLAISSVTGKNYIDKPGVHRTMIGDGIATMFASLLGGPPNTTYSEVTGAVALTRSFNPGIMTWAAITAILLAFVGKLGALLQTIPTPVMGGIMILLFGAIVVVGVNSLVRAQQDLMEPRNLAIISVILVFGIGGMAFHAGEFSIKGIGLAGITGVVLNMILPKPARRKR

SEQ ID NO: 22216 - protein, 424 aa, Streptococcus agalactiae 2603V/R
MKFNVQSNSQAALLGLQHLLAMYAGSILVPIMIASALGYNAKQLTYLIATDIFMCGIATLLQLRLSKHFGVGLPVVLGCAFQSVAPLSIIGAQQGSGYMFGALIASGIYVVLVAGIFSKVANFFPPIVTGSVITTIGLTLIPVAMGNMGDNAKEPSLQSLTLSLVTIGVVLLINIFAKGFLKSISILIGLISGTILAAFMGLVDASVVADAPLVHIPKPFYFGAPRFEFTSILMMCIIATVSMVESTGVYLALSDITNDKLDSKRLRNGYRSEGLAVLLGGLFNTFPYTGFSQNVGLVQISGIRTRKPIYFTALFLVILGLLPKFGAMAQMIPSPVLGGAMLVLFGMVALQGMKMLNQVDFEHNEHNFIIAAVSIAAGVGFNGTNLFISLPNTLQMFLTNGIVISTLTAVVLNIILNGLPKKLI

SEQ ID NO: 22217 - protein, 441 aa, Streptococcus agalactiae 2603V/R
MTLNAKGESNQILVDKEVHSTNLLLDIDEKPELFQGLLLSFQHVFAMFGATILVPLILGMPVSVALFASGCGTLIYQVATKFKVPVYLGSSFAYITAMALAMKQMHGDISAAQTGILFVGLIYVVVATVIKFVGNSWVDKILPPIIIGPMIIVIGLGLANSAVTNAGFVAKGDWRKMLVAVVTFLIAAFINTKGKGFIKIIPFLFAIIGGYILSIILGLVDLSPVEKAAWFELPKFYLPFKTGLFHSYKLYFGPEMLAILPISIVTIAENIGDHTVLGQICGRNFLKKPGLNRLLIGDGLATAFSALIGGPAETTYGENTGVIGMTRIASVTVIRNAAFIAIAFSFFGKFTALISTIPSAVLGGMAILLYGVIASNGLKVLIENRVNFAEVRNLIIASSMLVLGLGGAVLDLGALTLSGTALSAIVGIILNLILPKESMKS

SEQ ID NO: 22218 - protein, 455 aa, Pseudomonas aeruginosa PAO1
MSVVTDRRIPDSPVDQRLPLTQLLLVGFQHVLLMYGGAVAVPLIVGQAAGLSREEIAFLINADLLVAGIATLVQSLGIGPMGIRMPVMMGASFAAVGSMVAMAGMPGVGITGIFGATIAAGFFGMLIAPFMSRIVRFFPPLVTGTVITSIGMCLFPVAINWAGGGKGAEDFGSLHFLFLSSLVLCTILLINRFMRGFWVNISVLMGMGLGYAIAGGMGMVDLGGLAERPWFDIVTPLHFGAPTFDLAPILSMCLVVVIIFVESTGMFLALGKITGREITPTELRRGLLCDAGASFFAGFLNTFTHSSFAQNIGLVQMTGVRSRYVTVAAAGFLILLSMLPKAAFLVASIPPAVLGGAGIAMFGMVAASGIQILHEANITDRRNQLLVAVSIGMGMVPVVRPDFFARLPVWMEPITHSGIAMTAIWAVVLNLLFNILSRNDRSHLCGSHAPAPKHS

SEQ ID NO: 22219 - protein, 485 aa, Pseudomonas aeruginosa PAO1
MAYGLQHVLTMYGGIVAVPLILGQAAGLAPGDIGLLIAASLFAGGLATLLQTLGVPFFGCQLPLVQGVSFAGVATMVAIIGSGGSGGIPAVLGAVMAASLIGLLITPIFSRITKFFPPLVTGIVITTIGLTLMPVAARWAMGGNSHAPDFGSMANIGLAAITLVIVLLLSKLGSASISRLSILLAMVIGTVIAVFLGMADFSKVTEGPLVAFPTPFHFGMPTFQVAAIISMCIVIMVTLVETSADILAVGEIIDTKVDSRRLGNGLRADMFSSMLAPIFGSFTQSAFAQNVGLVAVTGIKSRYVVATGGLFLVILGLLPVMGRVIAAVPTAVLGGAGIVLFGTVAASGIRTLSKVDYRNNMNLIIVATSIGFGMIPIAAPTFYDHFPSWFATIFHSGISSSAIMAILLNLAFNHFTAGNSDQQSVFVAASERTLRYQDIAALHEGDYFLDGKLYDAQGNEVPLAGDDSHGAPPRRRSETAEAGSA

SEQ ID NO: 22220 - protein, 427 aa, Pseudomonas aeruginosa PAO1
MGDAFQEPLWRQVLSGAQMLFVAFGALVLMPLITGLDPNVALFTAGLGTLLFQLVTGRQVPVFLASSFAFITPIILAKGQFGLAATMGGVVAAGFVYTFMGLAVKIKGTGFIDKLLPPVVIGPVIISIGLAMAPIAANMAMGKAGDGSELLPYRTAMMISMPALLTTLVVAVFGKGIFRLVPIIAGVLVGFALSFVFGVVDTAAIVAAPWLELPKFTAPEFNWQAILFIVPVALAPAIEHIGGVIAVGGVTGQDYLKKPGLHRTLLGDGLATSAAGLFGGPPNTTYAEVTGAVMLTKNYNPKIMTWAAVIAITLAFVGKFGAILQSIPVPVMGGILCLLFGTIASVGMNTLIRHKVDLSEARNLVIVSVTLVFGIGGVLIGSGTGPDDIGLKGIALCAIVAIVLNLLLPGNDGWQNKALDEQHKDSH

SEQ ID NO: 22221 - protein, 407 aa, Fusobacterium nucleatum subsp. vincentii ATCC 49256
MEKLSLQTKIVLGMQHVLAMFGATVLVPFLTGLNPSIALICAGVGTLIFHSVTKGIVPVFLGSSFAFIGATALVFKEQGVAILKGGIISAGLVYVIMSFIVLKFGVERIKSFFPPVVVGPIIMVIGLRLSPVALSMAGYSNNTFDRDSLIIALVVVITMIFISILKKSFFRLVPILISVAVGYIVAYFMGDVDLSKVHEASWIGLPVGAFDIITTLPKFTFAGVVALAPIALVVFIEHIGDITTNGAVVGKDFFKDPGVHRTLLGDGLATMAAGLLGGPANTTYGENTGVLAVTKVYDPAILRIAACFAIVLGFIGKFGVILQTIPQPVMGGVSIILFGMIAAVGVRTIVEAQLDFTHSRNLIIAALIFVLGIAIGDITIWGTISVSGLALAALVGIVLNKVLPEDK

SEQ ID NO: 22222 - protein, 421 aa, Streptococcus mutans UA159
MSQELKLDVQERPRFGMLLGLSFQHLFAMFGSTVLVPILVGIDPAVALLSCGLGTLVHLSVTKYKIPAYMGSSFAYIGAMQTLMKTDGIAAVAQGAITGGLVYFIVALVIKWIGNSWIDKILPPVVVGPIVMVIGLSLAGSAVSDVMTKDGHYHLTYVFIGLITLFAVVLFNVYGKGMFGLMPILFGLIFGYLFAVAVGILTGQEIVSFSGVSKASWIQIPTIHLPILNDGFKLYPSAILTMAPIAFVTMTEHFGHIMVLNSLTGRDFFKKPGLDKTLTGDGLAQVVAGILGAPPVTSYGENIGVMALNKIFSVYVIAGAAFLAVLMSFIGKISALLQSIPTPVIGGISIALFGVIASSGLKILIENKTDFDNKKNLLIASIILVSGIGGLTLQIQSLQITGVAFSTLLGIILYQILPEKD

SEQ ID NO: 22223 - protein, 424 aa, Streptococcus agalactiae NEM316
MKFNEQSNSQAALLGLQHLLAMYAGSILVPIMIASALGYNAEQLTYLIATDIFMCGIATLLQLQLSKHFGVGLPVVLGCAFQSVAPLSIIGAQQGSGYMFGALIASGIYVVLVAGIFSKVANFFPPIVTGSVITTIGLTLIPVAMGNMGDNAKEPSLQSLTLSLVTIGVVLLINIFAKGFLKSISILIGLISGTILAAFMGLVDASVVAEAPLVHIPKPFYFGAPRFEFTSILMMCIIATVSMVESTGVYLALSDITNDKLDSKRLRNGYRSEGLAVLLGGLFNTFPYTGFSQNVGLVQISGIRTRKPIYFTALFLVILGLLPKFGAMAQMIPSPVLGGAMLVLFGMVALQGMKMLNQVDFEHNEHNFIIAAVSIAAGVGFNGTNLFISLPNTLQMFLTNGIVISTLTAVVLNIILNGLPKKLI

SEQ ID NO: 22224 - protein, 412 aa, Shewanella oneidensis MR-1
MRRLAIPLQGAQMLFVAFGALVLMPLLTGLDTSVALFTAGIGTLLFQLITKRQVPIFLASSFAFIAPILYGVQTWGIPSTMGGIMAAGVVYVCLGALVKVRGTDFIHKLLPPVVVGPVIIIIGLGLAPVAVNMALGKSGDGSLALVPTNTALIISLVSLCTTIAVAIFAKGLLKVMPILAGIIVGYGLSLAFGIVDFSVVTAANWIAIPKFVAPEFNWHAIAFMIPVAIAPAVEHIGDILAISNVTGKDFMKKPGLHRTLTGDGVATIAAAAFGGPPNTTYSEVTGAVTLTRNFDPRIMTWTAITAITLAFVGKLGALMQTIPVPVMGGIMCLLFGSIAAVGLNTLIRNHVDLSEPRNLSIVGVTLVFGIGGMAFGIGSFSLTGISLCGIVAITMNLLLPASKHHKQDVASH

SEQ ID NO: 22225 - protein, 446 aa, Lactobacillus plantarum WCFS1
MKEVSAAPKITNVKAAILGFQHLLAMYSGDVLVPLLIGAALHFSQEQLTYLVSIDIFMCGIATFLQLKRTPLTGIGLPVVLGCAVQAVNPLIQIGKTYGLGTMYGSIIGAGIFIFLIAGLFSKIKNLFPPVVTGSLITIIGFTLIPVAFQNLGGGDTSAKDFGNLQALGIGFLTIAIILLISVFARGFMKSVSILIGILVGTLIAGAMGMVSLKPVAEASWFHLPTLFYFGTPHFEWSSILTMILVSLTTMVESTGVFFALGDITGRKIEGDDLKRGYRAEGIAVILGGLFSTFPYSTFSENVGVVQLSGVKTRKPIYFSAAFLVVLGLLPKIGALATIIPDPVLGGAMVVMFGIVGIQGIRMLAQVDFRNNNNLLVAAVSIGLGLGVTVQTNIFQFLPGALQIMLSNGVVVGSVAAVGLNLLFNRHAAENTVDDESVGLNETEQP

SEQ ID NO: 22226 - protein, 426 aa, Lactobacillus plantarum WCFS1
MTKKAAFHNDEVVLDIHDRPKLGSWLGLSVQHLFSMFGSTVLVPILVGLNPGIALFSSGVGTLMYILITRGKIPAYMGSSFSFIVVMQSLMKTAGYPAIAQGTVAVGCVYLLVSLLVTLIGSDWIDKALPPIVVGPIVMVIGLSLAGTAAKDATMNGSSYDIKYFGVAMATMLLTVIFNMYLRGFMSLVPILLGIVCGYIIAVLVGIVDFSGVEKAQWFAMPAFQLPFISYHPGIYWGAILSMAPIAFVTMSEHMGHIMVLNKLTKRNFFKDPGLNHTLAGDGTASIIAGFVGGPPVTSYGENIGVLAITRVHSIYVLGGAAFFAIVFSFVGKLSALIESIPSPVIGGVSFLLFGVIASSGMRILIDNKVDFNQKRNLMIASAILVIGIGNAYLQLGSFQFSGLAVATVLGIVMNLVLPKTAVNEK

SEQ ID NO: 22227 - protein, 434 aa, Oceanobacillus iheyensis HTE831
MKIAALGFQHVLAMYAGAILVPLIVGEALGLTVEQLTYLVAIDIFMCGIATLFQVMNNRFFGIGLPVVLGCTFTAVAPMIAIGGQYGITAIYGAIIVSGIFVVLISGFFGKLVRFFPPVVTGSVVTIIGITLIPVAINNLGGGQGASDFGSLANISLGFGTLLFIILMYRFTTGFLRSISILIGLAIGTIIASFMGRVDFTAVADASYFHMIQPFYFGTPTFEWPAIITMILVAMVSLVESTGVYFALGDITDKKLKEKDLTKGYRAEGLAILLGGIFNALQYTAFSQNVGLIQMTGVKKLRVIVVAGIMLIALGLIPKIAALTTIIPTAVLGGAMVAMFGMVIAQGIKMLSAVISDSHENSMIIACSVGMGLGVTVVPELFAQIPNSLQILTSNGIVAGSVTAIVLNILFHMLPQRSKKQQTTDSRELAEDIV

SEQ ID NO: 22228 - protein, 406 aa, Pseudomonas syringae pv. tomato str. DC3000
MLFVAFGALVLMPLITGLDPNVALFTAGLGTLLFQIVTGRQVPVFLASSFAFITPIILAKGQFGLAATMGGVMAAGFVYTFLGLAVKIKGTGFIDRLLPPVVIGPVIISIGLAMAPIAANMAMGKTGDGAVLIPYQTAMLISMPALLTTLIVAVFGKGIFRLVPIISGVLVGFALSFYFGVVDTKKIADAAWLAIPHFTAPEFNWQAILFIVPVALAPAIEHIGGVIAVGSVTGRDYLKKPGLHRTLFGDGIATTAAGLFGGPPNTTYAEVTGAVMLTKNYNPQIMIWASFFAITLAFIGKFGALLQSIPVPVMGGILCLLFGSIAAVGMNTLIRHKIDLAEARNLVIVSVTLVFGIGGVLIGTGNGPNDFGLKGIALCAITAIILNLILPGHDSWKHNRPDDQLL

SEQ ID NO: 22229 - protein, 430 aa, Bacillus subtilis subsp. subtilis str. 168
MKEQHNALQLMMLGLQHMLAMYAGAILVPLIVGAAIGLNAGQLTYLIAIDLFMCGAATLLQLWRNRYFGIGLPVVLGCTFTAVGPMISIGSTYGVPAIYGAIIAAGLIVVLAAGFFGKLVRFFPPVVTGSVVMIIGISLIPTAMNNLAGGEGSKEFGSLDNVLLGFGVTAFILLLFYFFKGFIRSIAILLGLIAGTAAAYFMGKVDFSEVLEASWLHVPSLFYFGPPTFELPAVVTMLLVAIVSLVESTGVYFALADITNRRLSEKDLEKGYRAEGLAILLGGLFNAFPYTAFSQNVGIVQLSKMKSVNVIAITGIILVAIGLVPKAAALTTVIPTPVLGGAMIVMFGMVISYGIKMLSSVDLDSQGNLLIIASSVSLGLGATTVPALFSSLSGAASVLAGSGIVIGSLTAIALHAFFQTKQPNSADIKT

SEQ ID NO: 22230 - protein, 449 aa, Bacillus subtilis subsp. subtilis str. 168
MKKRSFKVFTLSLQHVLAMYAGAILVPLLVGRALNVTTEQLSYLLAIDLLTCGVATLLQTLRGTYIGIGLPVMLGSSFVAVTPMIAIGSNYGIHAIYGSIIAAGVFIFLFARFFGKLTVLFPPVVTGTVVTLIGLSLVPTGVKNMAGGEKINGSANPEYGSLENLLLSVGVLVLILVLNRFLKGFARTLSVLIGIAAGTAAAAIMGKVSFSSVTEAPFFQIPKPFYFGAPAFEIGPILTMLIVGIVIIVESTGVFYAIGKICGRPLTDKDLVKGYRAEGIAILIGGLFNAFPYNTFAQNAGLLQLTKVKTRNIVVTAGCILVCLGLIPKIAALASAVPAAVLGGATVVMFGMVIASGVKMLSTADLKNQYHLLTIACSIALGIGASTAPGIFAEFPAPIRILVSDGTITGSLTAIFLNLFFSLRDKKELTAQQTELPVLEHTLALEKEV

SEQ ID NO: 22231 - protein, 438 aa, Bacillus subtilis subsp. subtilis str. 168
MRNGFGKTLSLGIQHVLAMYAGAIVVPLIVGKAMGLTVEQLTYLVSIDIFMCGVATLLQVWSNRFFGIGLPVVLGCTFTAVSPMIAIGSEYGVSTVYGSIIASGILVILISFFFGKLVSFFPPVVTGSVVTIIGITLMPVAMNNMAGGEGSADFGDLSNLALAFTVLSIIVLLYRFTKGFIKSVSILIGILIGTFIAYFMGKVQFDNVSDAAVVQMIQPFYFGAPSFHAAPIITMSIVAIVSLVESTGVYFALGDLTNRRLTEIDLSKGYRAEGLAVLLGGIFNAFPYTAFSQNVGLVQLTGIKKNAVIVVTGVILMAFGLFPKIAAFTTIIPSAVLGGAMVAMFGMVIAYGIKMLSRIDFAKQENLLIVACSVGLGLGVTVVPDIFKQLPSALTLLTTNGIVAGSFTAVVLNIVYNVFSKAKKIEQEADLAEQKTAV

SEQ ID NO: 22232 - protein, 465 aa, Bradyrhizobium japonicum USDA 110
MSSEVHPVDEVLPVPRLLALGLQHVLVMYAGAVAVPLIIGRALKLPPEDVAFLISADLFACGLATLVQCLGFPGVGIRLPVMMGVTFASVGPMLSMAAAPDIGLLGIYGSVIAAGLFGIVAAPFVSRLLPLFPPVVTGSIILVIGISLMRVGINWAGGGLPTLTKVVDGVAGSFPNPAYGQLQGLGISLFVLLFILGLIKWGTGFLANVSVLLGIVAGAVLATILSVMHFDKVSAASWGALVIPFRFGMPQFHLVPVVTMCVVMIVVMIESLGMFLALGDITGKTVDREALSRGLRADGVGTLLGGIFNTFPYTSFSQNVGLVSVTGVRSRWVTVTGGCIMLGLGLLPKLAALVEAVPLVVLGGAGLVMFGMVAATGARILTSVDFRTNRYNLFIVAISIGFGLIPLAAPGFFRNLPHDLQPLLESGILLCAVVSVLLNAFFNGLGGGAAAEADAAAVASSAQHV

SEQ ID NO: 22233 - protein, 439 aa, Bradyrhizobium japonicum USDA 110
MTTTTGSDEQTQGYFPRWKLKTSGVIMPEERLSWGQTIVSGLQHCVAMSGSTIIAPLLMGFDPNVAVLFSGVGTLIFFVIVAGRVPSYLGSSFAFIAVVLAATGYAGQGPNPNISVALGGIVGAGVLYGAIALIVMWSGVGWVERLMPPAVTGAVVAAIGLNLAPVAVKAVSANAFDTWIGLATVLIIGVVAVAAPGLWRRLPIILGAIGGYLLYFLFANGLGFGKPIDFALLSAASWLGLPKFTTPTFQADAIFLIAPVAVILVAENLGHIKAVGAMTGRSLDAYLGRALFADSLATIVAACGGGTGVTTYAENIGVMAATKVYSTLLFALAATVSILLGFSPKFGALILSIPGPVIGGLSIVLFGLIAAMAGRIWVENKVDFANPANLITVAVALTAGAGDLTLKFGAFTIGGIGTATFGAIILYQILTSSLAQHAE

SEQ ID NO: 22234 - protein, 426 aa, Brucella melitensis 16M
MGYFPSWRLTSNAVVLPDERLPAAAAVPMGIQHLLAMSGSTIVAPLLMGFDPNVAVFFSGIGTLLFFLITAGRVPSYLGSSFAFIAVVIAATGYSGSGPNPNIAIALGGIIACGALYSLIGLIVMFLGTGWVEKLMPPAVTGAIGVSIGLNLAPVAIGQLKGTGAHTSIALLTVLCMAMISAYGPRGTRRLSVLFALLFGYLLVLIAGNGLGIVPGIDFTAVKNAAWFGLPHFTTPAFNWQAVTLIAPVAIVLVAENLGHIKALGSITGRNMDGYIGRGFFSDGLATMISGAGGGTGVTTYAENIGVMAMTKVYSTLIFVIAAIMALILGMSPKFGAILQTIPAPVLAGLAVSVFGLIASAMARIWIVNKVDFADSRNLFTVGVALIFGAGDFTLNIGNFALGGIATSTLAALVLYQLLGIGRSDS

SEQ ID NO: 22235 - protein, 434 aa, Enterococcus faecalis V583
MNTPQQTETPNGKAAVLGLQHLLAMYAGAVAVPLLIGTGLNFDSQQMTYLISIDIFMCGVATLLQLTVNKFFGIGLPVVLGCAIQAVAPLIMIGTNKGVGAIYGSIIASGIFVVLIAGFFSKIKRLFPPLVTGTVITVIGLTLIPVAVEKMGGGLATDKSFGDPKNLLLAFVTIALIIVVQVWGRGFIKSIAVLIGLVGGTILAAFLGLVDLSPVGQATWFHFPQPFYFGKPTFDLSSIVLMIIISIVSMVESTGVYFALGDITGKKIGEDDLRRGYHAEGLAVILGGIFNTFPYTGFSQNVGLVQLSGIKTRRPIYFSAFFLIILGLLPKIGAMAQIIPEPVLGGGMLVMFGMVAVQGMRMLSKVDYSNDKNLLIIAISIGFGLGFNIMPTLFNKVPETVSMFTGNGIVMSSITAIILNLLFNGLKETSESNE

SEQ ID NO: 22236 - protein, 443 aa, Enterococcus faecalis V583
MSEKKQNNLHLTVGPEDSVSFGQATMLGIQHVLAMDVYVVPVIIASIIGISTAQTSSLIQATFIAAGLATIIQSHFCMRLPVAQGPSFIPIGAIAGIYFANNQQGNGWGAVLGASLVGAIVVIILGFTGIFNRLITKFVPPIVGGTIIFVVGLSLMPVALSDNIYHAKGELGQNILLAFIAAGTLIFFALLGSALKKGRIFRVSSVILALLFGSIAAQLLGVLDLSAVSKAAWFSLPQLPLVNFSFQFDWSAIATMLVIYLVLMAETTGTWFAVSHVVAEPLTEEKINRGVIGEGLGCLVSSFIGGTPVTSYSTNAGIISITGVASRKVFVAAGAWFVLFGLSGKLSTLISAIPAPVIGGVFVVVCGIISVSGMKVMSDVTIHEKEMYVIAVPIIMTLALTLLPKEFLETLPQFLQYLFSSPVATASIVAILLQAILPNVQEG

SEQ ID NO: 22237 - protein, 439 aa, Enterococcus faecalis V583
MNEKKEQALFEYDAKLSISEAIPMGLQHVVAAVVGIVTPGIMIAKVCQLSPSDTTILIQTSLIFSAVATLIQLFPIFGKVGSRLPVMMGASFAYVPILMAIGADFGIAAIFGSQLVGSILVIIVGLFIKKIRVLFPPLVTGTVILSIGLSLFPVAIKYMAGGAGSADFGSARNWLVALLTFAIVFYFNYFAKGFLKLSAILNGMVIGYLISLALGMVSFEPVQNAKIVQVITPFHFGLDFQLVPIFTLVVMFIVDAVQAIGQFTATTVGAMDRDATDEELSGGIMGSGFTNFIGSLFGSIPVATFGQNVGLVTVTKVINKYVLVFASVILLIAGFVPKVAALLTTIPYAVIGGATISVFASISMTGIRMIASQEMTPRNTGVVGTALAFGIGVTLSTGSLAGFPTWVTTIFGNSEVILTTLVAVLLNVILKPKKRVALE

SEQ ID NO: 22238 - protein, 394 aa, Bacteroides thetaiotaomicron VPI-5482
MDSNNLTPLRKGVVGVQFLFVAFGATVLVPLLVGLDPSTALFTAGIGTLIFHAVTRGKVPIFLGSSFAFIAPIIKATELYGLAGTLSGMVGVALVYFVMSALVKWQGVRVIERLFPPVVIGPVIILIGLSLAGTGVNMAKENWVLALLSLVTAVVVSMKAKGLLKLIPIFCGIIVGYLAAWLFYDLDLSGVRDAAWIGLPQFVFPKFSWEPILFMIPVAIAPVIEHIGDVYVVNTVTGKDFVKDPGLHRTLLGDGLACCFAGLVGGPPVTTYSEVTGAMSLTKITNPQVIRIAAISAILFSVVGKISALLKSIPSAVLGGIMLLLFGTIACAGIGNLVNNCIDLSRTRNIIIVSLTLTVGIGGAVLTWGDFSLSGIGLAALVGVLLNLILPKDD

SEQ ID NO: 22239 - protein, 440 aa, Bacillus cereus ATCC 14579
MKQHPFKIASLGMQHMLAMYAGAIIVPLIVGGGLGLNQKELTYLVSIDLLMCGVATILQALSNRFFGIGLPVVLGCTFTAVGPMIAIGKQYGVSSIYGAIIAAGLFVVIFAKLFGKLVKLFPPVVTGSVVTVIGVTLVPAAINDMAGGVGSKDFGSLENLALAFGVLLFIIIMYRFFDGFIRSISILLGLLFGTIVAAFMGKVSLQAVGEADWFHGIQPFYFGTPTFELTPIITMILVACVGIVEATGVYFALSDICNKKIGEKELTKGYRAEGLAMVLGGIFNAFPYTTYSQNVGLVQLTGVRNRVIIYTCGGMLIALGFIPKIAAITTIIPKSVLGGAMLAMFGMVMAYGIKMLSSVDFGRQENLLIVACSVGIGLGVTVVPTLFSQLPESIRILTDNGIVLGSASAVLLNIVFNMVPQRKVKVEEEPVSMQSAVREA

SEQ ID NO: 22240 - protein, 448 aa, Bacillus cereus ATCC 14579
MCTGTKSFFLLQRFKLKEDVTMEQKPVLDVNEVPKPGKWLFLSIQHLFAMFGSTVLVPFLTGLNPSVALISSGLGTLAFLLITKGQVPAYLGSSFAFIAPIITAKTAGGPGAAMLGGLLAGLVYILISLGIKKSGSEWIMKLLPPIVVGPVVMVIGLALAHTAVNMAMNGADGKYSFTHFSVALVTLAITIICSIFGRGFFSIIPVLLGIIGGYIFAYFQGLVDLKPVAEAKWFVVPDFTVPFVTYTPEFSWKIVLLMVPVALVTISEHIGHQIVLGNVIKRDLIEKPGLHRSIFGDGVATLIASLIGGPPNTTYGENIGVLAITRAYSVYLFIGSAVFAIMFGFIGKISALIHSIPTPVMGGVSILLFGVIASSGLRMMVDDKTDLSDKRNLMIASVILVIGIGGAVLHVGESFQVEGMALAAIVGVLLNLLLPETKQIKQSKQIAS

SEQ ID NO: 22241 - protein, 428 aa, Bacillus cereus ATCC 14579
MDNQHNQNHIMGTLQWFIFLLANSIALPIVVGGLFHLTTEEIFYLMQRTFFVVGISSFLQGWLGHRLPIADGPAGSWVGVFTVLAYATAGQDQLHSTLQILELGMIISGIILIGLGVTGFIGRILFLFTPLVTGTFLLLLCLQLSGVFLKGMLGITATISQIDGFTAMIAFSIFLFVIILSNFGKGFVKSYAVLIGLISGWIIFLIAGKVTIPSQVTHFVQLPHIFAWGLPKWNTGMAVSSFVMVCILVSNTVAAIIAINQATIHKATIEQKQLKDGTWVGGISHIISSVFSTVGVVPLPATAGFIRLTKQKYIRSFLMACALLVVMSLFPSIIRYLASLPSAVASAVLMASFVQLIGIGFNNIKQVPMSERNVTILGVAVLFGSGVMFLPSGALQSLPSVMQYIFGNGLFVGTVVSILLEQIWRVGK

SEQ ID NO: 22242 - protein, 369 aa, Bacillus cereus ATCC 14579
MKEVDIMKTFLSALQWALFILAGSLIVPISVATSYGLNGAEAIAFVQRTLFVLGFAGLLQAIFGHKLPIQEGPAGLWWGIFSLYASLGVVLFGSSNETLKVLQYAFLLSGIICIILSVFGLIDKLVRYFTPTVIGTYLFLLVAQLSGSFLKGMFGLDGKHTEVQPNVFILSLIVILLSFFIMKLPIIGQYSVLFSIVCGWILFACFGLSNPITPVTDIIRFPSLFVFGMPRVEWNMVITVIFVTLLLLTNMLASIRVVQKVVSKYEENAASDRFKQAGIITGINQLLGGLFSAIGPVAISGSAGFIATTNIYKRLPFILGSSFIIVVSIFPKITSFFAAIPVAVGYAAIYPVFARHDWSRLSRIRNCPG

SEQ ID NO: 22243 - protein, 451 aa, Streptomyces avermitilis MA-4680
MATTASVHPVDEVPPIRQLAAFGLQHVLAMYAGAVAVPLIVGSAMKLSAADLAYLITADLLVCGIATLIQCVGFWRFGVRLPIMQGCTFAAVSPMVLIGTTGGGLPAIYGSVIVAGLAIALLAPVFGKLLRFFPPLVTGTVILIIGVSLLPVAGNWAAGGQGAKGFGEPKNLALAGFVLLVVLGVQRFAPAFLSRIAVLIGIVVGLAVAVPFGFTDFGGVGDADWLGISTPFHFGTPTFHASAIASMLVVALVTMTETTGDLIAVGEMTDRGVEPRMLADGLRADGLSTVLGGVFNTFPYTAYAQNVGLVGMTRVRSRWVVAAAGGMLVLLGLLPKLGAVVAAIPAPVLGGAGLVMFGTVAASGLKTLARVDFKDNDNLTVVAVSVAVGMLPVGVPTIYAQFPDWFQTVMNSGISAGCLTAIVLNLLFNHLPGKAGSPAKAAEPDEASGTA

SEQ ID NO: 22244 - protein, 486 aa, Streptomyces avermitilis MA-4680
MAAQPSPSTDAVPTDQPRHPVDEKLPLLKMTTSGLQHVAAMYAGVVAPPLIVGAAAGLSGTELTFLTGACLFTAGLATFLQTLGFWKIGARLPFVNGVTFAGVAPMTAIVASTKDRSDALPIIFGAVIVAGALGFVAAPFFSKAVRFFPPVVTGTVITLIGVSLLPVAFGWAQGPDPTADSYGSTTYLGLAAATLVIVLLLRRFTHGFVKQIAVLLGLVIGTLLAIPLGVTDFGPVAGADLIGFPTPFHFGAPRFQLAAILSLSVVMVVSMTESTADMLALGEIVGRPADERTIAAGLRADTLGSALSPLFNGFMCSAFAQNIGLVAMTRIRSRYVVATGGGFLVLMGLCPVAASLIAVVPRPVLGGAGVVLFGSVAASGIQTLVRAGLEKDNNVLIVAVSLAVGIIPITAPEFYHAFPQTAKIVLDSGISTGCVAAVVLNLLFNHLGRRQGDDEVTAPMEPGEEIAGQRGGAGSPAAGPSAVTAH

SEQ ID NO: 22245 - protein, 479 aa, Streptomyces avermitilis MA-4680
MDLGVRWKLHGDGRTPAPGAVVRPDERLSWPRTVGLGAQHVVAMFGASFVAPVLMGLDPNLAIMMSGVATVIFLLATRGRVPSYLGCSLSFVGVAAVIRAQGGTSATVTGAVFVVGVALFLVGLAVQRFGARIIHAAMPPIVTGAVVMLIGFNLAPVTASTYWPQDQWTALLVMAFTGLAVVCLRGFWSRIAIFLGLVFGYGISWASDRIFGKIHSVDASGKLTDHWRLDLSGVGKADWIGLPSFHGPSFQWSAILVALPVVIALVAENAGHVKAVGEMTGDPLDDKLGTAISADGVASMLSTAVGGPPNTTYSENIGVMAATRVYSTAAYWAAAGFALLFGLSPKFGAVVAAIPGGVLGGITVILYGMIGLLGAQIWLNARVDLRNPLNLVPAAAGIIIGVGGVSLKFTDNFSLSGIALGTLVVIIGYHGLRAMAPAHLKTQEPLLDSGTSSYDEAEGDKAGVSEAGDDKAEDQRASS

SEQ ID NO: 22246 - protein, 399 aa, Thermotoga maritima
MEFEGAVTKVSGWRWFLLALQHFVAMFGATVLVPLITGLDPLVALLTAGIGTLIFHFVTGGIVPVFLGSSFAFIAPILAVKEIYGDLAYATGGIFVAGLFYVLYALIVKAVGPEKVKKILPPVVTGSMIMVIGLTLSPVAIQMASSDWPLALIVIATVVFVSTMTRGFFSMVPVITGVVVGYVAGLFMGKIDTSVIVSTPLFSVPKVMLPKFDYGAIFMIVPVTLATFMEHLGDITTNGAVVGKNFFDKPGLHRTLLGDGLATAVAGLLGGPANTTYSENTGVLALTRVYDPSVLRGAALVAIFAAFVSKFGAILQTIPQAVMGGVSLILFGMITSVGVRTMVNAEVDFSKPRNLMITALMLTVGIGGAVLKVGRVELKGIGLAALVGIFLNLILPDRD

SEQ ID NO: 22247 - protein, 427 aa, Pyrococcus abyssi
MGPGVLVKVDEKVEPRKAILLGLQHVLAMFGATVTVPLVVGTAVGLSKEEISIMIQAVLLAMGIATLLQTTIGSRYPIVQGSSFAFIPGLISIGKSLGMAATEGALIVGGIIEALIGGTGIVGKVKRLFTPLVTGVTIMLIGFSLADVAVKYFFNFYADPSGSSIPRATIVALVTFITTVYVALKAKGPIRAMPVIAGALVGYLVSVPLGLANFQLVKELPLVSLPRPFPWGIPEFNLTAIVTLLFAFMVSIIESVGDYHAISAIAEAPITNKHINRGIMSEGIACSIAGILGACGTTSYSENIGLVALTKVASRYVVQIGGIILVVLSLFPKFAGILASMPAPVLGGLTIALYGMISVTGLRLIKDKVELNDRNTLILATSLIVGLGAPQLPPKFLAHFPRIVASILESGMAIGAITAIVLDQLLR

SEQ ID NO: 22248 - protein, 468 aa, Ralstonia solanacearum
MASTLAAPPADLTNERVAYARLFALGLQHVLVMYAGTVAVPLIVGSALHLPKEQLAFLINADLFAAGVATLIQSLGVWKFGIRMPVMMGVTFASVGPMIAIGGDPGIGLLGIYGAVIAAGLFGIVIAPLMGRVLGLFPPVVTGTVITLIGVSLMGVGINWAAGGQPTLQAMVDGVLRTVPNPAYGDPGGLAIALSVLVIILLLTKYGRGLIGNIAVLLGVACGTLIAMAAGKVSFAGVADADWMAVITPLHFGMPTFHAGAVASMCVVMLITLVESTGMFLALAEITGKTLTHDDLTRGLRADGLGSVIGGLFNTFPYTSFSQNVGLVTVTGVRSRFVAAAGGVILIALGLFPKMAHVVASVPAFVLGGAGIVMFGMVAATGVRILGSIDFNRHRHNLFIVAIAIGFGMIPTLAPAFFQYLPRWLEPVTHSGIVLGTLVAVILNLYYNGMQPAEHAMRAAAATTHSAE

SEQ ID NO: 22249 - protein, 528 aa, Mesembryanthemum crystallinum
MAALKGGEDFGPFPVKEQLPGVDFCLNSNPPWHEAIALGFQHFLVMLGTTIMIPTILVPQMGGGPEEKALVIQTLLFVSGLNTLLQTMIGCRSSVVIGGSHAFIIPAISIIFSDQYGRIVDPYERFRVTMRAIQGAIMFASMLPVLVGVLGLWRIVVRFLSPLAAIPLVILTGLGLFQFGFPQLAKCVEVGLPALIVLVFISQYFSQLLKPFQVIGRRYAVILIVGLLWAFAAILTAAGAFNHSAPKTQFYCRTDRSGLISAAAWIRVPYPFQWGRPTLNVGNGFAMMAAAFVALVESTGTFITAARYGSATPLPPSVVSRGVSWLGVANFINGLFGAITGATASVENAGLLGLNQVGSRRVAQLSAVFMLFFSVLGKFGALLASIPLPIFAALYCVLFAYAASAGLSFLQFCNLNSFRSKFILGFSLFMGLSIPQYFNEFLLVTGRTPVFTRSVAFNSMLQVIFSSPATVAGIIALFLDLTLHRRHTATRRDSGRHWWKKFRTFDADTRSEEFYSLPWGLNKYFPSL

SEQ ID NO: 22250 - protein, 526 aa, Mesembryanthemum crystallinum
MAALKGGEDFGPFPVKEQLPGVDFCLNSNPPWHEAIALGFQHFLVMLGTTIMIPTILVPQMGGGPEEKALVIQTLLFVSGLNTLLQTMIGCRSSVVIGGSHAFIIPAISIIFSDQYGRIVDPYERFRVTMRAIQGAIMFASMLPVLVGVLGLWRIVVRFLSPLAAIPLVILTGLGLFQFGFPQLAKCVEVGLPALIVLVFISQYFSQLLKPFQVIGRRYAVILIVGLLWAFAAILTAAGAFNHSAPKTQFYCRTDRSGLISAAAWIRVPYPFQWGRPTLNVGNGFAMMAAAFVALVESTGTFITAARYGSATPLPPSVVSRGVSWLGVANFINGLFGAITGATASNAGLLGLNQVGSRRVAQLSAVFMLFFSVLGKFGALLASIPLPIFAALYCVLFAYAASAGLSFLQFCNLNSFRSKFILGFSLFMGLSIPQYFNEFLLVTGRTPVFTRSVAFNSMLQVIFSSPATVAGIIALFLDLTLHRRHTATRRDSGRHWWKKFRTFDADTRSEEFYSLPWGLNKYFPSL

SEQ ID NO: 22251 - protein, 438 aa, Bacillus sp. TB-90
MKKNYGMARIVSLGLQHVLVMYAGAILVPLIVGGALHLSSNELAYLVSIDLLTCGIATLLQSWKNRFFGIGLPVVLGTSFVAVTPIIGIGTQYGMGAIYGSIITAGIFILIFSPFFGKLAKLFPPVVTGSVVTIIGVSLVPAGIKNMAGGEGNPHFGDPENLLLSFGVFIFILLINRFFHGFIRTISVLLGIIAGTIVAAFMGKVDFTNVAQASWFHMPELFYFGAPSFEWGPMITMTLVGIVIIIESTGSFFALSKICEQNMNEQDLVLGYRAEGLSFILGGLFNAFPYSTFAQNVGLVQLTNIKTRNVTIAAASLLVLLGFIPKIAAFTTIIPTPVLGGAMIVMFGMVVSSGIKMLSSVDFGQQSNLLTVACSVALGLGATVVPDLFSKLPQFMRILVGDGIVTGSLTAIILNLFFNLSSKKKPTVSSTLETTIES

SEQ ID NO: 22252 - protein, 532 aa, Arabidopsis thaliana
MAGGGAPAPKADEPQPHPPKDQLPNISYCITSPPPWPEAILLGFQHYLVMLGTTVLIPTALVPQMGGGYEEKAKVIQTILFVAGINTLLQTLFGTRLPAVVGASYTFVPTTISIILSGRFSDTSNPIDRFERIMRATQGALIVASTLQMILGFSGLWRNVVRFLSPISAVPLVGLVGFGLYEFGFPGVAKCIEIGLPELLILVFVSQYLPHVIKSGKNVFDRFAVIFAVVIVWIYAHLLTVGGAYNGAAPTTQTSCRTDRAGIIGAAPWIRVPWPFQWGAPSFDAGEAFAMMMASFVALVESTGAFVAVSRYASATMLPPSILSRGIGWQGVAILISGLFGTGAGSSVSVENAGLLALTRVGSRRVVQIAAGFMIFFSILGKFGAVFASIPAPIIAALYCLFFAYVGAGGLSFLQFCNLNSFRTKFILGFSVFLGLSIPQYFNEYTAIKGYGPVHTGARWFNDMVNVPFSSEPFVAGSVAFFLDNTLHKKDSSIRKDRGKHWWDKFRSFKGDTRSEEFYSLPFNLNKYFPSV

SEQ ID NO: 22253 - protein, 494 aa, Sinorhizobium meliloti
MNDASSIHPVDERLPIGRLATLGIQHVLVMYGGAVAVPLIVGRALQLSPEDVAFLISADLFVCGIVTIIQSLGLTRGIGIRLPVMMGVTFAAVGPMVSMAAMTPGIDGARTIFGAIIGAGLVALLIAPIMGRLLKFFPPVVTGTIILVIGVTLMRVGVNWIFGNPFGPTAPKLVDPAHAQWLAGLKQLAATGGPAVPDGLVLGATVPNPIYAEPGHVALAAFVLVSILVVARFGKGLISNIAVLIGIVIGCVAAALLGMMHFDRVASAGWFAVVTPLRFGMPIFDPVLIATMSLVMIVVMIESTGMFLALGEMTNREVKQQQLTAGLRVDGLGTIIGGLFNTFPYTSFSQNVGLVGVTGVKSRYVCVMGGVIMILLGVIPKMGALVEAVPTFVLGGAGLVMFGMVAATGVRILSTVDFKSSRNNLFVVAVSVGFGLIPMIAPNFLMWMPHAIHPIIESGIVLAAVSAVVLNAFFNGLSIERSACVEAARLADGH

SEQ ID NO: 22254 - protein, 449 aa, Sinorhizobium meliloti
MTGNKIDSIDPTDEVLPPRSLVLFGLQHVLVMAASPITAVFLVSKALGFSDALTVSLISATFLICGLGTILQSFGPAGFGARLPFIMVPGGAPIAIFLAIAQQTDVQTAVGAVILTAGFYFLALPVFRRLLRYFPPIVVGTMLLLVSVNLVRIYGGTITGKQGSEGFADPMNVGLALATIALTVIFARVFTGTLQRISVMFGLIAGSAIAIGAGYMDLSGIFDGPVIAMPQLLPFGMPKFDFFAALPLIVFSIISMAEATGQTIATAEIVGRRGDAHAIVPATIRGDAVASLVGGLFGTSLIITSGENVGIVRATNVKSRYVTATAGVILVLIALFAPVGRLASALPGPVVGGTAVIVFSIIGVIGIDLLRRVDLREHGPMFTLAAALSMGLLPILVPGVYSQFPPWSQMILANGLAAGTITAVIVNAFFQHLPLEQFQEKCAAVFRPE

SEQ ID NO: 22255 - protein, 463 aa, Sinorhizobium meliloti
MNTDSKCDAIEAMFPAPKLAALGLQHVLVMYAGAIAVPLIIGSALNLSKDQIAMLISADLFCCGIVTLIQCLGVWNVGARLPIMMGIGFTAVPPIIATGTDPDLGMPGVLGAVIASGVFTLLAAPYFSRWVRFFPAVVTGTVMLVIGLSLMRVGVNWAAGGQPMIKGPDGLIPNPAYGEPFALAVAAIVLVSILLMTRFLKGFLANLAVLFGIGIGFAIAVAFGKVDFQGVADASWVTVVTPFAFGMPIFDLWATVALCTVMIVMMIEATGQILAVGDMAGRTISEADLARGLRTDGLGNIIGGIFNTFTYTTYAQNVGLLQITGVMSRWAVAAGGVVLILLGCLPKIAFITASIPSYVVGGAAIVMFGMVSATGVKILARVNFVDNRRNLYIVAVSVGLAMIPVVADKIFAQLPEFIDRFFHSGVLVGTFSAVLLNLLFNGVPPREEVQPDLLGEGAMRHPG

SEQ ID NO: 22256 - protein, 490 aa, Sinorhizobium meliloti
MANSAEETVSPTRPEDEKLGIGANLAYGLQHVLTMYGGIVAVPLILGQAAGLGSGDIGLLITASLFAGGLATILQTMGLPFFGSQLPLVQGVSFSGVATMIAISGNGGLQSVLGAVIAASLIGLLITPIFSRITRFFPPLVTGIVITTIGLTLMPVAARWAMGGNSSAPDFGSPANIQLAAVTLVIVLLLSKLGSAAISRLSILLALIIGTVIAYFAGMADFSQVTEGPFFALPLVFHFGYPTFEVAAIASMFIVIMVTLVETSADILAVGEIIETKVDSRRLGDGLRADMLSSLLAPIFGSFTQSAFAQNVGLVAVTGVKSRYVVATGGLFLVTLGLLPVMGRIVAAVPSSVLGGAGIVLFGTVAASGIRTLSKVDYANNMNLVIVATSIGFGMIPIASPTFYEHFPAWVETIFHSGISSAALMAISLNLIFNHMTAGNSDQQSVFVAGTERTLRYQDIARLHDGDYFLNGKLYDANGTEVPVLAAEAH

SEQ ID NO: 22257 - protein, 529 aa, Oryza sativa (japonica cultivar-group)
MAAPAPKQEELQPHAVKDQLPAISYCLTSPPPWPEAILLGFQHYLVMLGTTVIIPTALVPQMGGGNEEKARVIQTLLFVAGINTLIQSFLGTRLPAVIGGSYTFVAPTISIILAGRYNGIADPHEKFVRIMRGTQGALIVASTLQIIMGFSGLWRIVVRLLSPLSAAPLVALVGFGLYELGFPSVAKCVEIGLPQIILLVALSQYIPKLVPLLGTAFERFAIIMSVALVWLYAFFLTVGGAYKNAAPKTQFHCRTDRSGLVGGAPWISVPYPFQWGAPTFDAGEAFAMMAASFVALVESTGAFIAVSRYASATPCPPSVMSRGIGWQGVGILLGGLFGTANGSSVSVENAGLLGLTRVGSRRVVQISAGFMIFFSILGKFGAVFASIPGPIIAAIYCLLFAYVGMAGVGFLQFCNLNSFRTKFIVGFSVFMGLSVPQYFNEYTSVAGYGPVHTHARWFNDMINVVFSSKAFVGGAVAYLLDNTLQRHDSTARKDRGHHFWDRFRSFRTDPRSEEFYSLPFNLNKFFPSF

SEQ ID NO: 22258 - protein, 489 aa, Lycopersicon esculentum
MKERMERQKGVNPKIEPFVPKKGYDPRELKSWAKRTGFVSTTFSGETERGGGHSRRDFDNGRDLNVSSNENVGFDLERGVNKTETVSPKIELDPILGRARNRGVEIEPISGSNNEGLRNGRGRGRGKGENLGRRTEMEPILRGHNEERKDARNENGNDGDSANGAVNGNGNGHIAQPATPVTEVPRKDDGNVDEEVGMGIYPNGEDPSYGGWHQSPRMKCGLRENPGVDPPGMHYCWRIQHAPANIFEGSEQHRSSNNVPSENTRVPLMFYGLQHYLSLAGSLIFIPLITVPTMGGSDKDTADVVSTVLLLSGLTTILHSYFGTRLPLVQGSSFVYLAPALVIMNSEEYRNLADHYLGGISIFGYRVFRIYALLRKLSSHVHLFSNEQKELLQVPVSVMIIWAYAFFLTAGGAYNFKGCSPDIPNSNILIDACQKHANTMRHCRTDVSNAMRTAAWVRIPYPFQWGIPTFRLRTSIIMVIVSLVASIDS

SEQ ID NO: 22259 - protein, 505 aa, Dictyostelium discoideum
MILDYFPKYKLKNTSDIPIMPDERIPIIPSFFLSFQHILAMFGGNILCPLLMGFSTNSALFFSGVGTLIFYVCTGGKVPSYLGSSFAFIGVVNSATGYIYSPGTTNPNISPAAGGIVVCGFIYLAIGLLVMVAGHAWIEFLTPPVVTGSVIVSIGLHLANSAVGQAATTGFDAWMAALTILLVVMITCYAPGPLKRLPILIGGVVSYVVYLLCGLGGVGPGIDFSVVSDAKWIGLPQTHLPSFDSTYISMIAPVAVILAAENIGHLKAVSSMTEYSMDNLLGRTFIGDALACILAGFFGSSGTTTYAENIGVMSITKIFSTLSFVFAACIAIVLGCLPIFGAIVQTIPPGIFGGLSIVLFGITAITGAKLWINSQVDFSKPRNLLTAGISIVLGTGMISVNVEWGKIKIDAIGVSTFVSIILYQLLRENWGTIFRNILAKITGRSFKQSDDCEETIENPQYSNLLKPLIENQGINSSDYNEFNNEDNENNNYEPFKDNDEEIIQN

SEQ ID NO: 22260 - protein, 544 aa, Oryza sativa
SRSWGRRRRMAAAPPPKADELQPHPPKEQLASVSFCITSPPPWPEAIILGFQHFIVMLGTTVIIPSALVPQMGGGNDEKARVIQTLLFVAGINTLFQTFFGSRLPVVMGGSYTFVAPTISIILAGRYNNEADPREVVPIKKFLRTMRGTQGALVIASTIQMILGFSGLWRNVVRLLSPLSAVPLISLVGFGLYSLGFPGVAKCVEIGLPELILLVAFSQYLPQVLHFGKPIFGRFGVLFTVSIVWLYAYILTISGAYKNAPPKTQVHCRVDRSGLISGAPWIRVPYPFQWGAPTFDAGEAFAMMMTSFIALVETTGAFIAASRYASATMIPPSIISRGIGWQGISILIDSFFGTANGTSVSVENVGLLALTHVGSRRVVQISAGFMIFFAILGKFGALFASIPLPIFAGMYCIFFAYVGACGLSFLQFCNLNSFRTKFILGFAFFMGISVPQYFNEYTAVAGYGPVHTGARWFNDMINVPFSSKPFVAGLVAYFLDNTIETHNNTVRKDRGYHWWDKFRSFKKDARSEEFYSLPFNLNKFFPAV

SEQ ID NO: 22261 - protein, 446 aa, Triticum aestivum
  unsure (1)..(446): unsure at all Xaa locations
XVRFGTRLPAVIGGSYTFVLPTISIILAGRYTNEPDPHTKFLKIMRGTQGALIVASALQIIVGFSGLWRNVARYLSPLSAAPLIALVGFGLYELGFPSVAKCVEIGLPELILLVIFAMYLPHTIHMMKSIFDRFAVLFTIPIVWLYAYLLTVGGAYRNVSPKTQFHCRTDRSGLIGGAPXWIRVPYPFQWGAPTFDAGEAFAMMAASFVALVEATGSFIAGSRFASATPLPPSVLSRGVGWQGVGGRLGGLFGTGNGSSVSIENAGLLALTRVGSRRVVQISAGFMIFFSILGKFGAVFASIPAPIFAALYCVFFAYVGSAGLGFLQFCNLNSFRTKFILGFSVFMGFSVPQYFNEYTSVAGFGPVHTRARWFNDMVNVLFSSKAFVGGIVAYVLDNTLHRHDGAVRKDRGYHWWDKFXRSYRTDTRSEXEFYSLPFNLNKFFPSV

SEQ ID NO: 22262 - protein, 437 aa, Bordetella pertussis
MSNTYFPRWRLADDTVPGAVIAPDERLSWPKNIAMGAQHVVAMFGSTVLAPLLMGFDPNVAILMSGIGTLIFFLFVGGRVPSYLGSSFAFIGGVVAVTGYVAPGANANIGVALGAIIACGLVYALIGLVVWAASARGNGARWIEAMMPPVVTGAVVAVIGLNLAPIAAKGAMGSSGFEASMALMTILCVGGIAVYTRGMVQRLLILVGLVLACVIYAVCANGLGLGAPMDFAKVAAAPWFGLPSFAAPVFEPQAMGLIVPVAIILVAENLGHVKAVAAMTGQDLDRYVGRAFVGDGVATMVSGAVGGTGVTTYAENIGVMAVTRIYSTLVFVVAAVIALVLGFSPKFGALIQTIPGPVLGGMSVVVFGLIAIAGARIWVVNQVDFSDNRNLIVAAVTLVLGAGDFSVKLGDFSMNGIGTATFGAIILYALLGLARRR

SEQ ID NO: 22263 - protein, 482 aa, Escherichia coli
MSAIDSQLPSSSGQDRPTDEVDRILSPGKLIILGLQHVLVMYAGAVAVPLMIGDRLGLSKEAIAMLISSDLFCCGIVTLLQCIGIGRFMGIRLPVIMSVTFAAVTPMIAIGMNPDIGLLGIFGATIAAGFITTLLAPLIGRLMPLFPPLVTGVVITSIGLSIIQVGIDWAAGGKGNPQYGNPVYLGISFAVLIFILLITRYAKGFMSNVAVLLGIVFGFLLSWMMNEVNLSGLHDASWFAIVTPMSFGMPIFDPVSILTMTAVLIIVFIESMGMFLALGEIVGRKLSSHDIIRGLRVDGVGTMIGGTFNSFPHTSFSQNVGLVSVTRVHSRWVCISSGIILILFGMVPKMAVLVASIPQFVLGGAGLVMFGMVLATGIRILSRCNYTTNRYNLYIVAISLGVGMTPTLSHDFFSKLPAVLQPLLHSGIMLATLSAVVLNVFFNGYQHHADLVKESVSDKDLKVRTVRMWLLMRKLKKNEHGE

SEQ ID NO: 22264 - protein, 442 aa, Escherichia coli
MAMFGFPHWQLKSTSTESGVVAPDERLPFAQTAVMGVQHAVAMFGATVLMPILMGLDPNLSILMSGIGTLLFFFITGGRVPSYLGSSAAFVGVVIAATGFNGQGINPNISIALGGIIACGLVYTVIGLVVMKIGTRWIERLMPPVVTGAVVMAIGLNLAPIAVKSVSASAFDSWMAVMTVLCIGLVAVFTRGMIQRLLILVGLIVACLLYGVMTNVLGLGKAVDFTLVSHAAWFGLPHFSTPAFNGQAMMLIAPVAVILVAENLGHLKAVAGMTGRNMDPYMGRAFVGDGLATMLSGSVGGSGVTTYAENIGVMAVTKVYSTLVFVAAAVIAMLLGFSPKFGALIHTIPAAVIGGASIVVFGLIAVAGARIWVQNRVDLSQNGNLIMVAVTLVLGAGDFALTLGGFTLGGIGTATFGAILLNALLSRKLVDVPPPEVVHQEP

SEQ ID NO: 22265 - protein, 555 aa, Caenorhabditis elegans
MSGLHFHVNEIPSPPSIMLFGLQQMMICLSSLLVIPYVVSDMLCAGDQAMEIRVQLISATFVTSGIATILQTTFGMRLSILHGPSFAFLPALHTFQATFPCDANTDTSNWQEKMQMISGSCLIAVLIMPILGFTGLVGKISKYIGPVTIVPIMSLLTIGTVPDIESKMALHWISIVEFLTLILFVVILERYEVPIPIFSLSEKKFKFTRQKIFSQFPYLLGISIVWFICFIMTITNAEPRGGEARTDQNASITVFDQTPWVQMPMPLFFGPPKFNLALVCGFTASCFAAMIESIGDYNLCAKISKQSRPPPSNTNRAFVVEGIGCILAALWGVGTGVTTYAENIAIMSVTKVTSRITMQMAGVFLILAGVISKFAAFLSMIPEPIIGGLLAMGVCLINGVSLSNLQTVDMKLSRNLTIIGVSIIMGLTVATHFEKTPLNTGNQIVDDVFGTLLTIRMLIGGVIAFVLDNITGGATRRQRGFVSEIDEDDDVEEQATVEMNGYALPSKLNQFFLRYSWLTYLPVIPSEREIREIEEKLCNFKFIKNSESIESVKKV

SEQ ID NO: 22266 - protein, 546 aa, Caenorhabditis elegans
MREEKEDELVHHVNDIPSIPTILLIGFQQMMICISMLLVIPYMMSDMVCPGDKETEIRVQLISASFVTAGIATILQTTFGMRLAILHGPSFAYLPVLNTFQSTYPCNEHTDTSLWQHKMQMISGSCLVAVLVMPLFGFTGLIGFLSQFIGPITIVPIMTLLTISAVSDVEQKMALHWMSSVEFLMLVVFIVLLEHWEMPLPAYSLKRRHFYIARRKILSQFPYIIGIAIGWLICYILTVTNAIPANSPARTDQNSTMEILKSTPWVHVPIPGQYGTPIIDISLLCGFIASSFVAMIESIGDYNLCAKLSKQGRIPTSNLNRGFIVEGIGCMLSSSFGIGTGITTYAENIAIMSVTKVASRITMQTAGIFLLIAGIFSKFAAVLAMIPEPVVGGVLAIGICMVNGVVLRNLMTVDLRLSRNLTIMGIAVIMGLTVALHFENNPLKTGNQTVDNVFGTLLTIRMLIGGIIAFTLDNIAPGATREQRGFRKADDDGEDDIPVENNGFALPSFMNRFFLKYRWLTYIPLIPSREEILDIEEKRTEVKYKL

SEQ ID NO: 22267 - protein, 555 aa, Caenorhabditis elegans
MDYPEKRVEIREKKTAQRPFLKARDTPPIGIALLYGLQQVMVCVSALLTVPLIMADSMCPGSSIAVLRQTLISSTFVSSGISTIIQTLFGMRLALLQGTAFAYVPSVQGFMSLPENTCNATESDYVPEEVYYGKLALLQGCLIASSFVPILIGATGLVGMLTKFIGPLTVSPLMLLLAFSQVDLMVTHISKHWVAIVQAVTLFATILYLAEVKVPVPGIKNGKFHWYRINLFGQYPYLIAICTSWIFCVALTIFNLTPEGSAARVDKNISLAVIRESSWLEVPYPGKFGPPQFNTGLFLLFLLSAMTSVFESVGDYHAAARVSEERPPPSHAINRGILAEGLGSLISGLLGPGVGMTTHTENIGVIGVTRVASRWTMVMAGVFLIILGLITKIGALLSTIPDPLVGGVLASSMAMVVGVAVSNLQTVDMTLSRNMGIFGFSMMFGLIVPKYFKLFPVDTDWGWFNQILNVLLQMPMFVGALCACILDNSIGGATREQRGLRARGEIYAGGIDECTYSYPKWVMNILNRIPGVQYIPCMPKEKKGTNRVGGEEIRL

SEQ ID NO: 22268 - protein, 540 aa, Caenorhabditis elegans
MSKNSGDLHFHVNDVPHKSAIFFFGLQQMLVCISALLVTPYFVSNLLCAGAETTEVRVQLIAATFISSGIATILQTTLAILHGPSFAFFPALHTFGDVYPCNSDTDTTQWKEKLQMISGSLFVAVLIMPFLGITGMVGRIAKHIGPITIVPMLMLLCIGTVQDIEQKVSHHWISIVEILLLIIFVVLLEEFEVPMPAFSMEKKAFYTAKMKIFSQFPYLLGIMIAWFVCWILTITDLEPYGCSARTDRNESLFVLENTPWIQIQYPLQYGLPKLSAPLIIAFSASMLAATIESIGNYGICARICQQGSPPSSSMNRAFVVEGFGSMLAALMGVGTGVTTYSENIAIMQVTKVTSRITMQCAGVILILMGIFSKFAAFLAMIPEAIIGGVLTAGMSMICGVAFSNLQSVDLRLSRNLTIIGLSIILGCTIPAHFEKSPLHSGNKTIDDIFGTLLKMRMLVGGLIAFCLDIIASGATRKQRGFEDKLEKIEISVEKNGFALSSFANQTILKIPSLTKLPIVPSEKSIRRIEELRMKVIDHKI

SEQ ID NO: 22269 - protein, 1100 aa, Caenorhabditis elegans
MAEPLHLGVNDVPSIKGILGFGFQQAMLCMSGLLVYPFLISNCACAGAAAVQLRVQLISATFVSCGIATIFQTTFGLRLSVLHGPAMAFLPPLFAYKTQNLCPYTEHDEVPPEFWMERMREIQGSLLLACFVFILVGMTGIAGHLSKLIGPITIVPLMLLLTTSIVPTIEEKLSLHWISMVMLLVVVMMAVYLENTRVPFYYYNTEKKQIVSTKVRLFGQFPYLLSMLFVWFICFIMTITDLEPYNGAARTDNNVTMMVLRESPWFQVPLPFPFGIPKISAGIFFGYIASVLASIIENIGSYDLLARTSQQKPPPKDAINRAIAMEGGEFQFIISENFYNKNFLLFRKIMIINFFLHFCVGSLIAAVTGVSSGVTTYAENIALIHITKVASRATMQFAGFILIMLGLFSKFAAILASIPDALVGGLLTMGISMIGGVAMSNLQVSRRKLNSDFEALFLNMENWQLYFVRSVFNLKMIDLNLCRNLSIMGLSLLLGLIVPLHFEKHPVNTGHFEIDHILNMLLNIKMLVGGVVATFLDNTVPGATRAQRGFREHHRVPSESDVSTSNSSETSGASFEVLPSSDAYTFPEVFQRLLRAFPVLQLLPILPKLSKSQFKTNRTFSLERACIRRQLVFFRKQFLQNRIFLLNLQFRNISESERTPAKKSRRSATHTPKTPKSDKKPANKHEKDEKSNQKKKRISKMLNSKKKKRLSAQRHRTRRTRDIRQKVARTLERALVEAPKIPLIHHLFTSTDSMGTPRASLKQVLKQLRISDFVKDTHILRDSHMKTLSQFTTLFTIEEDEPFQGLFVKYRPIYDREAATVYVDNLPEGCSEEKLLRLCSCYGTVVEVRISKKGGRWIRPKQNFKKRTSGVSTNRQAHRTPPKKKPLINVGSRPKAFGFVRFVDSDSAAAMVRDFIVNDPSIKYQKHEKRKKEAELVRRQEENEEEEIPDILSPGEIDDLEPPVVPQEFPPRLRPFVELYMTKNLHSPRRLLSHHAQLVVLLLQLHLKTKPLRLPKVYKIQFHTTSILSDHETRGRKSRKKKNRRRKNRQQKRRKVLRNQNLSRRRRIGGGRGRKCAENLPSTFQEARFEDFSRRFKFFR

SEQ ID NO: 22270 - protein, 485 aa, Caenorhabditis elegans
MTRKSRETSDLYYYVNDIPNISAIFFYGFQQMLVCISALLITPYLVSNLLCAGVETTAISGSLFAAVLIMPFLGLTGMVGRMAKHIGPITIVPMLILLCIGVIPDIEHKVSLHWISIIEILILIAFVVLLEEYEVPIPAFSMEQKKFNTMKIKLFSQFPYLLGIMIAWFACWILTISDLEPYGSSARTDRNDSLFVLENTPWIQIQYPLQFGFPRLSAPLVIAFTASMLAAMIESIGSYGICARICQQGSPPSSSMNRAFVVEGFGSMLAALMGVGTGVTTYSENIAIMQVTKVTSRITMQCAGVILILMGIFSKFAAFLAMIPEAIIGGVLTAGMSMICGVAFSNLQSVDLRLSRNLTIIGLSIILGCTIPAHFEKSPLHSGNKTIDDIFGTLLKMRMLVGGLIAFCLDIIASGATRKQRGFEDKLEKIEISVEKNGFALSSFANQTILKIPSLTKLPIVPSEKSIRRIEELRMKVIDHKIVSQ

SEQ ID NO: 22271 - protein, 414 aa, Haemophilus influenzae Rd
MTNQIPPSLAENQSKLKQSFVGLQMLFVAFGALVLVPLITGLDSNTALLTAGVGTLLFQFCTGKQVPIFLASSFAFIAPIQYGVQTWGIATTMGGLAFTGLVYFALSTLVKLRGAEALQRFFPPVVVGPVIIIIGMGLAPIAVDMSLGKNSAYAYNDAVLVSMVTLLTTLSVAVFAKGLMKLIPIMFGITAGYILCLFLGLINFQPVIDAPWFSLPKLTTPEFNLEAILYMLPIAIAPAVEHVGGIMAISSVTGKDFLKKPGLHRTLLGDGIATAAASLVGGPPNTTYAEVTGAVMLTRNFNPNIMTWAAVWAIAISFCGKVGAFLSTIPTIVMGGIMMLVFGSIAVVGMSTLIRGKVDVTEARNLCIISVVMTFGIGNMFVDVGNVSLKGISLCAIVAIILNLVLPKAKNEVE

SEQ ID NO: 22272 - protein, 570 aa, Anopheles gambiae
MDTERQCAPEQPTESKPEGKARGADINYGIDDNPPWYLCIMMALQHYLTMIGAIVSIPFILTPALCMRDEDPARGTIISTMIFVTGLITYLQATWGCRLPLVQGGTISFLVPTLAILNLPQWKCPPDDAINAMTDTDRTELWQVRMRELSGAIAVAAVTQLVLGFSGLVGKLLRIITPLTIVPTVALVGITLFQHASETASKQWGIAVGTTAMLTLFSQVMGEVPFPGIAYRKGHGLRVVWFPLFKLFPVLLTIAIMWTVCGVLTATGVFPEGHPARTDVRLRVLQDAEWFRVPYPGQFGLPTVSLAGVLGMLAGVLACTVESISYYPTIAQMCAAPPPPLHAINRGIGIEGLGTMLAGLWGSGNGTNTFGENVGAIGVTKVGSRRVIQWAALIMVLQGVLNKFGAAFIMIPDPVVGGIFCVMFGMITAFGLAALQYVDLRSSRNLYILGVSFFFPLVLCLWLQEHPGAIQTGNQTVDSTLSVLLGMTILVGGVLGCVLDNLIPGTPEERGLVAWSKEMALETVQANDDLPAGGLAWEKSTFDFPYGVQLMRRWKWTRYVPFLPTYRMKL

SEQ ID NO: 22273 - protein, 573 aa, Drosophila melanogaster
MELNNVTIEDATDASKSYSQAANTPPSNEKPKPQLLYAINDNPPWYLSIFLAFQHYLTMIGAIVSIPFILTPALCMSDEDANRGIIISTMIFVTGIVTYFQATWGVRLPIVQGGTISFLVPTLAILALPQWKCPEQAVMDAMDEAEREELWQVRMRELSGAIAVSAMVQVILGYTGLVGKILKYVTPLTIVPTVSLVGLTLFEHAAETASKHWGIAVGTTGMLTLFSQIMSNVPVPILAYRKGHGLEIRQFQLFRLFPVLLTIMIMWGLCGILTATDVFPPSHPSRTDVRLNVLTSAKWFYVPYPGQFGWPSVTLSGVLGMLAGVLACTVESLSYYPTVSQMSGAHSPPLHAINRGIGTEGFGTVLAGLWGAGNGTNTFGENVGAIGVTKIGSRRVIQWAALIMVLQGVIGKFGAIFILIPDSVVGGIFCVMFGMIIAFGLSTLQYVDLRSARNLYILGLSIFFPMVLCRWMQKNPGAIDTGNKTVDSTLSVLLGTTILVGGVLGCLLDNIIPGTPEERGLIDWANEMPLGDDNVNDGTATDYDFPLGMDAIRRWKWTYYIPFMPTYKLQKQS

SEQ ID NO: 22274 - protein, 417 aa, Pasteurella multocida
MTNQNPPVLLEQNHAKQAFVGLQMLFVAFGALVLVPLITGLNANTALLTAGIGTLLFQLCTGRQVPIFLASSFAFIAPIQYGVTTWGIATTMGGLVFTGLVYFALSTLVKIKGAGALQKVFPPVVVGPVIIIIGMGLAPVAVDMALGKNSTYQYNDAVFVSMATLLTTLGVAVFAKGMMKLIPIMFGIVVGYILCLFLGLINFQPVIDAPWFSVPEITTPEFKLEAILYLLPIAIAPAVEHVGGIMAISSVTGKDFLQKPGLHRTLLGDGIATSAASFLGGPPNTTYAEVTGAVMLTRNFNPKIMTWAAVWAIAISFCGKVGAFLSTIPTIVMGGIMMLVFGSIAVVGMSTLIRGKVDVTEARNLCIISVVMTFGIGGMFVNFGEVSLKGISLCAVVAILLNLILPKAKNTPIEENR

SEQ ID NO: 22275 - protein, 505 aa, Escherichia coli K12
MCLDSFINVNGCFLLWRAKGETLMSAIDSQLPSSSGQDRPTDEVDRILSPGKLIILGLQHVLVMYAGAVAVPLMIGDRLGLSKEAIAMLISSDLFCCGIVTLLQCIGIGRFMGIRLPVIMSVTFAAVTPMIAIGMNPDIGLLGIFGATIAAGFITTLLAPLIGRLMPLFPPLVTGVVITSIGLSIIQVGIDWAAGGKGNPQYGNPVYLGISFAVLIFILLITRYAKGFMSNVAVLLGIVFGFLLSWMMNEVNLSGLHDASWFAIVTPMSFGMPIFDPVSILTMTAVLIIVFIESMGMFLALGEIVGRKLSSHDIIRGLRVDGVGTMIGGTFNSFPHTSFSQNVGLVSVTRVHSRWVCISSGIILILFGMVPKMAVLVASIPQFVLGGAGLVMFGMVLATGIRILSRCNYTTNRYNLYIVAISLGVGMTPTLSHDFFSKLPAVLQPLLHSGIMLATLSAVVLNVFFNGYQHHADLVKESVSDKDLKVRTVRMWLLMRKLKKNEHGE

SEQ ID NO: 22276 - protein, 464 aa, Escherichia coli K12
MVRSQLSRADAPCLLTSLRRQLMAMFGFPHWQLKSTSTESGVVAPDERLPFAQTAVMGVQHAVAMFGATVLMPILMGLDPNLSILMSGIGTLLFFFITGGRVPSYLGSSAAFVGVVIAATGFNGQGINPNISIALGGIIACGLVYTVIGLVVMKIGTRWIERLMPPVVTGAVVMAIGLNLAPIAVKSVSASAFDSWMAVMTVLCIGLVAVFTRGMIQRLLILVGLIVACLLYGVMTNVLGLGKAVDFTLVSHAAWFGLPHFSTPAFNGQAMMLIAPVAVILVAENLGHLKAVAGMTGRNMDPYMGRAFVGDGLATMLSGSVGGSGVTTYAENIGVMAVTKVYSTLVFVAAAVIAMLLGFSPKFGALIHTIPAAVIGGASIVVFGLIAVAGARIWVQNRVDLSQNGNLIMVAVTLVLGAGDFALTLGGFTLGGIGTATFGAILLNALLSRKLVDVPPPEVVHQEP

SEQ ID NO: 22277 - protein, 505 aa, Escherichia coli O157:H7
MCLDSFINVNGCFLLWRAKGETLMSAIDSQLPSSSGQDRPTDEVDRILSPGKLIILGLQHVLVMYAGAVAVPLMIGDRLGLSKEAIAMLISSDLFCCGIVTLLQCIGIGRFMGIRLPVIMSVTFAAVTPMIAIGMNPDIGLLGIFGATIAAGFITTLLAQLIGRLMPLFPPLVTGVVITSIGLSIIQVGIDWAAGGKGNPQYGNPVYLGISFAVLIFILLITRYAKGFMSNVAVLLGIVFGFLLSWMMNEVNLSGLHDASWFAIVTPMSFGMPIFDPVSILTMTAVLIIVFIESMGMFLALGEIVGRKLSSHDIIRGLRVDGVGTMIGGTFNSFPHTSFSQNVGLVSVTRVHSRWVCISSGIILILFGMVPKMAVLVASIPQFVLGGAGLVMFGMVLATGIRILSRCNYTTNRYNLYIVAISLGVGMTPTLSHDFFSKLPAVLQPLLHSGIMLATLSAVVLNVFFNGYQHHADLVKESVSDKDLKVRTVRMWLLMRKLKKNEHGE

SEQ ID NO: 22278 - protein, 442 aa, Escherichia coli O157:H7
MAMFGLPHWQLKSTSTESGVVAPDERLPFAQTAVMGVQHAVAMFGATVLMPILMGLDPNLSILMSGIGTLLFFFITGGRVPSYLGSSAAFVGVVIAATGFNGQGINPNISIALGGIIACGLVYTVIGLVVMKIGTRWIERLMPPVVTGAVVMAIGLNLAPIAVKSVSASGFDSWMAVMTVLCIGLVAVFTRGMIQRLLILVGLIVACLLYGVMTNVLGLGKAVDFTLVSHAAWFGLPHFSTPAFNGQAMMLIAPVAVILVAENLGHLKAVAGMTGRNMDPYMGRAFVGDGLATMLSGSVGSSGVTTYAENIGVMAVTKVYSTLVFVAAAVIAMLLGFSPKFGALIHTIPAAVIGGASIVVFGLIAVAGARIWVQNRVDLSQNGNLIMVAVTLVLGAGDFALTLGGFTLGGIGTATFGAILLNALLSRRLVDVPPPEVVHQEP

SEQ ID NO: 22279 - protein, 444 aa, Bacillus halodurans
MAKQQRDIGIREVPLPHKWLILSLQHLCAMFGATILVPLLVDLSPAVALISSGLGTLAYLLITKGQVPAYLGSSFAFITPIIAVTAFGGPEAAMVGSFFVGLVYGVAALLIKVVGRKWLMTVLPPIVVGPVIMVIGLGLAGVAIDMAMMETIEQGVQVFNGTFMLVAMITLLITIVAAVFFKGFFGLVPMMFGIAGGYVTALFVGLIDFQAVYEAKWLVAPDFIVPFVTYTPTVEWTVLAIMVPIAAVTLAEHIGDQMVLSKVAGKNFLEKPGLHRSLAGDGVATMIASFLGGPPNTTYGENIGVIAITRVFSVFVIGGAALLAIVFGFSGKISALISTIPQAVMGGVSILLFGVIASSGLRMLIDNEIQLGEKRNLIISSVILVIGIGGAFVPINENVQIPGMALATIIGIVLHLVLPNKEVSYGTKSMFENEKTERKKEQAA

SEQ ID NO: 22280 - protein, 429 aa, Salmonella enterica subsp. enterica serovar Typhi
MTRRAIGVSERPPLLQTIPLSLQHLFAMFGATVLVPVLFHINPATVLLFNGIGTLLYLFICKGKIPAYLGSSFAFISPVLLLLPLGYEVALGGFIMCGVLFCLVSFIVKKAGTGWLDVMFPPAAMGAIVAVIGLELAGVAAGMAGLLPAQGQSPDTKTIIISMVTLAVTVFGSVLFRGFLAIIPILIGVLAGYALSFALGVVDTTPIAQAHWFALPTFYTPRFEWFAILTILPAALVVIAEHVGHLVVTANIVKKDLVRDPGLHRSMFANGLSTIISGFFGSTPNTTYGENIGVMAITRVYSTWVIGGAAIFAILLSCVGKLAAAIQIIPLPVMGGVSLLLYGVIGASGIRVLIESKVDYNKAQNLILTSVILIIGVSGAKVHIGAAELKGMALATIVGIGLSLIFKLISLLRPEEVVLEANDAESPHQ

SEQ ID NO: 22281 - protein, 676 aa, Homo sapiens
SWAPSLNKPSLPAALPNGCVNYSFLLMMGIGKNTTSKSMEAGSSTEGKYEDEAKHPAFFTLPVVINGGATSSGEQDNEDTELMAIYTTENGIAEKSSLAETLDSTGSLDPQRSDMIYTIEDVPPWYLCIFLGLQHYLTCFSGTIAVPFLLADAMCVGYDQWATSQLIGTIFFCVGITTLLQTTFGCRLPLFQASAFAFLAPARAILSLDKWKCNTTDVSVANGTAELLHTEHIWYPRIREIQGAIIMSSLIEVVIGLLGLPGALLKYIGPLTITPTVALIGLSGFQAAGERAGKHWGIAMLTIFLVLLFSQYARNVKFPLPIYKSKKGWTAYKLQLFKMFPIILAILVSWLLCFIFTVTDVFPPDSTKYGFYARTDARQGVLLVAPWFKVPYPFQWGLPTVSAAGVIGMLSAVVASIIESIGDYYACARLSCAPPPPIHAINRGIFVEGLSCVLDGIFGTGNGSTSSSPNIGVLGITKVGSRRVIQCGAALMLALGMIGKFSALFASLPDPVLGALFCTLFGMITAVGLSNLQFIDLNSSRNLFVLGFSIFFGLVLPSYLRQNPLVTGITGIDQVLNVLLTTAMFVGGCVAFILDNTIPGTPEERGIRKWKKGVGKGNKSLDGMESYNLPFGMNIIKKYRCFSYLPISPTFVGYTWKGLRKSDNSRSSDEDSQATG

SEQ ID NO: 22282 - protein, 650 aa, Homo sapiens
MMGIGKNTTSKSMEAGSSTEGKYEDEAKHPAFFTLPVVINGGATSSGEQDNEDTELMAIYTTENGIAEKSSLAETLDSTGSLDPQRSDMIYTIEDVPPWYLCIFLGLQHYLTCFSGTIAVPFLLADAMCVGYDQWATSQLIGTIFFCVGITTLLQTTFGCRLPLFQASAFAFLAPARAILSLDKWKCNTTDVSVANGTAELLHTEHIWYPRIREIQGAIIMSSLIEVVIGLLGLPGALLKYIGPLTITPTVALIGLSGFQAAGERAGKHWGIAMLTIFLVLLFSQYARNVKFPLPIYKSKKGWTAYKLQLFKMFPIILAILVSWLLCFIFTVTDVFPPDSTKYGFYARTDARQGVLLVAPWFKVPYPFQWGLPTVSAAGVIGMLSAVVASIIESIGDYYACARLSCAPPPPIHAINRGIFVEGLSCVLDGIFGTGNGSTSSSPNIGVLGITKVGSRRVIQCGAALMLALGMIGKFSALFASLPDPVLGALFCTLFGMITAVGLSNLQFIDLNSSRNLFVLGFSIFFGLVLPSYLRQNPLVTGITGIDQVLNVLLTTAMFVGGCVAFILDNTIPGTPEERGIRKWKKGVGKGNKSLDGMESYNLPFGMNIIKKYRCFSYLPISPTFVGYTWKGLRKSDNSRSSDEDSQATG

SEQ ID NO: 22283 - protein, 650 aa, Homo sapiens
MMGIGKNTTSKSMEAGSSTEGKYEDEAKHRAFFTLPVVINGGATSSGEQDNEDTELMAIYTTENGIAEKSSLAETLDSTGSLDPQRSDMIYTIEDVPPWYLCIFLGLQHYLTCFSGTIAVPFLLADAMCVGYDQWATSQLTGTIFFCVGITTLLQTTFGCRLPLFQASAFAFLAPARAILSSDKWKCNTTDVSVANGTAELLHTEHIWYPRIREVQGAIIMSSLIEVVIGLLGLPGALLKYIGPLTITPTVALIGLSGFQAAGERAGKHWGIAMLTIFLVLLFSQYARNVKFPLPIYKSKKGWTAYKLQLFKMFPIILAILVSWLLCFIFTVTDVFPPDSTKYGFYARTDARQGVLLVAPWFKVPYPFQWGLPTVSAAGVIGMLSAVVASIIESIGDYYACARLSCAPPPPIHAINRGIFVEGLSCVLDGIFGTGNGSTSSSPNIGVLGITKVGSRRVIQCGAALMLALGMIGKFSALFASLPDPVLGALFCTLFGMITAVGLSNLQFIDLNSSRNLFVLGFSIFFGLVLPSYLRQNPLVTGITGIDQVLNVLLTTAMFVGGCVAFILDNTIPGTPEERGIRKWKKGVGKGNKSLDGMESYNLPFGMNIIKKYRCFSYLPISPTFVGYTWKGLRKSDNSRSSDEDSQATG

SEQ ID NO: 22284 - protein, 650 aa, Homo sapiens
MMGIGKNTTSKSMEAGSSTEGKYEDEAKHPAFFTLPVVINGGATSSGEQDNEDTELMAIYTTENGIAEKSSLAETLDSTGSLDPQRSDMIYTIEDVPPWYLCIFLGLQHYLTCFSGTIAVPFLLADAMCVGYDQWATSQLIGTIFFCVGITTLLQTTFGCRLPLFQTSAFAFLAPARAILSLDKWKCNTTDVSVANGTAELLHTEHIWYPRIREIQGAIIMSSLIEVVIGLLGLPGALLKYIGPLTITPTVALIGLSGFQAAGERAGKHWGIAMLTIFLVLLFSQYARNVKFPLPIYKSKKGWTAYKLQLFKMFPIILAILVSWLLCFIFTVTDVFPPDSTKYGFYARTDARQGVLLVAPWFKVPYPFQWGLPTVSAAGVIGMLSAVVASIIESIGDYYACARLSCAPPPPIHAINRGIFVEGLSCVLDGIFGTGNGSTSSSPNIGVLGITKVGSRRVIQCGAALMLALGMIGKFSALFASLPDPVLGALFCTLFGMITAVGLSNLQFIDLNSSRNLFVLGFSIFFGLVLPSYLRQNPLVTGITGIDQVLNVLLTTAMFVGGCVAFILDNTIPGTPEERGIRKWKKGVGKGNKSLDGMESYNLPFGMNIIKKYRCFSYLPISPTFVGYTWKGLRKSDNSRSSDEDSQATG

SEQ ID NO: 22285 - protein, 650 aa, Homo sapiens [sequence omitted]

SEQ ID NO: 22286 - protein, 598 aa, Homo sapiens
MRAQEDLEGRAQHETTRDPSTPLPTEPKFDMLYKIEDVPPWYLCILLGFQHYLTCFSGTIAVPFLLAEALCVGHDQHMVSQLIGTIFTCVGITTLIQTTVGIRLPLFQASAFAFLVPAKAILALERWKCPPEEEIYGNWSLPLNTSHIWHPRIREVQGAIMVSSVVEVVIGLLGLPGALLNYIGPLTVTPTVSLIGLSVFQAAGDRAGSHWGISACSILLIILFSQYLRNLTFLLPVYRWGKGLTLLRIQIFKMFPIMLAIMTVWLLCYVLTLTDVLPTDPKAYGFQARTDARGDIMAIAPWIRIPYPCQWGLPTVTAAAVLGMFSATLAGIIESIGDYYACARLAGAPPPPVHAINRGIFTEGICCIIAGLLGTGNGSTSSSPNIGVLGITKVGSRRVVQYGAAIMLVLGTIGKFTALFASLPDPILGGMFCTLFGMITAVGLSNLQFVDMNSSRNLFVLGFSMFFGLTLPNYLESNPGAINTGILEVDQILIVLLTTEMFVGGCLAFILDNTVPGSPEERGLIQWKAGAHANSDMSSSLKSYDFPIGMGIVKRITFLKYIPICPVFKGFSSSSKDQIAIPEDTPENTETASVCTKV

SEQ ID NO: 22287 - protein, 598 aa, Homo sapiens
MRAQEDLEGRTQHETTRDPSTPLPTEPKFDMLYKIEDVPPWYLCILLGFQHYLTCFSGTIAVPFLLAEALCVGHDQHMVSQLIGTIFTCVGITTLIQTTVGIRLPLFQASAFAFLVPAKAILALERWKCPPEEEIYGNWSLPLNTSHIWHPRIREVQGAIMVSSVVEVVIGLLGLPGALLNYIGPLTVTPTVSLIGLSVFQAAGDRAGSHWGISACSILLIILFSQYLRNLTFLLPVYRWGKGLTLLRIQIFKMFPIMLAIMTVWLLCYVLTLTDVLPTDPKAYGFQARTDARGDIMAIAPWIRIPYPCQWGLPTVTAAAVLGMFSATLAGIIESIGDYYACARLAGAPPPPVHAINRGIFTEGICCIIAGLLGTGNGSTSSSPNIGVLGITKVGSRRVVQYGAAIMLVLGTIGKFTALFASLPDPILGGMFCTLFGMITAVGLSNLQFVDMNSSRNLFVLGFSMFFGLTLPNYLESNPGAINTGILEVDQILIVLLTTEMFVGGCLAFILDNTVPGSPEERGLIQWKAGAHANSDMSSSLKSYDFPIGMGIVKRITFLKYIPICPVFKGFSSSSKDQIAIPEDTPENTETASVCTKV

SEQ ID NO: 22288 - protein, 598 aa, Homo sapiens [sequence omitted]

SEQ ID NO: 22289 - protein, 602 aa, Homo sapiens
MRAQEDLEGRTQHETTRDPSTPLPTEPKFDMLYKIEDVPPWYLCILLGFQHYLTCFSGTIAVPFLLAEALCVGHDQHMVSQLIGTIFTCVGITTLIQTTVGIRLPLFQASAFAFLVPAKAILALERWKCPPEEEIYGNWSLPLNTSHIWHPRIREVGLHVQGAIMVSSVVEVVIGLLGLPGALLNYIGPLTVTPTVSLIGLSVFQAAGDRAGSHWGISACSILLIILFSQYLRNLTFLLPVYRWGKGLTLLRIQIFKMFPIMLAIMTVWLLCYVLTLTDVLPTDPKAYGFQARTDARGDIMAIAPWIRIPYPCQWGLPTVTAAAVLGMFSATLAGIIESIGDYYACARLAGAPPPPVHAINRGIFTEGICCIIAGLLGTGNGSTSSSPNIGVLGITKVGSRRVVQYGAAIMLVLGTIGKFTALFASLPDPILGGMFCTLFGMITAVGLSNLQFVDMNSSRNLFVLGFSMFFGLTLPNYLESNPGAINTGILEVDQILIVLLTTEMFVGGCLAFILDNTVPGSPEERGLIQWKAGAHANSDMSSSLKSYDFPIGMGIVKRITFLKYIPICPVFKGFSSSSKDQIAIPEDTPENTETASVCTKV

SEQ ID NO: 22290 - protein, 598 aa, Homo sapiens [sequence omitted]

SEQ ID NO: 22291 - protein, 425 aa, Homo sapiens
MMGIGKNTTSKSMEAGSSTEGKYEDEAKHPAFFTLPVVINGGATSSGEQDNEDTELMAIYTTENGIAEKSSLAETLDSTGSLDPQRSDMIYTIEDVPPWYLCIFLGLQHYLTCFSGTIAVPFLLADAMCVGYDQWATSQLIGTIFFCVGITTLLQTTFGCRLPLFQASAFAFLAPARAILSLDKWKCNTTDVSVANGTAELLHTEHIWYPRIREIQGAIIMSSLIEVVIGLLGLPGALLKYIGPLTITPTVALIGLSGFQAAGERAGKHWGIAMLTIFLVLLFSQYARNVKFPLPIYKSKKGWTAYKLQLFKMFPIILAILVSWLLCFIFTVTDVFPPDSTKYGFYARTDARQGVLLVAPWFKVPYPFQWGLPTVSAAGVIGMLSAVVASIIESIGDYYACARLSCAPPPPIHAINRYVPEKTSS

SEQ ID NO: 22292 - protein, 259 aa, Homo sapiens
MRAQEDLEGRTQHETTRDPSTPLPTEPKFDMLYKIEDVPPWYLCILLGFQHYLTCFSGTIAVPFLLAEALCVGHDQHMVSQLIGTIFTCVGMFCTLFGMITAVGLSNLQFVDMNSSRNLFVLGFSMFFGLTLPNYLESNPGAINTGILEVDQILIVLLTTEMFVGGCLAFILDNTVPGSPEERGLIQWKAGAHANSDMSSSLKSYDFPIGMGIVKRITFLKYIPICPVFKGFSSSSKDQIAIPEDTPENTETASVCTKV

SEQ ID NO: 22293 - protein, 492 aa, Homo sapiens
MSRSPLNPSQLRSVGSQDALAPLPPPAPQNPSTHSWDPLCGSLPWGLSCLLALQHVLVMASLLCVSHLLLLCSLSPGGLSYSPSQLLASSFFSCGMSTILQTWMGSRLPLVQAPSLEFLIPALVLTSQKLPRAIQTPGNSSLMLHLCRGPSCHGLGHWNTSLQEVSGAVVVSGLLQGMMGLLGSPGHVFPHCGPLVLAPSLVVAGLSAHREVAQFCFTHWGLALLTWAPASFMCAPGGELQRHQLTLLSLSSGSFRNCLPPPRHHGFGCLTQAGSQQVAHLVGLLCVGLGLSPRLAQLLTTIPLPVVGGVLGVTQAVVLSAGFSSFYLADIDSGRNIFIVGFSIFMALLLPRWFREAPVLFSTGWSPLDVLLHSLLTQPIFLAGLSGFLLENTIPGTQLERGLGQGLPSPFTAQEARMPQKPREKAQVYRLPFPIQNLCPCIPQPLHCLCPLPEDPGDEEGGSSEPEEMADLLPGSGEPCPESSREGFRSQK

SEQ ID NO: 22294 - protein, 650 aa, Sus scrofa
MMGIGKTSSKSMEAGSSAEGKYEDEAKHPTFFTLPVVTNGGATSSGEQDNEDTELMAIYTTENGIAEKSSLAETLDSTGSLDPQRSDMIYTIEDVPPWYLCIFLGLQHYLTCFSGTIAVPFLLADAMCVGYDQWATSQLIGTILFCVGITTLLQTTFGCRLPLFQASAFAFLAPARAILSLDKWKCNTTDVSVANGTTELLHTEHMWYPRIREIQGAIIMSSLIEVVIGLLGLPGALLKYIGPLGITPTVALIGLSGFQAAGERAGKHWGIAMLTIFLLLLFSQYARNVKFPLPIYKSKKGWTAYKLQLFKMFPIILAILVSWLLCFIFTVTDVFPPDSTKYGFYARTDARQGVLLVAPWFKVPYPFQWGLPTVSAAGVIGMLSAVVASIIESIGDYYACARLSCAPPPPIHAINRGIFVEGLSCVLDGIFGTGNGSTSSSPNIGVLGITKVGSRRVIQYGAASCCALGMIGKFSALFASLPDPVLGALFCTLFGMITAVGLSNLQFIDLNSSRNLFVLGFSIFFGLVLPSYLRQNPLVTGITGVDQVLNVLLTTAMFVGGCVAFILDNTIPGTPEERGIRKWKKGVGKGCKSLDGMESYDLPPFGMNVIKKYKCFSYLPISPTFAGYTWKGLGKERQCRSSDEDSQATV

SEQ ID NO: 22295 - protein, 429 aa, Salmonella typhimurium LT2
MTRRAIGVSERPPLLQTIPLSLQHLFAMFGATVLVPVLFHINPATVLLFNGIGTLLYLFICKGKIPAYLGSSFAFISPVLLLLPLGYEVALGGFIMCGVLFCLVSFIVKKAGTGWLDVMFPPAAMGAIVAVIGLELAGVAAGMAGLLPAQGQSPDTKTIIISMVTLAVTVFGSVLFRGFLAIIPILIGVLAGYALSFALGVVDTTPIAQAHWFALPTFYTPRFEWFAILTILPAALVVIAEHVGHLVVTANIVKKDLVRDPGLHRSMFANGLSTIISGFFGSTPNTTYGENIGVMAITRVYSTWVIGGAAIFAILLSCVGKLAAAIQIIPLPVMGGVSLLLYGVIGASGIRVLIESKVDYNKAQNLILTSVILIIGVSGAKVHIGAAELKGMALATIVGICLSLIFKLISLLRPEEVVLEANDAEPPHQ

SEQ ID NO: 22296 - protein, 441 aa, Salmonella typhimurium LT2
MPQPGLTTPDNDALPWQTTLLLALQHVLVVAATPITSVFLIAKALHFTDTVTASVLSATFLMCGLGAILQSLGVKGVGARLPFIMVPGGAPIAIFVAIALQTNIQTAIGAVILTSLFYFIALPIFRRCLHHFPPFIIGIMLLMVSINLIRLYGGLIIGQPGSADFAHPTSIILSLGTILITLIFALAFSGILRQLAVMFGLLAGTLLGMALGSTDFSGVSHGPLFSFPQLLPFGWPIFDLSASLPLLIYAVISMAEATGQTIATAEIVNSTQNVQQAIPRTIRGDAVMSLLGGIFGTSLIITSGENIGVVRTTNVKSRFVTAAAGGLLILIAIFAPLVRLATCLPGSVVCGTAVIVFSIIGVIGIDMIAREPLHTPGKTYALAMGLAMGMLPILVPGLYQNFPAGVQMVFGNGMAAGTLTAILVNSLFNWSEKRTQARVKS

SEQ ID NO: 22297 - protein, 412 aa, Oryctolagus cuniculus
TLLQTTFGCRLPLFQASAFAFLAPARAILSLDKWKCNTTDVSIANGTAELLHTEHIWYPRIREIQGAIIMSSLIEVFIGLLGLPGALLRYIGPLTITPTVALIGLSGFQAAGERAGKHWGIAMLTIFLVLLFSQYARNVKFPLPIYKSKKGWTAYKLQLFKMFPIILAILVSWLLCFIFTVTDVFPPDSTKYGSYARTDARQGVLLVAPWFKVPYPFQWGLPTVSAAGVIGMLSAVVASIIESIGDYYACAWLSCAPPPPIHAINRGIFVEGLSCVLDGIFGTGNGSTSSSPNIGVLGITKVGSRRVIQYGAALMLALGMIGKFSALFASLPDPVLGALFCTLFGMITAVGLSNLQFIDLNSSRNLFVLGFSIFFGLVPPSYLRQNPLVTGITGIDQVLNVLLTTAMFVGGC

SEQ ID NO: 22298 - protein, 419 aa, Oceanobacillus iheyensis HTE831
MKDREIQVDERLPLLQSFPLSLQHLFAMFGSTVLVPILFGVDPATILLMNGIGTLLYIFITKGKIPAYLGSSFAFISPVTMVLTEGGGYGAALGGFFVVGLVLVIVGLIVRYAGTSWIDVIFPPAAMGAIVAVIGLELVPTAADMAGLLPQADVPRDTTAILVSLITLGATIIYWVTMRGFLKIIPILLGIITGYVVATMFGIVDFSAVREASWIQMPTYYQIEFNWSDILIILPAALVLVPEHIGHLVVTGNIVKKDLVKEPGLDRSLFGNGFSTMISSFLGSTPNTTYGENIGVLAISKVYSTWVIGGAAIIAVVLSFCGKLAALISSIPTPVMGGISLLLFGIIAVSGLRMLVEQQIDYSKSQNLILTCVVLAIGVSGAAINVGSVELKGMGLATIIAIVVSLFFKLLDVLKLSNE

SEQ ID NO: 22299 - protein, 460 aa, Bacillus subtilis subsp. subtilis str. 168
MKLVLGALQWTAFIIAAAIVVPVAVAQSFHLDHSDSARLIQSTFFVLGIAAVIQCLKGHRLPINESPAGLWWGVYTIYAGLTGTVFATYGDTLRGLQGALLVSAVCFFLLSVFKVIDRLAKLFTPVVTGVYLLLLVMQLSQPIIKGILGIGYRQDGVDGLVFGLALVVIAAAFIMTNSNIMFFKQYSILLALFGGWVLFAAAGAAKPIEMPDRLFQLPSLFPFGTPLFNSGLIITSIFITILLIVNMLASMKVVDIAMKKFSKQPDGKHHERHAGFAASFSHLLSGLTGAIAPVPISGAAGFIETTKMPSKKPFMLGSILVIVISVIPFFMNTFASLPSPVGFAVNFVVFSAMGGLAFAEFDSYEKEESKRVRSIIGISLLTGVGIMFVPETALKGLHPVFISLLSNGLVLGTLAAIAADQFQLWRRRNPTISCQRRTNIEFWCRCDKINDMSLTKRRER

SEQ ID NO: 22300 - protein, 543 aa, Arabidopsis thaliana
MAGGGGGGGGVAPPLKHDGLEPHPVKDQLSSISYCITSPPPWPEAILLGFQHYLVMLGTTVLIPTYLVPQMGGGNEEKAKMVQTLLFVSGLNTLLQSFFGTRLPAVIGGSYTYVPTTLSIILAGRYSDILDPQESENMQKFKRIMRGIQGALIVASILQIVVGFSGLWRNVVRLLSPLSAVPLVALAGFGLYEHGFPLLAKCIEIGLPEIILLLLFSQYIPHLIRGERQVFHRFAVIFSVVIVWIYAHLLTVGGAYKNTGVNTQTSCRTDRSGLISGSPWIRVPYPFQWGPPTFHAGEAFAMMAVSFVSLIESTGTYIVVSRFASATPPPPSVLSRGVGWQGVGVLLCGLFGAGNGASVSVENAGLLALTRVGSRRVVQISAGFMIFFSILGKFGAIFASIPAPVVAALHCLFFAYVGAGGLSLLQFCNLNSFRTKFILGFSVFMGLSIPQYFNQYTAVNKYGPVHTHARWFNDMINVPFSSKAFVAGILAFFLDVTMSSKDSATRKDRGMFWWDRFMSFKSDTRSEEFYSLPFNLNKYFPSV

SEQ ID NO: 22301 - protein, 528 aa, Arabidopsis thaliana
MSAPKSGGDPLPHPPKEQLPDISYCITSPPPWPEAVLLGFQHYLVMLGTTVLIPSALVPQMGGRNEEKAKLIQTILFVAGLNTLLQTVFGTRLPAVIGASYTFVPVTISIMLSGRFNDVADPVERFKRIIRATQGALIVASTLQIILGFSGLWRNVVRFLSPLSAAPLVGLVGYGLYELGFPGVAKCIEIGLPGLIILILISQYMPHVIKGGKHVFARFAVIFSVAIVWLYAFFLTLGGAYNGVGTDTQRSCRTDRAGLISAAPWIRVPWPFQWGAPLFDAGEAFAMMMASFVALVESTGAFIAVSRYASATMPPPSVISRGVGWQGVAILISGLFGTGIGSSVSVENAGLLALTKIGSRRVVQISAGFMIFFSILGKFGAVFASIPSPIIAALYCLFFAYVGAGGLSLLQFCNLNSFRTLFILGFSIFLGLSIPQYFNEHTAIKGYGPVHTGARWFNDMVNVPFSSKAFVGGCVAYLLDTTLHKKDGSIRKDRGKHWWDRFWTFKNDPRTEEFYALPFNLNKYFPSV

SEQ ID NO: 22302 - protein, 539 aa, Arabidopsis thaliana
MAGDGVENAKPPQKQEDLQPHPVKDQLYGITYCLTSPPPWPETILLGFQHYLVMLGTTVLIPTMLVSKIDARNEDKVKLIQTLLFVSGINTLFQSFFGTRLPAVIGASYSYVPTTMSIVLAARYNDIMDPQKRFEQIMRGIQGALIIASFLHILVGFSGLWRNVTRFLSPLSAVPLVAFSGFGLYEQGFPMLAKCIEIGLPEIILLVIFSQYIPHLMQGETCSNFFHRFAVIFSVVIVWLYAYILTIGGAYSNTEINTQISCRTDRAGIISASPWIRVPHPIQWGGAPTFNAGDIFAMMAASFVSLVESTGTYIAVSRYASATPIPPSVLSRGIGWQGFGILLCGLFGAGNATSVSVENAGLLAVTRVGSRRVIQVAAGFMIFFSILGKFGAIFASIPAPIVAALYCLFFSYVGAGGLSLIQFCNLNSFRTKFILGFSIFMGLSIPQYFYQYTTLETYGPVRTSATWFNNIINVPFSSKAFVSGILAFFLDTTLPPKDKTTKKDRGLVWWKRFKSFQSDNRSEEFYSLPLNLSKYFPSH

SEQ ID NO: 22303 - protein, 483 aa, Arabidopsis thaliana
MLGTTVLIPSALVPQMGGRNEEKAKLIQTILFVAGLNTLLQTVFGTRLPAVIGASYTFVPVTISIMLSGRFNDVADPVERFKRIIRATQGALIVASTLQIILGFSGLWRNVVRFLSPLSAAPLVGLVGYGLYELGFPGVAKCIEIGLPGLIILILISQYMPHVIKGGKHVFARFAVIFSVAIVWLYAFFLTLGGAYNGVGTDTQRSCRTDRAGLISAAPWIRVPWPFQWGAPLFDAGEAFAMMMASFVALVESTGAFIAVSRYASATMPPPSVISRGVGWQGVAILISGLFGTGIGSSVSVENAGLLALTKIGSRRVVQISAGFMIFFSILGKFGAVFASIPSPIIAALYCLFFAYVGAGGLSLLQFCNLNSFRTLFILGFSIFLGLSIPQYFNEHTAIKGYGPVHTGARWFNDMVNVPFSSKAFVGGCVAYLLDTTLHKKDGSIRKDRGKHWWDRFWTFKNDPRTEEFYALPFNLNKYFPSV

SEQ ID NO: 22304 - protein, 600 aa, Arabidopsis thaliana
MAGDGVENAKPPQKQEDLQPHPVKDQLYGITYCLTSPPPWPETILLGFQHYLVMLGTTVLIPTMLVSKIDARNEDKVKLIQTLLFVSGINTLFQSFFGTRLPAVIGASYSYVPTTMSIVLAARYNDIMDPQKKMQRFEQIMRGIQGALIIASFLHILVGFSGLWRNVTRFLSPLSAVPLVAFSGFGLYEQGFPMLAKCIEIGLPEIILLVIFSQYIPHLMQGETCSNFFHRFAVIFSVVIVWLYAYILTIGGAYSNTEINTQISCRTDRAGIISASPWIRVPHPIQWGGAPTFNAGDIFAMMAASFVSLVESTGTYIAVSRYASATPIPPSVLSRGIGWQVNTQKRLKYFSMASSKLSLLMRFSVFKGFGILLCGLFGAGNATSVENAGLLAVTRVGSRRVIQVAAGFMIFFSILGKFGAIFASIPAPIVAALYCLFFSYVGTILETTETELFCFLFLEPQGTHLFAQKTENIAGAGGLSLIQFCNLNSFRTKFILGFSIFMGLSIPQYFYQYTTLETYGPVRTSATWFNNIINVPFSSKAFVSGILAFFLDTTLPPKDKTTKKDRGLVWWKRFKSFQSDNRSEEFYSLPLNLSKYFPSH

SEQ ID NO: 22305 - protein, 526 aa, Arabidopsis thaliana
MATKTDDFAPFPVKDQLPGVEFCVSSSPNWPEGIVLGFQHYIVMLGTTVIIPSILVPLMGGGDVEKAEVINTVLFVSGINTLLQSLFGSRLPVVMGASYAYLIPALYITFSYRFTYYLHPHLRFEETMRAIQGALIIASISHMIMGFFGLWRILVRFLSPLSAAPLVILTGVGLLAFAFPQLARCIEIGLPALIILIILSQYLPHLFKCKRSICEQFAVLFTIAIVWAYAEILTAAGAYDKRPDNTQLSCRTDRSGLISASPWVRIPYPLQWGRPSFHGSDAFAMMAATYVAIVETTGSFIAASRFGSATHIPPSVLSRGIGWQGIGVLLNGLFGTATGSTALVENTGLLGLTKVGSRRVVQISAGFMIFFSIFGKFGAVLASIPLPIFAALYCVLFAYVASAGLGLLQFCNLNSFRNKFILGFSIFIGLSVAQYFTEYLFISGRGPVHTRTSAFNVIMQVIFSSAATVGIMAAFLLDCTHSYGHASVRRDSGRHWWEKFRVYHTDTRTEEFYALPYNLNRFFPSF

SEQ ID NO: 22306 - protein, 529 aa, Arabidopsis thaliana
MATKTDDFAPFPVKDQLPGVEFCVSSSPNWRIVLGFQHYIVMLGTTVIIPSILVPLMGGGDVEKAEVINTVLFVSGINTLLQSLFGSRLPVVMGASYAYLIPALYITFSYRFTYYLHPHLRFEETMRAIQGALIIASISHMIMGFFGLWRILVRFLSPLSAAPLVILTGVGLLAFAFPQLARCIEIGLPALIILIILSQVSVNFYLPHLFKCKRSICEQFAVLFTIAIVWAYAEILTAAGAYDKRPDNTQLSCRTDRSGLISASPWVRIPYPLQWGRPSFHGSDAFAMMAATYVAIVETTGSFIAASRFGSATHIPPSVLSRGIGWQGIGVLLNGLFGTATGSTALVENTGLLGLTKVGSRRVVQISAGFMIFFSIFGKFGAVLASIPLPIFAALYCVLFAYVASAGLGLLQFCNLNSFRNKFILGFSIFIGLSVAQYFTEYLFISGRGPVHTRTSAFNVIMQVIFSSAATVGIMAAFLLDCTHSYGHASVRRDSGRHWWEKFRVYHTDTRTEEFYALPYNLNRFFPSF

SEQ ID NO: 22307 - protein, 531 aa, Glycine max
MAGGGAPAKADEPQPHPPKDQLPNISYCITSPPPWPEAILLGFQHFLVMLGTTVLIPTALVPQMGGGNNEKARVIETLLFVAGINTLLQTMFGTRLPAVIGGSYTFVPTTISIILAGRFSDEPDPIEKFKRIMRSIQGALIVASTLQIVLGFSGLWRNVARFLSPLSSVPLVSLVGFGLYELGFPGVAKCVEIGLPQLILLVFVSQYVPHVLHSGKHIFDRFAVLFTIVIVWIYAHLLTVGGAYNDAPHKTQISCRTDRAGLIDSAPWIRIPYPFQWGAPSFDAGEAFAMMMASFVALVESSGAFIAVYRYASATPLPPSILSRGIGWQGVGILLSGLFGTVNGSSVSVENAGLLALTRVGSRRVVQISAGFMIFFSILGKFGAVFASIPPPIIAALYCLFFAYVGAGGLSFLQFCNLNSFRTKFILGFSIFVGLSVPQYFNEYTAINGYGPVHTGARWFNDIINVPFQSKPFVAGVVAYFLDNTLFKREAAIRKDRGKHWWDKYKSFKGDTRSEEFYSLPFNLNKYFPSV

SEQ ID NO: 22308 - protein, 539 aa, Glycine max
  unsure (1)..(539): unsure at all Xaa locations
MAGGGGAPAPKIDEPQPHPPKDQLPNVSYCSTSPPPWPEAILLGFQHYLVMLGTTVLIPTALVPQMGGGNEEKAKVIQTLLFVAGINTLLQTLFGTRLPAVIGGSYTYVATTISIILSGRFSDEPDPIEKFKRIMRATQGALIVASTLQIVLGFSGLWRNVARLVSGSXFLSPLSAVPLVSLVGFGLYELGFPGVAKCVEIGLPELILLVFISQFVPHVLHAGKHVFDRFAVLFTIAIVWLYAYLLTVGGAYNHAAPKTQSTCRTDRSGLIESAPWIRVPYPFQWGAPTFDAGEAFAMMMASFVALVESSGAFIAVYRYASATPLPPSILSRGIGWQGVGILLSGLFGTGNGSSVSVENAGLLALTRVGSRRVVQIAAGFMIFFSILGKFGAVFASIPPPIVAALYCLFFAYVGAGGLSFLQFCNLNSFRTIFVLGYSIFIGLSVSQYFNEYTAINGYGPVHTKARWFNDIINVPFQSKAFVAGCVAYFLDNTLHKKEAAIRKDRGKHWWDKYRSFKTDTRSEEFYSLPFNLNKYFPSV

SEQ ID NO: 22309 - protein, 531 aa, Glycine max
MAGGGAPAKADEPQPHPPKDQLPNISYCITSPPPWPEAILLGFQHFLVMLGTTVLIPTALVPQMGGGNNEKARVIETLLFVAGINTLLQTMFGTRLPAVIGGSYTFVPTTISIILAGRFSDEPDPIEKFKRIMRSIQGALIVASTLQIVLGFSGLWRNVARFLSPLSSVPLVSLVGFGLYELGFPGVAKCVEIGLPQLILLVFVSQYVPHVLHSGKHIFDRFAVLFTIVIVWIYAHLLTVGGAYNDAPHKTQISCRTDRAGLIDAAPWIRIPYPFQWGAPSFDAGEAFAMMMASFVSLVESSGAFIAVYRYASATPLPPSILSRGIGWQGVGILLSGLFGTVNGSSVSVENAGLLALTRVGSRRVVQISAGFMIFFSILGKFGAVFASIPPPIIAALYCLFFAYVGAGGLSFLQFCNLNSFRTKFILGFSIFIGLSVPQYFNEYTAINGYGPVHTGARWFNDIINVPFQSKPFVAGVVAYFLDNTLFKRAADIRKDRGKHWWDKYKSFKGDTRSEEFYSLPFNLNKYFPSV

SEQ ID NO: 22310 - protein, 532 aa, Glycine max
  unsure (1)..(532): unsure at all Xaa locations
MAGGGAPXPKADEPQPHPPKDQLPNISYCITSPPPWPEAILLGFQHFLVMLGTTVLIPTALVPQMGGGNNEKARVIETLLFVAGINTLLQTMFGTRLPAVIGGSYTFVPTTISIILAGRFSDEPDPIEKFKRIMRSIQGALIVASTLQIVLGFSGLWRNVARFLSPLSSVPLVSLVGFGLYELGFPGVAKCVEIGLPQLILLVFVSQYVPHVLHSGKHIFDRFAVLFTIVIVWIYAHLLTVGGAYNDAPHKTQISCRTDRAGLIDAAPWIRIPYPFQWGAPSFDAGEAFAMMMASFVSLVESSGAFIAVYRYASATPLPPSILSRGISWQGVGILLSGLFGTVNGSSVSVENAGLLALTRVGSRRVVQISAGFMIFFSILGKFGAVFASIPPPIIAALYCLFFAYVGAGGLSFLQFCNLNSFRTKFILGFSIFIGLSVPQYFNEYTAINGYGPVHTGARWFNDIINVPFQSKPFVAGVVAYFLDNTLFKRAADIRKDRGKHWWDKYKSFKGDTRSEEFYSLPFNLNKYFPSV

SEQ ID NO: 22311 - protein, 554 aa, Glycine max
  unsure (1)..(554): unsure at all Xaa locations
KRAIIGCGGAXQASKVDEPQPHPPKDHLPNISYCITSPLTWPEAILLGFQHXXPAMRCSNYANSRGIDSQHFVVHLDTLFQTMIGTRLPAVIGGSYTFVPTTISIXILAGRFSDEPDPXXEKFKRIMSSIQGALIVASILHIVLGFSGLWRNVARFLSPLSSVPLVSLVGFGLYELGIPGVAXCEVIGLPQLILLVFVSQYVPHVQQSGKHIFPSFSLLFGIXLVFFLMSHLHNIGAAISDAPHKTXISCRCSXSIGLIDAAPWIRIPYPFQWGAPSFDAGEAFAMMMASFVSLVESSGAFIAVYRYASATPLPPSILSRGIGWQVAFIAVYRYATAAPVRPSSFIRFSGCQGFSILLSGWFGIVNGSSVSVENAGLLAFTRVGTIQVVAISVGVMIFFSFHGKFGVVFASAPSPVIAALYCLFFAYVGAGGLSFLQFCNLNSFRTKFILGFSIFVGLSVPQYFNEYTAINGYGPVHTGARWFNDIINVPFQSKPFVAGVVAYFLDNTLFKREAAIRKDRGKHWWDKYKSFKGDTRSEEFYSLPFNLNKYFPSV

SEQ ID NO: 22312 - protein, 532 aa, Oryza sativa
AGGGAAPPPKQEELQPHQVKDQLPSVSYCITSPPPWPEAVILGFQHYIVMLGTSVIIPSALVPQMGGGNEEKARVIQTLLFVAGINTLCQSFFGTRLPAVMGGSYTIVAPTISIILAGRYSNEADPHEKFLRTMRGTQGALIIASTIQIILGFSGLWRNVVRLLSPLSAVPLISLAGFGLYELGFPGVAKCVEIGLPEIILLLVFSQYLPHVIHVAKPVFDRFAVIFTIAIVWLYAYILTASGAYKNARPKTQVHCRVDRSGIISGAPWIRVPFPFQWGAPTFDAGESFAMMMASFVALVESTGTFIAVSRYASATMIPPSVLGRGIGWQGIGTLIGAFFGTANGTAVSVENAGLLALTHVGSRRVVQISAGFMIFFSILGKFGAIFASIPLPIFAALYCIFFAYIGACGLSFLQFCNLNSFRTKFIVGFSFFMGLSVPQYFNEYTSVAGYGPVHTGARWFNDMINVPFASKPFVAGLIAYFLDNTIQRRDNGVRRDRGYHWWDKFRSFKTDTRSEEFYSLPFNLNKFFPSV

SEQ ID NO: 22313 - protein, 601 aa, Schizosaccharomyces pombe
MSESIQDQDHEKTTIIEKTRRFVLSIFTKDFWIGDYDYSFLLPAIPFTKQKPKSPPFFSLNAKVPVLLALLLGFQHALAMVGGVTSPPRIIAASANLTTEQTNYLVSAGLISSGIMTLIQIARVHIPKTKYYIGTGMLSVLGISFTSVSVAPKVLSQMYENGYCPKDENGTKLPCPDGYGAFLATACVCSLLEIFMSFIPPRILKRLFPPIVTGPVVLLIGTSLISSGLNDWAGGEGSCTGRPTEAEAPGYSLCPSDTSPHALGWGSAQFIGLGFSVFATIIIIERFGPPLMKTTSVVLGLVVGMIISAATGYWDHSIIDAAPVVTFNWVHTFRLRIYGPAVLPMLALYIVNMMEAIGDIGATSDVSMLEVDGPAFDARVQGGILGDGLASLIASLMTTTPLTTFAQNNGVISLTKCANRRAGFFCAVILFFMGLFAKFAAVFVAIPSPVLGGMTTFLFSSVAVSGIAIISQIPFNRRNRFILTASMTLGMGAILVPDWFTYFFEYSGPNKALVGFLDAITLVMENGFAIGAFISIFLNLILPYEFDPDLTNDSPGLSTTNGVNNGIVEVRGIDPNDSLSNTDTEYANENKKDEVDVDKVV

SEQ ID NO: 22314 - protein, 1472 aa, Streptomyces coelicolor A3(2)
MAGGLLTRSQDAVTGFVLAGPRLLARGTAPAVGAAAGAAAGTARAGVRGADFAARAARVARAALPGGSRDWRAGPRAHLALRPVARDEVRRAGGTERVGRRVAAALAEHPDVLFAYWDTGLARLVVTATEDALTDRVVDHATELAGRHGLTRVDQADLTGLTGPGEPGDDDLVDGDLVDEPDHPGDPAPVRVAAAALGADVLGIAAAVTGARLRLPPSPRLVTAVATLLRENPAFRAWLRERLGDHRMDVALAAANAAVHGAGQSPTSLVLDGALRVCQLTEAVARGAAFEVVHDRLCVPGRDSLPAVPALRPAPRTSPAQDYAAHASAGSVAGAAATLLVKHDLAEAAEAVLAGSPKAARYGPAAFHAVLSAALSRTGVLVRDPGRLRQLEMVRTVVLHPSALRVPDAGADPWTEDVLDAARRAGLRVVMVEDPALADFTGLADQVVGARRPLADVVAELRAEGGVVTVVRPLPGDDGSVSAGLLAGDVAVALADGDCPVAWGADVLAPQGLADVWRVLRAVPVARAVGRRSQTLARSGAALSGLLVAVGEARGRSRGGVSSLLGMRHAPVDASAALALLSGTRAAIGVATARAPHPRARVAWHALDPQDVRDRLEREREPEPTAVEQATARLRAAADRAGRVPVLAPVRWSWQLARAVRGELDDPLTPVLAVGSAASAILGSVVDALLVVGALDLNALVGGFQRLRAERALSGLLAEQKQKARVAEEQLRPETAEFTPEGEPRIVDAAKLHPGHVIELRADDVVPADARLLWEDGLEVDESALTGESLPVDKCVDPAPRAPVAERYCMVFEGTTVVAGRARAVVVDTGDHTEAARAVALAARTPSAAGVQARLQELTRKALPLTLAGGAAVTGLSLLRGAPIRQAVAGGVSVAVAAVPEGLPLVATVAQLAAARRLSRRGVLVRTPRTLEALGRMDTVCFDKTGTLTENRLRLSRVAGADGTVRRSGDPETADTVRTAARACPRLDGDGARPTHATDEAILDAAGDDPGWTQEEGLPFETSRGYAAAVGREDGTGAAVLVVKGAPETVLPACAGLPDHALEVAQRLAGAGLRIIAVARRTLDTGERAADVLERQPSELEFTGLLALADVARETSPALVRGLREAGVRPVVLTGDHPQTAHAIAVDLGWPEDAVVVTGDELAAADRTARSRMLRDADVVARVAPEQKLQVVESLRDAGRVVGMVGDGANDAAAIRAADIGVGISARGSAAARNAADLVVTGDDLLVLVEAVREGRALWHSVADAIAILIGGNAGEVGFGILGTVLGGAAPLSTRQMLLVNLFTDLFPAMAVAVTKTGDPEQEAADAGAPLGTAVLGEPLIRQIRHRALTTALGATAAWLLGRFTPGTRRRSTTMALCAVVGTQLAQTLADRRDSRLVQVTSLGSAAALVALVQTPGASRLFGCTPLGPVAWTCVAAAIALALAGQRALPGVEDAIVRYWPKAAERLPRAVR

SEQ ID NO: 22315 - protein, 796 aa, Streptomyces coelicolor A3(2)
MKNQLDEPGGAVRVGGGGGLSAAEVAERVAAGQVNDVPARSSRTIGEIVRSNLFTRINAIIGVLFVIVMIVGPVQDGLFGGVILANTAIGIIQEVRAKRTLDQLAIVGESRPRVWRDGQRLELSASEIVIDDSIDLGQGDKIVVDGTVTSGDSLEVDESLLTGEADPVVKQPGDPVMSGSFVVAGSGTFTATRVGKEAYASQLADEARRFSLVNSELRNGIDRILKFVTYAIVPAGIALIITQFVVNDDNFSEAIRRMVGGLVPMVPEGLVLLTSLAFAVGVVRLGKKQCLVQELPAIEGLARVDTVCLDKTGTLTEASMDVDEVLPLLPELPVDAVLGALGAADERPNASLQAIIESYPAPEGWRRTATAPFSSARRWSGASFAEPSGTESAWLLGAPDTMLPAGHSVLTAADSYGARGLRVLLLARSDRPLDTLMDDPAAVPAAVTAAALVVIKQRVRPEARATLDYFADQGVTAKVISGDNAVSVGAVASSLSLPGAERPVDARFLPDEPAELADAVEENTVFGRVGPQQKRDMVGALQSRGHTVAMTGDGVNDVLALKDADIGVGMGSGSPATRAVAQIVLLNNNFSALPSVVAEGRRVIGNIERVANLFLTKTVYSVLMALVVVIAQVPYPFLPRHITLVGSLTIGIPAFFLALAPNKERARSNFVGRVLRFAIPAGALAAAATSVAYLIARSVYDDNLDAETSAATLALFLTALWALAVIARPYTWWRVLLVLTMAVGFAVVLVVPYLQEFFQLKLVGVTAPWAAVACAAVAGLVLELVWARMRRRLDAD

SEQ ID NO: 22316 - protein, 802 aa, Streptomyces coelicolor A3(2)
MTHLDADRLDPEHPAHAVDAPSPATGLTAAGVAERIARGQVNDVPVRSSRSLADIVRANVFTRFNAIIGVLWVIMLFVAPIQDSLFGFVILANTGIGIIQEWRAKKTLDSLALIGEVRPTVRRDGKPVGISTSEIVLDDVIEIGPGDKAVVDGVCVEADGLEIDESLLTGEADPVVKQPGDQVMSGSFVVAGGGAFRATKVGREAYAAQLAEEASRFTLVQSELRSGISTILKYVTWMMVPTAIGLILSQLLAKDNDLDDSIARTVGGIVPMVPEGLVLLTSVAFAIGVVRLGRKQCLVQELPAIEGLARVDTVCLDKTGTLTEGGMDVTDLRVLDGADERHVRAVLGALGASDPRPNASLQAIIDTYPDDGSAGAWRNTRSLPFSSARKYSGATFDEGDGAAGTWLLGAPDVLLPEDDPALAETGRLNEQGLRVLLLARAARDLDDPEVAEGVEPTALVVLEQRLRPDAADTLRYFADQDVRAKVISGDNAVSVGAVAAKLGLSGATVDARRLPAEREEMAGALDEGTVFGRVTPQQKRDMVAALQSRGHTVAMTGDGVNDVLALKDADIGVAMGSGSEATRAVAQIVLLNNSFATLPSVVAEGRRVIGNITRVATLFLVKTVYSVLLAILVVCSQVEYPFLPRHLTLLSTLTIGVPAFFLALAPNRERARPHFVRRVMRYAIPGGVVAGAATFVTYLVARQHYTGPGALDAETSAATLTLFLISMWVLAIIARPYTWWRVLLVAAMGLGFVVVLAVPWLQDFFALKLVGVTMPWTAVGIAVAGAAVLELTWGWVDRRFPV

SEQ ID NO: 22317 - protein, 581 aa, Streptomyces coelicolor A3(2)
NVFTRFNAIIGVLWVIMLFVAPIQDSLFGFVILANTGIGIIQEWRAKKTLDSLALIGEVRPTVRRDGKPVGISTSEIVLDDVIEIGPGDKAVVDGVCVEADGLEIDESLLTGEADPVVKQPGDQVMSGSFVVAGGGAFRATKVGREAYAAQLAEEASRFTLVQSELRSGISTILKYVTWMMVPTAIGLILSQLLAKDNDLDDSIARTVGGIVPMVPEGLVLLTSVAFAIGVVRLGRKQCLVQELPAIEGLARVDTVCLDKTGTLTEGGMDVTDLRVLDGADERHVRAVLGALGASDPRPNASLQAIIDTYPDDGSAGAWRNTRSLPFSSARKYSGATFDEGDGAAGTWLLGAPDVLLPEDDPALAETGRLNEQGLRVLLLARAARDLDDPEVAEGVEPTALVVLEQRLRPDAADTLRYFADQDVRAKVISGDNAVSVGAVAAKLGLSGATVDARRLPAEREEMAGALDEGTVFGRVTPQQKRDMVAALQSRGHTVAMTGDGVNDVLALKDADIGVAMGSGSEATRAVAQIVLLNNSFATLPSVVAEGRRVIGNITRVATLFLVKTVYSVLLAILVVCSQVE

SEQ ID NO: 22318 - protein, 846 aa, Rhodospirillum rubrum
MEPVLMDALPFSPIGDPAAHRPPSPEYPDVDCDHGLSSGQAADLLAEWGANRLDDGNPGRLRRLANSLSGPVAWMLQAAALLALAAGRWADGALILTLLLVNAGVSLVEQRHAGRALSRLGRRLAPMARVLRDGVWADRPADEVVPGDVIFLKLGRVVPADAVLLGEGALSIDASMLTGDRRVIAKTGGDEVHAGSMVRGGEMKAVVTATGPTTLFGRSPPVTARRKPSALRAAMLGIGNTLVALTLVMMVTVMILALYRQDPPLETVLFVLVLSAASIPLALPAVLSMTLSAGALRLERMKAVVARMAAIEDLAGLDVLCADQSGTLSEPRLVMGEPVLLQASGRGELLRTAALACPAEGANAVDLAILAGQPALTPGDGYCLFLQPLTEDAGEGGCLRAEVERPLESGAVARFSVLKGEPLAVAQATGLEPALVRRISEATDDLAERGFRAVGIARAEEGGEVEHWRYLGLIALVEPSRGDSPGSLDAARVLGLRVLMITPERAAIGGRVARGMGLGDRVVCARRMVDGLGEDGGTGRAECGADRDDDLEDAHVIAEVHPEHRLRLVRALQRAGHRVGITGAAGEDAAALDHAEVGIAVKGASDAARQAADVVLGASGLAIITRAVSESRRILGRMSGYAAYRIAETLRLPVFVALAYLMLGSFPISLAMIALLSILASLPALFVAGDTAPPPPRPVRWDMLKVVRVSGVLGVSGVASSFLLLWLLDHRLDLPAAQEQTILFLKLLIGGNMTIALTRRDGWVWRRPFPAHRLLVAIVLTQGLGTLAAVGGLFMAPIGWPMAGAVWAFALVCFAFDNLALVATERLNRDGLPGMGLGFSKLLGGN

SEQ ID NO: 22319 - protein, 956 aa, Hordeum vulgare subsp. vulgare
MADKEAGNLEAVLKEVVDLENIPLEEVLDNLRCSREGLTAEQAQQRLQILGPNKLEEKEESKFLKFLGFMWNPLSWVMEMAAIMAIALANGGGKPPDWQDFVGIIVLLVINSTVSFIEENNAGNAAAALMANLAPKTKVLRDGRWGEQEASILVPGTLSASSLVTSSLLMLVCLEGDPFEDSSVWAYRRVSPSDQEPWGEVFSGSTCKQGEIEAVVIATGVHTFFGKAAHLVDSTNQVGHFQQVLTAIGNFCIISIAVGIVIEIIVMFPIQRRKYRAGIENLLVLLIGGIPIAMPTVLSVTMAIGSHKLSQQGAITKRMTAIEELAGMDVLCSDKTGTLTLNKLSVDKNLVEVFAKGVDKEHVLLLAARASRVENQDAIDACMVGMLADPKEARAGIREVHFLPFNPTDKRTALTYIDAEGNWHRASKGAPEQIITLCNCKEDVKRKVHSVIEKYAERGLRSLAVARQEVPEKSKDSAGGPWQFIGLLPLFDPPRHDSAETIRKALVLGVNVKMITGDQLAIGKETGRRLGMGTNMYPSSALLGQSKDGSLESLPVDELIEKADGFAGVFPEHKYEIVKRLQEKKHIVGMTGDGVNDAPALKKADIGIAVDDATDAARSASDIVLTEPGLSVIISAVLTSRCIFQRMKNYTIYAVSITIRIVLGFLLIALIWKFDFAPFMVLIIAILNDGTIMTISKDRVKPSPLPDSWKLNEIFATGVVLGTYLALMTVVFFWIIHRTDFFTNKFGVRSIRENETEKMSALYLQVSIVSQALIFVTRSRSWSFVERPGFLLVIAFLLAQLVATLIAVYANWGFARISGIGWGWAGVIWLFSIVFYFPLDIFKFFIRFVLSGRAWDNLLQNKTAFTTKENYGKGEREAQWATAQRTLHGLQAPEPASHTLFNDKSSYRELSEIAEQAKRRAEIARLRELNTLKGHVESVVKLKGLDIDTINQNYTV

SEQ ID NO: 22320 - protein, 635 aa, Hordeum vulgare subsp. vulgare
IEEMAGMDVLCSDKTGTLTLNKLSVDKNLVEVFAKGVDKEHVLLLAARASRVENQDAIDACMVGMLADPKEARAGIREVHFLPFNPTDKRTALTYIDAEGNWHRASKGAPEQIITLCNCKEDVKRKVHSVIEKYAERGLRSLAVARQEVPEKSKDSAGGPWQFIGLLPLFDPPRHDSAETIRKALVLGVNVKMITGDQLAIGKETGRRLGMGTNMYPSSALLGQSKDGSLESLPVDELIEKADGFAGVFPEHKYEIVKRLQEKKHIVGMTGDGVNDAPALKKADIGIAVDDATDAARSASDIVLTEPGLSVIISAVLTSRCIFQRMKNYTIYAVSITIRIVLGFLLIALIWKFDFAPFMVLIIAILNDGTIMTISKDRVKPSPLPDSWKLNEIFATGVVLGTYLALMTVVFFWIIHRTDFFTNKFGVRSIRENETEKMSALYLQVSIVSQALIFVTRSRSWSFVERPGFLLVIAFLLAQLVATLIAVYANWGFARISGIGWGWAGVIWLFSIVFYFPLDIFKFFIRFVLSGRAWDNLLQNKTAFTTKENYGKGEREAQWATAQRTLHGLQAPEPASHTLFNDKSSYRELSEIAEQAKRRAEIARLRELNTLKGHVESVVKLKGLDIDTINQNYTV

SEQ ID NO: 22321 - protein, 174 aa, Vallisneria gigantea
LVMNGAPEQILNLCNCKEDLRKKVHSIIDKYAERGLRSLAVARQEVHEKSKESAGGPWQFVGLLPLFDPPRHDSAETIRKALNLGVNVKMITGDQLAIAKETGRRLGLGTNMYPSSSLLGQDKDASIAALPVDELIEKADGFAGVFPEHKYEIVKKLQEKKPICGMTGDGVHDS

SEQ ID NO: 22322 - protein, 173 aa, Vallisneria gigantea
MMKGAPEQILNLCNCKEDLRKKVHSIIDKYADRGLRSLAVARQEVHEKSKESAGGPRQFVGLLPLFDPPRHDSAETIRKALNLGVNVKMITGDQLAIAKETGRRLGMGTNMYPSSSLLGQDKDASIAALPVDELIEKADGFAEVFPEHKYEIVKKLQEKKHICGMTGDGVNDS

SEQ ID NO: 22323 - protein, 174 aa, Vallisneria gigantea
LVMKGAPEQILNLCNCKEDVRKKVHSVIDKYAERGLRSLAVGRQEVPEKSKESAGGPWQFVGLLPLFDPPRHDSAKTIRRALNLGVNVKMITGDQLAIAKETGRRLGMGTNMYPSSSLLGNHKDESLGTIAVEELIEKADGFAGVFPEHKFEIVKKLQERKHICGMTGDGVNDS

SEQ ID NO: 22324 - protein, 811 aa, Burkholderia fungorum
MRRGPVRKLRWLEARAAASFSTNLNWFAMSSLPETSEHSVEDRQSGGLTSDEAQRRLQVFGPNGVPDTATSPWSRALGKLWAPVPWMLEAAIVLQLVLGEYVEAGVIAALLIFNAALGFFQESRAQATLDALKSRLALITPVRRDGAWKTVPVGQLVPGDIVKLSLGCIVGADVRLIEGEVLLDQSTLTGESLPIEGGPGLQTYAGALVRRGEAVAEVTATGAHTKFGQTAELVRIARVPSSQQQAVMRVVRNLAMFNGVIVLVQIGYASSLRMPLVEIVPLALTAILAAIPVALPATFTLATALGARVLAKLGVLPTRLSAIDEAASMDVLCADKTGTLTRNELAVTAVHAMPGFDEPHVLALAALASSEGGQDPVDAAIRNASRPACVADLPRLVRFVPFDPAEKMSEALATDKDDRTVRIVKGAFARVSALTQSSPEAAVAEQALEAKGFRVLAVGAGVPGKLQVAGLIALSDPPRDDSARLIADLLGMGVHTVMVTGDAVATAGVVAHTVGLDGAVCPPGPLPGQLRPEEFAVFAGVFPDDKFHIVKAFQSGGHIVGMCGDGANDAPALRQAQMGIAVSTATDVAKSAAGIVLTEPGLGGVVAAVREGRVTFQRILTYTLRSVTRKIDQMLFLTVGLIMTGHAVLTPMLMVVLMTTGDFLAMSSTTDNVRPSTRPNAWRINNLTIAGIVLASCNLLFCSSILALGKFWLHLGTGQLQTLAAVILVFSGQAVLYVVRERRRLWSSRPGRWLIVSSIADVSIIATLATRGILMSPLPLQWIGAMLGAAIVFAFVLDFVKVAAFARLKMV

SEQ ID NO: 22325 - protein, 818 aa, Burkholderia fungorum
MKNSPGTLKCVRGKLNVKLPLRPGRINVTSAVVPAPIPEAASQPDAVPGTGLSSTEARRRLAESGANTLPDTAASTWRMMLGKFWAPVPWMLEAAVVLQCVLGRFVEAGIIAGLLVFNAILGVFQESRAQATLAALKSRLAMNASVLRDGAWSIVPAADLVKGDVVKLSLGGVVAADMRIVSGNALLDHSMLTGESVPIEATSGTQTFAGALVRRGEALALVTATGTHTRFGRTAELVRTAHIASSQQTAVLLVVRNLAAFSVAVIALLVGYALYLHMPLADIVPLILTAVLASIPVALPATFTLSAALGARALAAQGVLSTRLSAVDEAGTMDVLCADKTGTLTCNALTVSTVAPMPGFDMNRVLILAALASAAGSQDPVDKAILDAASSVAPTPEDSVLKLVALKPFDPSTRTSEASVSDPSHGIQRIVKGASAAVISLSQASPEAAARTAELEGQGLRVLAVAAGTADALQVVGLVALSDPPRADSAAFIEELHGLGVRVVMVSGDAPATAASVAQAIGLTGPVCPPGSMPDRADPQSFAVFAGVLPEDKYKLVKAFQQTGHTVGMCGDGANDAPALRQAQIGIAVSTATDVARSAAGMVLTEAGLGGIVTAVKEGRLTFQRILTYMLNSVLKKIATAFMLVIGLLVTGHAILTPLLMVILMIAGDFLAMSLTTDRVEPSPSPNVWRISNLTVVGVFVGFALVAFCSGVLALGKFAMGLNLDALRTLTFVLLVFGGQATLYAIRHRRHMWGTRPSVWVMASSVADVLIAAGLAIGGIAMTALPPMLIGGVLAATVVFAFVLAAAKIPLFARLKIS

SEQ ID NO: 22326 - protein, 996 aa, Makaira nigricans
MENAHTKSPAECLSYFGVNEHTGLSPDQFKKNLDKFGYNELPAEEGKSIWDLIVEQFEDLLVRILLLAACISFVLAWFEEGEETITAFVEPFVILLILIANAIVGVWQERNAEDAIEALKEYEPEMGKVYRSDRKSVQRIKAREIVPGDIVEVSVGDKVPADIRIVSIKSTTLRVDQSILTGESVSVIKHTESVPDPRAVNQDKKNMLFSGTNIAAGKAIGVAIATGVSTEIGKIRDQMAATEQEKTPLQAKLDEFGEQLSKVISLICVAVWAINIGHFNDPVHGGSWIRGAVYYFKIAVALAVAAIPEGLPAVITTCLALGTRRMAKKNAIVRSLPSVETLGCTSVICSDKTGTLTTNQMCVTKMFIVKSVDGDHVDLNAFDISGSKYTPEGEVSHGGSKTNCSAYDGLVELATICALCNDSSLDYNESKKIYEKVGEATETALCCLVEKMNVFNSNVKNLSRIERANACCTVIKQLMKKNFTLEFSRDRKSMSVYCTPAKGDGGAKMFVKGAPEGVIDRCAYVRVGTTRVPLTSAIKEKIMAVIRDWGTGRDTLRCLALATRDTPLKVEEMNLEDSTKFADYETDMTFVGCVGMLDPPRKEVTGSIELCRDAGIRVIMITGDNKGTAIAICRRIGIFKEDEDVSNKAYTGREFDDLPSQDQAEAVRRACCFARVEPSHKSKIVEFLQGNDDITAMTGDGVNDAPALKKAEIGIAMGSGTAVAKSASEMVLADDNFSSIVAAVEEGRAIYNNMKQFIRYLISSNVGEVVCIFLTAALGLPEALIPVQLLWVNLVTDGLPATALGFNPPDLDIMGKPPRSPKEPLISGWLFFRYMAIGGYVGAATVGGAAWWFLYDSTGPAVTYYQLSHFMQCHNHNEDFTGVDCDIFEASPPMTMALSVLVTIEMCNALNSLSENQSLIRMPPWSNLWLMAAMTLSMSLHFMIIYVDPLPMIFKLTHLTFDQWLMVFKLSFPVILIDEVLKFFARNYIETGKEVK

SEQ ID NO: 22327 - protein, 991 aa, Makaira nigricans
MENAHTKSPAECLSYFGVNEHTGLSPDQFKKNLDKFGYNELPAEEGKSIWDLIVEQFEDLLVRILLLAACISFVLAWFEEGEETITAFVEPFVILLILIANAIVGVWQERNAEDAIEALKEYEPEMGKVYRSDRKSVQRIKAREIVPGDIVEVSVGDKVPADIRIVSIKSTTLRVDQSILTGESVSVIKHTESVPDPRAVNQDKKNMLFSGTNIAAGKAIGVAIATGVSTEIGKIRDQMAATEQEKTPLQAKLDEFGEQLSKVISLICVAVWAINIGHFNDPVHGGSWIRGAVYYFKIAVALAVAAIPEGLPAVITTCLALGTRRMAKKNAIVRSLPSVETLGCTSVICSDKTGTLTTNQMCVTKMFIVKSVDGDHVDLNAFDISGSKYTPEGEVSHGGSKTNCSAYDGLVELATICALCNDSSLDYNESKKIYEKVGEATETALCCLVEKMNVFNSNVKNLSRIERANACCTVIKQLMKKNFTLEFSRDRKSMSVYCTPAKGDGGAKMFVKGAPEGVIDRCAYVRVGTTRVPLTSAIKEKIMAVIRDWGTGRDTLRCLALATRDTPLKVEEMNLEYSTKFADYETDMTFVGCVGMLDPPRKEVTGSIELCRDAGIRVIMITGDNKGTAIAICRRIGIFKEDEDVSNKAYTGREFDDLPSQDQAEAVRRACCFARVEPSHKSKIVEFLQGNDDITAMTGDGVNDAPALKKAEIGIAMGSGTAVAKSASEMVLADDNFSSIVAAVEEGRAIYNNMKQFIRYLISSNVGEVVCIFLTAALGLPEALIPVQLLWVNLVTDGLPATALGFNPPDLDIMGKPPRSPKEPLISGWLFFRYMAIGGYVGAATVGGAAWWFLYDSTGPAVTYYQLSHFMQCHNHNEDFTGVDCDIFEASPPMTMALSVLVTIEMCNALNSLSENQSLIRMPPWSNLWLMAAMTLSMSLHFMIIYVDPLPMIFKLTHLTFDQWLMVFKLSFPVILIDEVLKFFARNYIEK

SEQ ID NO: 22328 - protein, 1131 aa, Dunaliella bioculata
MADIKEGVEEGSVKVDMIKEPLTQGDTGVDEVDFAKITLDDAFKYLNCNKHGLSSAEAAARLQQHGPNKLPDSSRNPVLVFLGYMWNPLAWAMEAAAIISIALLDVADFVLIVGLLLINAIISFYEESNADKAIKALTAALAPKAMVVRDGAIVTIDAVNLVPGDVILIRLGNIVPADVKLLEEEGADEGEQEAPMQIDQAALTGESLPAKKFTGDVAFSGSSIKQGERHAVVYATGVNTFFGRAAALISGTNNVSNLQTVMNKMSAICIVTILLWVVVELAVQFGHYSHECVGGREGCPTLLNMLVVLVGGIPIAMPTVLSVTLALGAYKLAREGAIVTRMSAVEEMAGMDVLCSDKTGTLTLNKLSIDKSMVVPVGNMGVDEIMRMGALSANTVTEEPIDMVLWESYPDRETIKRDYKHTKYFPFNPNDKITIATCLEIATGRVFRVLKGSPQVVLAKAWNAAELDATVNQKMVEFANRGFRALGLAMADGDGKDGTKWEMLALLPLFDPPRHDTKETIEHCQNQGIQVKMITGDHLLIGKETAKMLGMGTEMFPSEVMIKARNGDASQLHGYKNFVEMVETCNGFAQVFPEHKFEIVKILQDSNHVVGMTGDGVNDAPALKKADVGVAVADATDAARGAADIVLTEPGLSTIVTAVIGARKIFQRMTTYSKYTIAMTFRICFTFGLITVIYDWYFPTILIVIMAVFNDGAMIALSKDRVVASKTPNSWNITNIFIMGMVYGLYLTLSTWALYQTATKTTFFEDKTPLHSLNDQYSVLQPWCEDEVRAKLGQTIDPYASLCESNSYAKQFDECEGYQKGSGVQVEDVPTLHAQCVTEQRYLRGAMTRSLIYTQVSISGQALVFVVRTAGYSLMERAGTSTYLAFFFAQVGATLFGIFGLGGFEKPRHQLEDCQFCDYSFHEPVDWFDSGIVPESGTESDFTASVIGCGGYVIVAWIWSAIWYVLLDPIKWILFWILNEEGFRDTMSWRESTKRSLDRRSKDDIGDKEFTGPSGMVPANYSNPLGRASMSKPVSAVLDRKSASLVAINRNSMTVSQDPNRALNIGRRSMIGRPSGPVGRTSMPLGRISRTSNTLSTGSKDGQIGRGSKPLNSSSAEIKPDKYDFASTIRE

SEQ ID NO: 22329 - protein, 994 aa, Rana clamitans
MENAHTKTTEECLAYFGVNENTGFSPEQVKKNFEKYGPNELPAEEGKSIWELVAEQFEDLLVRILLLAAIISFVLAWFEEGEETITAFVEPFVILLILIANAIVGVWQERNAEDAIEALKEYEPEMGKVYRSDRKSVQRIKAREIVPGDIVEIAVGDKVPADIRLISIKSTTLRIDQSILTGESVSVIKHTDVVPDLRAVNQDKKNMLFSGTNVGAGKAIGIVIATGANTEIGKIRDEMAATEQEKTPLQQKLDEFGEQLSKVISLICVAVWLINIGHFNDPIHGGSWIKGAVYYFKIAVALAVAAIPEGLPAVITTCLALGTRRMAKKNAIVRSLPSVETLGCTSVICSDKTGTLTTNQMSVCRMFVLDKVEGDVASLNEFTITGSTYAPEGDVQKNDKNVKAGQYDGLVELATICALCNDSSLDFNEAKGVFEKVGEATETALTTLVEKMNVFNTDVKSLSKVERANACNSVIKQLMKKEFTLEFSRDRKSMSVYCTPAKASRAAVGNKMFVKGAPEGVIDRCNYVRVGTTRVPFTSGIKDKILSVVKEWGTGRDTLRCLALATRDTPPKREDMVLEDSTKFADYETDLTFVGCVGMLDPPRKEVMGSIQLCRDAGIRVIMITGDNKGTAIAICRRIGIFGENDDVSSRAYTGREFDDLPPAEQREAVKHASCFARVEPSHKSKIVEFLQSCDEITAMTGDGVNDAPALKKAEIGIAMGSGTAVAKTASEMVLADDNFATIVAAVEEGRAIYNNMKQFIRYLISSNVGEVVCIFLTAALGLPEALIPVQLLWVNLVTDGLPATALGFNPPDLDIMDRPPRSPKEPLISGWLFFRYMAIGGYVGAATVGAAAWWFMYADDGPNVTFYQLSHFMQCTEDNPEFEGHECEVFESPVPMTMALSVLVTIEMCNALNSLSENQSLIRMPPWVNFWLLGSICLSMSLHFLILYVEPLPMIFKLTPLNIEQWFVVLKISFPVILLDELLKFVARNYLDG

SEQ ID NO: 22330 - protein, 898 aa, Escherichia coli O157:H7 EDL933
  unsure (1)..(898): unsure at all Xaa locations
MFKEIFTRLIRHLPSRLVHRDPLPGAQQTVNTVVPPSLSAHCLKMAVMPEEELWKTFDTHPEGLNQAEVESAREQHGENKLPAQQPSPWWVHLWVCYRNPFNILLTILGAISYATEDLFAAGVIALMVAISTLLNFIQEARSTKAADALKAMVSNTATVLRVINDKGENGWLEIPIDQLVPGDIIKLAAGDMIPADLRILQARDLFVAQASLTGESLPVEKAATTRQPEHSNPLECDTLCFMGTTVVSGTAQAMVIATGANTWFGQLAGRVSEQESEPNAFQQGISRVSMLLIRFMLVMAPVVLLINGYTKGDWWEAALFALSVAVGLTPEMLPMIVTSTLARGAVKLSKQKVIVKHLDAIQNFGAMDILCTDKTGTLTQDKIVLENHTDISGKTSERVLHSAWLNSHYQTGLKNLLDTAVLEGTDEESARSLASRWQKIDEIPFDFERRRMSVVVAENTEHHQLVCKGALQEILNVCSQVRHNGEIVPLDDIMLRKIKRVTDTLNRQGLRVVAVATKYLPAREGDYQRADESDLILEGYIAFLDPPKETTXPALKALKASGITVKILTGDSELVAAKVCHEVGLDAGEVVIGSDIETLSDDELANLAQRTTLFARLTPMHKERIVTLLKREGHVVGFMGDGINDAPALRAADIGISVDGAVDIAREAADIILLEKSLMVLEEGVIEGRRTFANMLKYIKMTASSNFGNVFSVLVASAFLPFLPMLPLHLLIQNLLYDVSQVAIPFDNVDDEQIQKPQRWNPADLGRFMIFFGPISSIFDILTFCLMWWVFHANTPETQTLFQSGWFVVGLLSQTLIVHMIRTRRVPFIQSCASWPLMIMTVIVMIVGIALPFSPLASYLQLQALPLSYFPWLVAILAGYMTLTQLVKGFYSRRYGWQ

SEQ ID NO: 22331 - protein, 758 aa, Lactobacillus plantarum
MIEDLTEQQAAAKLAADGFNDVPEPTFNFFKAVVSRLWEPSAWILEGALVIEVVLGKEIQAGFIALMLVFAAVNGAIQSRRAALVLQELAHQLTPTSSVRRAGHWQLIDAKALVVGDLISLQVGSVIPADIRVLTNPIYTDESSITGESVAVIHTSGETAFAGTMVVAGETLARVLATGSHSRAGKTVSLINQNNAPGHLQRLLGKIIGYLALLDSALALIIVGIALIRHADMIQMLPFLAMLFIATIPIAMPSSFAVANSVEARELSRQRILVSELTGIQEAANLNLLLVDKTGTITTNQPQVVQFKNLSARSDQQLLRLAASATDSRHPSVVDQAIVNFAHRYQLKRLPQQEFKPFDASVGYAEALVGEAPTVVRVRIGALSRLYELTAQQPALAIDQLDLTRGRSVAVMINNVLQGVLILQDQPRPDSAAALKRIQHRGVKTIMLTGDNLKTAQAVADAVGLKGQVVSYQTFKTHSRPLAQVAGIAEVVPENKLAIVKAMHRAGYVVGMTGDGVNDAPALKQSEVGIAVDNATDLAKRSAKFVLLTGGLANILTILDNGHRVYQRMLTWTITKLTRTVELTVLLTIGYLWLDYVPLSLNAMVLVAILNDLVTLVLGTDRTTIRHRPEQWDMPRLSKIAGFLATGWTAVGVGLIVWLHGLGLSAGQLSTSLYVYLIFSAMLTILMTRTSGPFWRGRPSRAVGVTIGLNCLLTIGLASSDWGVPAISGWLTLIVIVLVLMTGIGLTVAGDLWRRLTK

SEQ ID NO: 22332 - protein, 920 aa, Pseudomonas putida KT2440
MKRLCVVPPQRQEHSNMTVKYRNTSSAKAERETRLSTRAAREARNGLAVTLANLDASEQGLTEHEAAKRLVRDGANQVAHDPQPHALVQLLKALNNPFIYVLLTLAGISFVTDYWLPVSAGEADDADLTKVIIIMTMVSLSSLLRFWQEYRSNKAADALKAMVRTTATVLRREQIGQAPRLREVPMDELVAGDIVQLSAGDMIPADIRLLEARDLFISQAVLTGEALPVEKYDTLGNVAQKSAAEHGAHQDNLLELPNICFMGTNVVSGRARAVVVATGRRTYFGSLAKAIAGSRSQTAFDRGVNSVSSLLIRFMLVMVPVVFMINGVVKGDWADAFLFALAVAVGLTPEMLPMIVSANLAKGAVAMARRKVVVKRLNAIQNLGSMDVLCTDKTGTLTQDRIILEHHVGFDGQTDKHILELAWLNSHHQSGIRNLMDQAVLHFAGQDHQFQAPYAYAKVDELPFDFIRRRLSVVVKNALGDHLLVSKGAVEEMLAIATHVQEGDKVVALDPCRRQQLMARVDAFNQDGFRVLVVATRQIPADEGKAQYHTEDERDLVIQGLLTFLDPPKETAGPAIAALRDMGVQVKVLTGDNPVVTSKVCREVGLAPGQPLLGQDIEGMDDTTLKLQVEERTVFAKLTPLQKSRVLKALQANGHTVGFLGDGINDAAALRDADVGISVDSGTDIAKESADIILLEKSLMVLEEGVLKGRETFGNIMKYLCMTASSNFGNVFSVLVASAFIPFLPMLAIHLLLQNLMYDFSQLSLPWDRMDKEFLSKPRKWDARNIGRFMLWIGPTSSIFDITTFALMWYVFAANSVEMQALFQSGWFIEGLLSQTLVVHMLRTRKVPFFQSTAALPVVLATGLVMALGIYIPFSPVGAMVGLVPLPWEYFPWLVATLLGYCVVAQAMKTLYIRRFGQWF

SEQ ID NO: 22333 - protein, 990 aa, Emericella nidulans
MAERKISYAADVENGDHSRPTDVNDDAGLDEYGPLNRYISTARDNRCGSTSSAGALSMKQKKKPWYKFWAKAGGENGEEGFVAPEDWLETDLNGLPSSQIEPRRKRGGWNELTTEKTNFFVQFIGYFRGPILYVMELAVLLAAGLRDWIDLGVIIGILMLNAVVGWYQEKQAGNVVASLKGDIAMKAVVKRDGQEQEILARELVTGDIVVIEEGTIVPADVRLICDYDKPETYETYKEYLATANDDTLKENDDDDDDHGIEARLGVSLVAVDQSAITGESLAVDKYMADTCYYTTGCKRGKAYAIVTATAKHSFVGKTAALVQGAQDQGHFKAVMDNIGTSLLVLVMFWILAAWIGGFYRHLKIATPEHSDNTLLHWTLILLIIGVPVGLPVVTTTTLAVGAAYLAEQKAIVQKLTAIESLAGVDILCSDKTGTLTANQLSIREPYVNEGVDVNWMMAVAAIASNHNVKNLDPIDKVTILTLRRYPKAREILARNWVTEKYTPFDPVSKRITTICTCDGVRYTCAKGAPKAILAMSECSPEEAQKFREKASEFARRGFRSLGVAVQKEGEPWQLLGMYPMFDPPREDTAHTIAEAQHLGLSVKMLTGDALAIAKETCKMLALSTKVYDSERLIHGGLAGSAQHDLVEKADGFAEVFPEHKYQVVEMLQQCGHLTAMTGDGVNDAPSLKKADCGIAVEGSTEAAQAAADIVFLAPGLSTIVDAIKLARQIFQRMKAYIQYRIALCIHLELYLVTSMIIINETIKADLIVFIALFADLATIAVAYDNAHFEARPVEWQLPKIWVISVVLGVLLAAGTWIMRASLFLENGGIIQNFGSPQPMLFLEVSLTENWLIFVTRGGKTWPSWQLVGAIFVVDVLATLFCVFGWLAGDYVETSPPSQATFSTNNDTDIVTVVVIWAYSIGVTIIIAVVYYLLTIIPALDNLGRKNRSVVDTKVENLLNHLSKLAIEHEVDANGKSRYTLGARAEPEDDE

SEQ ID NO: 22334 - protein, 990 aa, Emericella nidulans
MAERKISYAADVENGDHSRPTDVNDSAGLDEYGALNRYISTARDNRRGSTSSAGALSMKQKKKPWYKFWAKAGGENGEEGFVAPEDWLETDLNGLPSSQIEPRRKRGGWNELTTEKTNFFVQFIGYFRGPILYVMELAVLLAAGLRDWIDLGVIIGILMLNAVVGWYQEKQAADVVASLKGDIAMKAVVKRDGQEQEILARELVTGDIVVIEEGTIVPADVRLICDYDKPETYETYKEYLATANDDTLKENDDDDDDHGIEARLGVSLVAVDQSAITGESLAVDKYMADTCYYTTGCKRGKAYAIVTATAKHSFVGKTAALVQGAQDQGHFKAVMDNIGTSLLVLVMFWILAAWIGGFYRHLKIATPEHSDNTLLHWTLILLIIGVPVGLPVVTTTTLAVGAAYLAEQKAIVQKLTAIESLAGVDILCSDKTGTLTANQLSIREPYVNEGVDVNWMMAVAAIASNHNVKNLDPIDKVTILTLRRYPKAREILARNWVTEKYTPFDPVSKRITTICTCDGVRYTCAKGAPKAILAMSECSPEEAQKFREKASEFARRGFRSLGVAVQKEGEPWQLLGMYPMFDPPREDTAHTIAEAQHLGLSVKMLTGDALAIAKETCKMLALSTKVYDSERLIHGGLAGSAQHDLVEKADGFAEVFPEHKYQVVEMLQQRGHLTAMTGDGVNDAPSLKKADCGIAVEGSTEAAQAAADIVFLAPGLSTIVDAIKLARQIFQRMKAYIQYRIALCIHLELYLVTSMIIINETIKADLIVFIALFADLATIAVAYDNAHFEARPVEWQLPKIWVISVVLGVLLAAGTWIMRASLFLENGGIIQNFGSPQPMLFLEVSLTENWLIFVTRGGKTWPSWQLVGAIFVVDVLATLFCVFGWLAGDYVETSPPSQATFSTNNDTDIVTVVVIWAYSIGVTIIIAVVYYLLTIIPALDNLGRKNRSVVDTKVENLLNHLSKLAIEHEVDANGKSRYTLGARAEPEDDE

SEQ ID NO: 22335 - protein, 1609 aa, Mycobacterium leprae
MKIPHVTDPVSNMVGGMAQVVRASTHAATGAVNTMQMLASPVAEFAWPVVQSVAKSTGRALGTGHSPNFANRVDPPVRWHNGQRVHLDLDPLLPFPRWHEYAAVVEEPVRRIPGVAKGHVEGSLGRLVIELDKNADSDVVLGKVRDVVIALAADLALTGARSAPKVAPFADPGNPLAILMPLTAAVMDLVALSAAVTGWVTRLPAVPQTIRAAAALVNHQPRMVSLLESRLGRVGTDIALSITTAAASGLTQAVGTPLLDLACRGLQLSEAAAHQRVWRDREPQLASPKRPQAPVVPVISSAGEKSHAAGHNWTAAASNEASHLVVGGSIDAAIDTAKGSMKGPVESYVDSAANGSLIAAASALLAGGGTEDAAGAILAGVPRAAHMGQQAFAATLGRGLANAGQLVLDPGALRRLDQVKVVVIDGAALRGDHRAVLLARGNTPGWDDDRVYEVTDALLHGERAPEPDPDESPATGARLRWVPLQGPSATPVQGREHADLVVNGECVGGVDVGWEVDPYAIPLLQTAHRTGARVVLRHVAGTEDLSASVGATHPPGTPLLKLVRELRTDRGPVLLITAVHRDFASTDTLAALAIADVGVALDDPHAATPWTADIITGTDLAAAVRILSALPVARSASESSVHLAQGGTTLAGLLLITASAGSKSASPITLRRWFSPVNAAAATALVTGVVSASKVLRLPDPTPQPLTAWHALDPEIVYSRLAGVTQPLAVEPGTPDWRRRLDDLSYTRALSPLRKPVTKLARLASATRQEFADPLTPILAVGAAASAIVGSNIDALLVAGVMTVNAITGGVQRLRAEAAAAELFAEQDQLVRRVVVPAVATTRRRLEAAQHATRTVTVSAKSLRAGDVIDLAAPEVVPADARVLVAEDLEVDESLLTGESLPVDKRVDPVAINDADRASMLFEGSAIVAGHARAIVVATGVGTAAHRAISAVADVEVSAGVQARLRELTSKVLPLTLAGGAAVTGLALLRRASLRQAVADGVAIAVAAVPEGLPLVATLSQLAAAQRLTAKGALVRSPRTIEALGRVDTICFDKTGTLTENRLRVVCAVPNTRMPHDPLPDITDPHSAAVLRDAARASTQPHDGQGHTHATDEAILTAASSLNSHTDSTWSLIAEVPFESSRGYAAAIGITGNGKAPMLMLKGAPEKILPRCRFADPEADVAHAESLVRHLAEQGLRVLAVAQCSWGHDTTDDNDTDADAVDAAAHDLELVGYIGLADTARPSSRPLIEALVTAGRNVVLITGDHPITARAIAQQLGLRSDARVVNGTELIGLDEDACAELAADVQVFARVSPEQKVQIVAALQRCGQVTAMVGDGANDAAAIRMADVGIGVSGRGSSAARGAADIVLTDDDLGVLLDALVEGRSMWAGVRDAVTILVGGNVGEVVFTIIGTVFGAGRAPVGTRQLLLVNLLTDMFPALSIAVTSQYEEPGEDEYQTDEEADEARRTHQHEVLTGPTPSLDAPLMRQIVNRGVVTAAGATTAWAIGRWTPGTERRTATMGLTALVTTQLAQTLLTRRHSPLVVATALGSAGVLIGIIQTPVISQFFGCTPLGPIAWSGVITATAGATAVSVLAPQWLNKAFGIAQLNQE

SEQ ID NO: 22336 - protein, 998 aa, Cryptococcus neoformans var. grubii
MSDNEKVGHTEEVPTKESSLENKVQGEDVPAAAAAADEEPRKKREYKEMEHKTEGDLHAKVDMNTIQFTAADLYDKDKVDIEHVVMEEVYQLLQCTDAGLTETEAVDRIGIFGPNKLEEKSENVLLQFLSFMWNPLSWVMEGAALVAIALSNGGGTPPDWQDFVGIVLLLFVNSTIGFVEERNAGNAVKALMDSLAPKARVKRDGQWKEIESAELVPGDLIAFKHGDVCPSDCRLVEAIDVSMDQAALTGESLPVGKSEGDECFSGSTCKQGEAEGIVIATGPNTFFGRAATLVGQDNDQVGHLQQVLARIGSFCLCSIGIFVLLEILILYADFRYPYRRGLDNILVLLIGGIPIAMPTVLSVTLAVGAQQLAKHKAIVTRITAIEELAGVTILCSDKTGTLTTNKLTIDKENVKCYSKWDVEGVCLLAAYASRTENQDAIDGCVVGTLPDPKQARGGIQLLDFKPFNPVDKRTEITYRDDMDGGKLKRATKGMTGIIIELCSRGKTNELEDQLEADVEEFARRGLRALAVAYEDVAGDDPSAEGNGFELVGLLSIFDPPRSDTKKTIDDAMALGVKVKMVTGDQLAIAKETGRRLGLGDHMYPAKVLKEGPEAGGKHANLDEMIMDADGFAGVFPEHKFEIVKRIQNLGHLCAMTGDGANDAPALSRANVGIAVEGATDAARGAADIVLTEPGLSTIVHAIYGSRVIFQRMRNYAIYACAVTIRIVLCFAIMAFAWRFDFPPFMVLIIAVLNDGTIMTLSLDRVLPSTTPDSWDLAEVFSFGVAYGIYLSASTIALYATMENTSFFEDRFGVEPLKGNSYGGHMVIYLQVAIISQALIFVTRSHGPSWTERPSVALMLAFCLAQLVSSIIAAYADWSFSQVHSISGGWIGIVWVWNIVWYFPLDGIKFIMKKTVIAALQRRKARKAGPAVADAALHRAPSRHESLYSNRTNFLTRAANRLRGGAKISMSQNELQRFSSIQAQQSGAALTRAHSRPAA

SEQ ID NO: 22337 - protein, 839 aa, Methanosarcina acetivorans C2A
MGIIVMNQNITSTDEAKEASVAELLEKLSSSERGLTDSEAKERLQKYGPNEITEKKASALVKFLSYFWGPIPWMIEIAVVLSGILHRWDDFAIILALLLLNVTVGFWQEHKADNAIELLKQKLALKARVLRDNKWLEISAGEMVPGDVIRLRLGDICPADVKLITGDYLLVDESALTGESLPVEKHVSDIAYSGSVIRQGEMDALVVATGMNTFFGKTARLVEEAKTQSHFQKAVIKIGDYLIVFALVLVAFTFLVVLFRHESLLEFFQFALVLLVAAIPAALPAVLSVSMAVGAVTLARDGAIVSKLAAVEEMAGMDILCSDKTGTITKNELVLTEINPFQNFSENDVLLFASLASREEDRDPIDDAVLARTKTLKDFSEIAGSYRVLSFKPFDPVSKRTEAEVEDSAGNRFLVTKGAPQAVSALMDSEVAVTSKVTTDSKVTTDDSENTAGSQIEEYVEEFASRGYRALGVGRTDAQGSWHFAGLLALYDPPRDDSAETIRTAQDMGVDVKMITGDHLAIAKEISRQVNLKQDIMLPTSFLDAPDRNAEEIVETADGFAQVFPEHKYHIVELLQHRGHIIGMTGDGVNDAPALKKADAGIAVAGATDAAKSAADIVLTKPGLSTIVNALKESRKIFQRMNNYALYRITETIRVLLFITSSILAFKFYPVTSLMIVLLALLNDAPIMTIAYDNVKYSDLPEKWDMRILLSMATLLGVIGVISSFGILYIGLHIFQLSHEVLQSFIYLKLSVAGHLTIFVARTKSYFWSVKPAKILFAAVIITQIIATLITVYGFLLPAMGWKLAFFVWGYALTAFVITDFIKVQAYRLLNHTGIKFHV

SEQ ID NO: 22338 - protein, 819 aa, Methanosarcina acetivorans C2A
MNNQGLGVFMKENVQLKVDEIKDSPASEIIKKLDSSDKGLSSSEAESRIEQYGYNEIFEKKVSPLRKFFGYFWGPIPWMIEIAAVISAFIHRWEDFVIISLLLLLNGVVGFWQENKADNAIELLKQKMALNAKVLRGGEWSQIPARELVPGDVVRVRSGDVVPADLKLFEGDYLQVDESALTGESLPVEKKSDDIAYSGSVIQKGEMNALVVATGMNTYFGETTKLVAEIRTRSHFQKAVLKIGDYLIVLAACIVAIVLVIEFFFRHTPFLETLQFALVLIVAAIPAALPAVMSVSMAVGATELANKGAIVSKLVSIEEMAGMDILCSDKTGTITQNKLKLSEISPFGNFKENDLLLYGSLASREEDNDPIDNAILLKAKDEGSVQEKIDSYEVKEFTPFDPVIKHTEATIEGPEGKLKIAKGAPQVILDMSDDKEEVRQKVEEKVDSLASKGYRALGVCVGEEGKYRFAGLLGLYDPPHEDSAETIKTANSLNVNVKMVTGDHIAIAKEIASQVGLGTNIITADDFVEKSDSEAQELVEKADGFAQVFPEHKYRIVDLLQKEEHIVGMTGDGVNDVPALKMADAGIAVAGATDAAKSAADIVFTISGLSIIINAIKESRKIFQRMKSYSIYRIAETVRVLFFIATSIIVFNFYPITAIMIVLLAILNDAPIMTIAYDNVKYSLKPEEWNMREVVRVSTFLGILGVIASFLIYYIGARVLYLSPGVLQSFIFLKLAVAGHLTIFVARTRGHFWSPPPGKLLFWSAVVTKLLATFIAVYGIYISPIGWKLAGFIWIYALTAFVITDYLKVGFYKLMDSRG

SEQ ID NO: 22339 - protein, 602 aa, Leptospira interrogans serovar lai str. 56601
METEFEVGVRKFGFFLLHVTLLLVITIFIANVFLHKSVLEFFLFSLALSVGLTPQLLPAIISVNLSHGARKMAEKKVIVKRLAAIENFGNMNIICSDKTGTLTEGTVKLQSSLDIYGNENQEVALSAFLNASFETGFVNAIDQSIRENLNFNLSGFEKKDEIPYDFQRKRLSILVSHSGGHRIITKGALINILEICNTAKSQDGSQIEIEKVRDQILQRYETLGAKGYRILGIAVKEIGEQSKIEKLEEKNMVFLGMLSFYDPPKTKIKETITNLKNLGVTLKVITGDNRFVAMNLSSQIGLENPNILSGHELEKMSNEALIHQVGKVNVFAEIEPNGKERIIIALKKAGNVVGYIGDGINDVSALHSSDVGISVEKAVDVAKNAADLVLLEKDLEVLVDGVKEGRNTFANTLKYVFMATSANFGNMFSMAGVSMFLPFLPLLPKQILLTNFLTDFPEMTIATDRVDSEMIASPKRWDISAIRKFMVVFGMVSSFFDYLTFGVLHWLLKVNQDQFRTGWFIESIVSASLIVLIIRTRNVFFVSKPSRSLFLTTLCVICFTISIPYSPIADWSGSSSSFVFGNVGWDCAYLRNGCRNNKTDFL

SEQ ID NO: 22340 - protein, 869 aa, Chlorobium tepidum TLS
MDGQGRKSKEYEQKPVEETLSELKVDRTLGLDDKAVSERRSRFGFNEIEEKEEALWHRVFRRFWGPIPWMIEVAAILSAAVQKWEDFSIIFVMLLVNAGLDFMQEHRALNALKTLKQRLSKEVTVRRNGQFVRVPVRELVPGDIVKIRIGDIVPADVQLLDGDYLQIDQSALTGESLPVTRKTGAVAFANTIVKQGEMLAVVLNTGMNTSFSSVVALVAEAQRQERSHFQKMVIQIGNFLIMVTLVLVLLIVMVSLFRHEPLLDIIRFALVLSVAAIPVALPAVLSVTMAVGAMNLAKRQAIVSRLAAIEELAGVDIFCTDKTGTLTKNQMEVANPEVLEGFTEQELFLYAALASRPENNDPVELPIFSYLDTKLKSVDWKSWKQTSFTPFDPVSKRTEADAEKDGHTVHVVKGAPQVVIEMAGLDEARTRKLNDSVNELASKGYRTLGVGVKEGEGMFRMIGLIPLYDPPREDSKQVIDEMHKFGVKVKMVTGDNLAIAREIGGILGLEQKTIRSSQLSGASANELLNLAEVLATAIYRKLKGDVELREAKAFASDVMEQVGKLYDTRLLEREFIHTHESAIVEMIEDVDIFAEVVPEDKYRIVDTLQKGGHIVSMTGDGVNDAPALKKADCGIAVSNATDAARAAADIVLTAPGLSVINAAMQQARLTFARMKSYATFRIAETIRIILFMTLSIVVFNFYPITPLMIILLALLNDIPILAIAYDNSTIHPTPVRWKMQELLIIASSLGLFGVIASFLLFFLLQQYGFSEPMIQTLLFLKLIIAGHSTLYVTRSEGWFWQRPWPSPLLFGATFGTEILGTIFAVYGLFVTPIGWTYALLIWAYALLEFVINDAIKLAVKRVFLQRNHD

SEQ ID NO: 22341 - protein, 886 aa, Chlorobium tepidum TLS
MFRTLYNKISSTSIREEAAQSHVRSEDEQFLLKLCNAPVDEALRLMESRVDGLDSQEASKRLSKYGKNEISLATRPSFLQDILHRLSSPLVIQLVLIAVVSGVTGDMTSSAIVGMMILLSVGTSYVLERRSGNAVEALGKRVQSRAHVIRNGLEAEVPLSELVPGDIVQLQAGSVIPADLRLISAKDFFVGQAALTGETMPVEKSADAGETGNLGILELRNACFQGSSVSSGSARAVVVNTGSRTFFGAIAERLNQRRDETDFDKGIRSFTWLMIRFMVVMVSTVFLIVGLTKGNWLESLFFSLSVAVGLTPEMLPMIVTVNLAKGALSMARKKVIVKQLSSIQNFGAIDILCTDKTGTLTQDHVLLEMAVDVMGEQSDNVLRYAYLNSFFQTGLRNLLDRAVLDHQEFAVDGNCKLIDELPFDFQRRRMSVVVDYEGDHVLISKGAVEEIFACCDRYQIDDEIYPLIGMIRDDLFEEVAALNNNGYRVLAIAYNEFPPDRKRFTHDDEKNLILLGYIAFLDPPKDSTAQALVKLREAGVKVKILTGDNALVTRKICKDVGMAVNRVVTGDELARLSPDLFGKAVEEADVLAKLSPLQKEEVVQSLRKQGHVIGFMGDGINDAPALRAADVGISVDSAVDVAKESADIVLLEKSLMVLDDGILEGRRVFTNIIKYIRMGASSNFGNMFSVVGASYLLPFLPMQPIQILLNNLLYDFSQTGIPTDNVDEEQVRSPRKWDIGNIKWFMIVIGPISSIFDYATFALMWFFFNSKLFIDPAATGAAKAHAVQLFQTGWFVESLLTQALIVHIIRTRKIPFLESHASLPMLLTTLAVMAIAVWLPYSPFASLFGMVPLPLAYFGWIALFLLSYAALTHKIKTWFFKRFGGN

SEQ ID NO: 22342 - protein, 851 aa, Shigella flexneri 2a str. 301
MPEEELWKTFDTHPEGLNQAEVESAREQHGDNKLPAQQPSPWWVHLWVCYRNPFNILLTILGAISYATEDLFAAGVIALMVAISTLLNFIQEARSTKAADALKAMVSNTATVLRVINDKGENGWLEIPIDQLVPGDIIKLAAGDMIPADLRILQARDLFVAQASLTGESLPVEKAATTRQPEHSNPLECDTLCFMGTTVVSGTAQAMVIATGANTWFGQLAGRVSEQESEPNAFQQGISRVSMLLIRFMLVMAPMVLLINGYTKGDWWEAALFALSVAVGLTPEMLPMIVTSTLARGAVKLSKQKVIVKHLDAIQNFGAMDILCTDKTGTLTQDKIVLENHTDISGKTSERVLHSAWLNSHYQTGLKNLLDTAVLEGTDEESARSLASRWQKIDEIPFDFERRRMSVVVAENTEHHQLVCKGALQEILNVCSQVRHNGEIVPLDDTMLRKIKRVTDTLNRQGLRVVAVATKYLPAREGDYQRADESDLILEGYIAFLDPPKETTAPALKALKASGITVKILTGDSELVAAKVCHEVGLDAGEVVIGSDIETLSDDELANLAQRTTLFARLTPMHKERIVTLLKREGHVVGFMGDGINDAPALRAADIGISVDGAVDIAREAADIILLEKSLMVLEEGVIEGRRTFANMLKYIKLTASSNFGNVFSVLVASAFLPFLPMLPLHLLIQNLLYDVSQVAIPFDNVDDEQIQKPQRWNPADLGRFMVFFGPISSIFDILTFCLMWWVFHANTPETQTLFQSGWFVVGLLSQTLIVHMIRTRRVPFIQSCASWPLMIMTVIVMIVGIALPFSPLASYLQLQALPLSYFPWLVAILAGYMTLTQLVKGFYSRRYGWQ

SEQ ID NO: 22343 - protein, 898 aa, Shigella flexneri 2a str. 2457T
MFKEIFTRFIRHLPSRLVHRDPLPGAQQTVNTAVPPSLSAHCLKMAVMPEEELWKTFDTHPEGLNQAEVESAREQHGDNKLPAQQPSPWWVHLWVCYRNPFNILLTILGAISYATEDLFAAGVIALMVAISTLLNFIQEARSTKAADALKAMVSNTATVLRVINDKGENGWLEIPIDQLVPGDIIKLAAGDMIPADLRILQARDLFVAQASLTGESLPVEKAATTRQPEHSNPLECDTLCFMGTTVVSGTAQAMVIATGANTWFGQLAGRVSEQESEPNAFQQGISRVSMLLIRFMLVMAPVVLLINGYTKGDWWEAALFALSVAVGLTPEMLPMIVTSTLARGAVKLSKQKVIVKHLDAIQNFGAMDILCTDKTGTLTQDKIVLENHTDISGKTSERVLHSAWLNSHYQTGLKNLLDTAVLEGTDEESARSLASRWQKIDEIPFDFERRRMSVVVAENTEHHQLVCKGALQEILNVCSQVRHNGEIVPLDDTMLRKIKRVTDTLNRQGLRVVAVATKYLPAREGDYQRADESDLILEGYIAFLDPPKETTAPALKALKASGITVKILTGDSELVAAKVCHEVGLDAGEVVIGSDIETLSDDELANLAQRTTLFARLTPMHKERIVTLLKREGHVVGFMGDGINDAPALRAADIGISVDGAVDIAREAADIILLEKSLMVLEEGVIEGRRTFANMLKYIKLTASSNFGNVFSVLVASAFLPFLPMLPLHLLIQNLLYDVSQVAIPFDNVDDEQIQKPQRWNPADLGRFMVFFGPISSIFDILTFCLMWWVFHANTPETQTLFQSGWFVVGLLSQTLIVHMIRTRRVPFIQSCASWPLMIMTVIVMIVGIALPFSPLASYLQLQALPLSYFPWLVAILAGYMTLTQLVKGFYSRRYGWQ

SEQ ID NO: 22344 - protein, 898 aa, Escherichia coli CFT073
MFKEIFTRLIRHLPSRLVHRDPLPGAQQTVNAAVPPSLSAHCLKMAVMPEEELWKTFDTHPEGLNLAEVESAREQHGENKLPAQQPSPWWVHLWVCYRNPFNILLTILGAISYATEDLFAAGVIALMVAISTLLNFIQEARSTKAADALKAMVSNTATVLRVINDKGENGWLEIPIDQLVPGDIIKLAAGDMIPADLRILQARDLFVAQASLTGESLPVEKAATTRQPEHSNPLECDTLCFMGTTVVSGTAQAMVIATGANTWFGQLAGRVSEQESEPNAFQQGISRVSMLLIRFMLVMAPVVLLINGYTKGDWWEAALFALSVAVGLTPEMLPMIVTSTLARGAVKLSKQKVIVKHLDAIQNFGAMDILCTDKTGTLTQDKIVLENHTDISGKTSERVLHSAWLNSHYQTGLKNLLDTAVLEGTDEESARSLASRWQKIDEIPFDFERRRMSVVVAENTEHHQLVCKGALQEILNVCSQVRHNGEIVPLDDTMLRKIKRVTDTLNRQGLRVVAVATKYLPAREGDYQRADESDLILEGYIAFLDPPKETTAPALKALKASGITVKILTGDSELVAAKVCHEVGLDAGEVVIGSDIETLSDDELANLAQRTTLFARLTPMHKERIVTLLKREGHVVGFMGDGINDAPALRAADIGISVDGAVDIAREAADIILLEKSLMVLEEGVIEGRRTFANMLKYIKMTASSNFGNVFSVLVASAFLPFLPMLPLHLLIQNLLYDVSQVAIPFDNVDDEQIQKPQRWNPADLGRFMVFFGPISSIFDILTFCLMWWVFHANTPETQTLFQSGWFVVGLLSQTLIVHMIRTRRVPFIQSCASWPLMIMTVIVMIVGIALPFSPLASYLQLQALPLSYFPWLVAILAGYMTLTQLVKGFYSRRYGWQ

SEQ ID NO: 22345 - protein, 911 aa, Thermobifida fusca
MEGQNRMTGPAVVDRQWHTVAAHEVFPALETSPDGLTEEEARRRLAEYGPNRLEEAPPPSAVAVFLRQFASPVIAILLFALLLTVVLREWLDAAVIAAALLVNAGIGFVQERKAEQAVRALMNLSQPRARVVRDGRRREVESTDLVPGDVVFIESGSRIPADIRLVEAHALEVDESLLTGESEPVVKSTATAAADAGVGDRSGVAFSGTMVVSGRGMGVVYATGRRTELGAIAGLLKSEPETATPLKERMTRLSRVIVAATLVSALLVMAIGLVRGGDPMELLLVAVALAVAAVPEGLPIVLTVALAVGVTRMARRNAIVRRMLAVEALGSATVIGSDKTGTLTENRMTVRRLWSPAGGEAGPAAVTPYWGNITELPLEQVDPYVLLVLCGALTNEATMASEEGREASGDPTEVALLEAAYDAELLHTARDVRFPKTAEVHFEPARRFSATARRWGNREVLFVKGAPERVVEMCDAQVGRVEAGRWQPAALRPGELHAAGERMAAEGLRLLALAVSRPYEPGAASVDPHDPSGLVLLGLVGIMDPPRPGVREAVQDCREAGVRVVMITGDHAVTARAIAAELGICEPDAPVLTYQQIAGLDDEELRAAVAQVNVYARIPPEGKLRLVRALEANGEVVAVTGDGVNDAPALKAASVGVAMGQEGTDVAREAAEIVLADDNFTTIVHAVEEGRVTFDNIRRAVFFLVSIGAAMVVALTVSTLLGWPLLMVPAQLLWLNLVTSGVQDIALVFERAEPGLLRRPPRSVHEGILSRLLWQRVGVTGVVMAAGTLAMFWWEWQRTASLTAAQTMALTTMVVFMAFQAGNARSDTRSVLGMPLRYNPYLVVAVAGSFALHVAALYFPPTQVLLRVEPLDAAAWARIAAVAVSVVVVVELEKMVRRAWARHGEPSGARQ

SEQ ID NO: 22346 - protein, 1068 aa, Thermobifida fusca
MGGIRSGFVQQAHPVPPDLADVRRGAQHVLGRGRPGCSEPWTVLGGARRGGVQPGVDDDGHAGREFLLGQVGAVPAHQGGLLGVGDDEVERVEGPQLVPAQAQGARGGGPQRKLAPAAAGHSRRHGGVEHGPPSRSGEFLHPPVEYCGHARRCRLRGCNRQPGAAGLGVATTDEVRPLRPVLSWPVKRAVHHFVAEGGQHNRDGSGGIESHNGGTHWDCSSVSPGNGSERAPSASPVGSGCAPRLRLSQHAFFQYGTGWWSMVQQDGQAALPEASDVGLTSAQAAQRLAAGLGNDVPVRASRTVGQIIRANVFTRINAMVAVLFGVIAVIGPVQDGLFALVIVINTLVGIVQELRAKKTLDSLAIINAARPRVVRDGVAVEVRPQEVVLDDVIELGSGDQAVVDGVVVSASGLEVDESLLTGEADPVLKQPGDPILSGSFVVAGSGRFRATRVGRDAYAARITEEASRFSLVRSELRSGVDRILRFITWLLFPIGGLLLYSQLFLDAHVTAEVSAGGTISGPFADALRGTVAALVSMVPEGLVLLISIAFAVGVIRLGRRRCLVQELPAIEGLARVDVVCTDKTGTLTEAGMRLAEVRPLDAAADADALTEVLAALAAADPHPNPSMAAIRDSCGTPPDWPVAAVRPFSSARRWSGASFTTPQGKQHWVLGAPEVLADADSPAVAAAARTAAQGLRVLLLGRADAAVDGPHQVTPMALVVLEQRVRPDSAPTLDYFARQDVAVKVVSGDNAASVAAVAHTLGLPGADQPVDARDLAPQDADFAEKVEKATVFGRVSPEQKRSMVAALQQHGHTVAMTGDGVNDVLALKEADIGVAMGSGSPAARSVAQIVLLDDRFATLPHVVAEGRRVIGNIERVANLFLTKTVYSMTMATVVSLLAVAYPFFPRHATLINAVTFGIPSFFLALAPTTERARPGFVARTLRLAVPAGLVSGLAAMTTYFLVLDGADTPTLADRTAVLITLCATTLWVLLLVARPYVWWKAVLVAAMVGLLLAALLTPVGQAFFALDMSDPAAVGTALAVAGVAAAIITVIRVVDARWLSRERDTRDS

SEQ ID NO: 22347 - protein, 863 aa, Thermobifida fusca
MVMTREPQADPLQGRPVPVRSGLTGPDAARRLGHDGRNLVPPPQRTLPFLLLASSFTHSFALLLWAAAALAFIGGLPEAAWAVVTVIVVSGLVGFVLDYWSDRIGQRLRRRAPAAVRVIRDGRQARVNADELVVNDVVLLRAGDRVPADIRLTEVHDFVVVEVGVTGMREMLRCDEGTTVFAGTHVAAGEAEGVVVTTGMWTRLGQDSPLLRHARRPSGPLVENLRDLTAAAAAAATGTALVVFLLTLLVGVPPAEGFLPAVGLAVALVPLGLRSIVHLCLAWAAQRMADAHALVRHSAAVQQLGTVTFLCIPAAGVLTRGEPVAVEVWTPEGTVQVTGTGYAPEGALVGDAAAVAAAHDLALSAALCSSDGYFFTDGQWRPVGDPVEAACHVLAARAGVDVSLAAVERRYPFDPHRRRASAFAKGSVHVKGAPDAVLPRCRAVAGAADASAAMADRGLRVLAVARRDLAAPPEQAEDAERDLTLLGLIGLADPPRSDARTAVTRCRRLGIRLALVTGEDPRTALAVARATGLARPGAPVLHGAELPDDLREIGELLDSDGAVVSRVTPEDRRRVTVALQHRGYTVATTAGGAADDAALRRADVGIAPGYAGADTARDSADLVLLDSGIATVAAALGAGRAIRVTLRRALTYRLTGVVAMATPFLVWAVTGGAVPPALTLGQVLAIGVGVDLLPALALGVGPRGWRALRDPPPDGEFLVDRRLAVRVGGVLGPVEAVTALFTFGVVLWVNGWQWGQSPAPLLLAQASGAAFATIVLGQVAAALACRSETRPFDAVPWRSDPLPRGLGAQLLLLWLFFTAPPLAGWLGSTVPPGFVWPGVVCVVPALLAADTIHKVVRPSQAPG

SEQ ID NO: 22348 - protein, 391 aa, Clostridium thermocellum ATCC 27405
VLGVAFRRLDSKNYRLDDVEKDLVFAGLIGMIDPPRKETLDAVRKCKLAGIKPVMITGDHKITAAAIARELNIASEGDRVLTGAQLEQMDDKRLEELVDEVSVYARVSPRHKLRIVRALKKRGHVVAMTGDGVNDAPAIKEADIGVAMGITGTDVTKEASSMILLDDNFATIVAAVEEGRVIYNNIRKFIRYMLSCNIGEVLTMFVGTLIGLPLPLLPIQILWVNLVTDGLPAIALGLEPGDKDIMMRPPRGAKENIFSNGLWQLIIFRGALIGLSTLAVFASILNFTSNVDVARTAAFVTLVITQLIHVFECKSERKNIFEIPLFNNIPLVLAVLCSLVMILGVVYIPLFQGIFKTVPLSLNDWILIGGFSALGPVISSFFKVNYKYIRR

SEQ ID NO: 22349 - protein, 356 aa, Clostridium thermocellum ATCC 27405
  unsure (1)..(356): unsure at all Xaa locations
MKHYFESVETVLEHMGSSKNGIDPKEASLRLEKYGRNKLDEGKKKTVFGRFLDQLKDPMIIVLIVAAIISGFAGEPADSIIILMVVLINSILGVVQEGKAEKAIEALQKMSSPYSKVRRNGRVMQIKSEEIVPGDIVLLEAGDAVPADMRIIEASSLKIEEASLTGESIPIEKDAGAIPPSDKDIPLGDRRNMAYMGTNVVYGRGEGIVVNTGMSTEMGKIANIISGTEEEKTPLQKKLAELSKVLSIAVLGICIFIFVFGVLKNGXXXXXXXXXXXXXXXXXXXXXXXXXXXXXXXXXXXXXXXXXXXXXXXXXXXXXXXXXXXXXXXXXXXXXXXXXXXXXXXXXXXXXXXLRH

SEQ ID NO: 22350 - protein, 831 aa, Trichodesmium erythraeum IMS101
MNDRQNIHNTSIIHGLTKDQVINLRAVGRGNNIKLDTSRSYRQILKENLFTFINTVFLSISLVLISLSRYGDAFLVIIVILGGVIVSVCQEIWAKQKLDQIALLARPLATVIRETKQQNIDPSEIVVGDILVVHSGDQIVVDGQVVGKGQIEVDESLLTGESDLVPKQAGQPVYSGSFCVSGTAHYEAQKVGTESFAYQLTVSARAFRQIYTPLQQEINLVIRVFLLLSCFLWILVSINWYFGFYKFVDTVQYAAVIAGLVPSGLYLAITLAYALGAVKMVGQEVLIQQANAVESLSNVDILCLDKTGTLTTNHISLQAIYPIGIDEIKLENILGEYAASTTSKNKTIEALERVFPRPKRSLTFEIPFASARKWSGMSFATEEQNSPSGTYILGAPEILAEVTPLSRKFTQQIQKLAQKGFRVLLFAYNPNISSLDQDLEKLQLPTELFPLGIISFQDELRPEARETIEGFSKVGIKIKVISGDNPQTVATLALQAGLSSNIQVISGSELAKLDEDQFIQAAKSKTIFGSVTPKQKAKLIHSFKKQGHYVAMIGDGVNDVLSLKEANLAIAMEGGSKATRSVADIVLLNNSFASLPHTFLEGQRIRNSIQDVLKLFMIRVFCVSILIFSTGFIGGFIGGTFPLLNKHSAVVTLISVGFPTFCIPIWAKPGILPRRSMIRSLLHFTLPATFSLTLVALLVYLTYLAIPFSGNELVIDLDQVNEFLSVPRSALVTIMILCGLLLVPFLKPPTKAWVGGETYSGDWRYTFVALALLGVYIVILAVPPLRQFFELSLLSTHDYLVIIWVALVWCLLLRYVWRTKLLDKFLGVDLS

SEQ ID NO: 22351 - protein, 905 aa, Brucella suis 1330
MNVAVRTANNKNFKKDERRLSMRAVREASNEIELTLANVGSRRDGLTEGDAITRLYRDGPNEVARERRIPALVQFALAFKNPFIMVLVVLGAISAFTDIWLPLETGEEADPTKVIIIAVMVLASALMRFIQEYRSGRAAEALKAMVRTTATVWRRVSAGTSSAPREIPMRELVVGDIVQLSAGDMIPADLRLIESRDLFISQAVLTGEALPVEKYDTLGAISEKSAMATASQDADMLDLPSICFMGTNVVSGTATAVVVATGQRTYFGSLAKAIVGSRAQTSFDRGINSVSWLLIRFMLIMVPVVFLINGFTKGNWVEAMLFGLAVAVGLTPEMLPMIVSSNLAKGAVAMARRKVVVKRLNAIQNFGAMDVLCTDKTGTLTQDKIILEHHIDVSGKADDKVLRLAWLNSYHQSGVKNLMDQAVVSFANRVPEEVMRTARLYRKVDELPFDFIRRRLSVVVEGVGGEHLLVCKGAVEEMLAICTTVRDGETVRALDAVTREKLIATARAYNADGFRVLVVATREIPGAETSAQYRIADEAGLTVQGFLTFLDPPKETAGPAIAALAEHGVCVKVLTGDNEIVTRKICREVGLEAGIPILGSEIEKLDDEALRVVAEERTVFAKLTPLQKSRVLQALQANGHTVGFLGDGINDAPALRDADVGISVDSGADIAKESADIILLEKSLIVLEEGVVTGRETFGNILKYLNMCASSNFGNVFSVLVASAFIPFLPMLAIHLLIQNLMYDISQLALPWDKMDKEFLAKPRKWDARNIGRFMIWIGPTSSIFDITTFALMWYVFSANSPQMQSLFQSGWFIEGLLSQTLVVHMLRTQKIPFFQSTAALPVMLMSALIIALGIYIPFSPIGEMVGLVPLPWAYFPWLAATLVSYCLVAQGMKVIYVRRFGQWF

SEQ ID NO: 22352 - protein, 924 aa, Pseudomonas fluorescens PfO-1
MPVFRCPRRGRTCSTVSRLTIGATAMKLTLKEFFAGFLRTRHIARHFRRLALLETLSDTTVSREVPPTLANTLVDAAHCDSGVLLSNLGTHTDGLTDFEVDVLRAQHGLNEVEHEQPLPWWTHLWHCYKNPFNLLLTLLAVISWLTEDLKAAIVIFSMVVLSTLLRFWQESKSNQAADALKAMVSNTATVLRRDAPRAELPIKQLVPGDLIVLSAGDMIPADCRVLSAKDLFVSQAAMTGESMPVEKFPRQADRDTRNPLELDNILFMGTNVVSGTAVAVILTTGNSTYFGALAQRVGATDRAVTSFQQGVNKVSWLLIRFMFVMAPLVLFINGFTKGDWTEALLFALSIAVGLTPEMLPMIVTSTLAKGAVFLSRKKVIVKRLDAIQNFGAMDVLCTDKTGTLTQDRIFLARNVDVWGEDSDDVLEMAYLNSYYQTGLKNLLDVAVLEHVEIHRELKVGTAFRKVDEIPFDFNRRRMSVVVEGRGQPHQLICKGAVEEVLSVCSRVRHGEVDEALSDELLAKIRQVTAAFNAEGLRVVAVAARSMPEGRDTYSLGDEQELTLIGYVAFLDPPKESTAPALKALAEHGVAVKVLTGDNELVTAKICREVGLAQQGLLMGNDIERMSDAELAVAVETTNVFAKLTPSHKERIVRILKGNGHVVGFMGDGINDAPALRTADIGISVDSAVDIAKEAADIILLEKSLMVLEEGVLEGRRTFANMLKYIKMTASSNFGNVFSVLVASAFIPFLPMLPMHLLVQNLLYDISQIAIPFDNVDDEMLKQPQRWQPGDVGRFMLFFGPISSIFDITTFALMWYVFDANTPDHQTLFQSGWFVVGLLTQTLIVHMIRTPKIPFLQSRAAMPLLVMTGIIMAVGIFLPMGPLAHYFKLQALPSMYFVFLPVILLAYMALTQAVKGFYIRRFGWQ

SEQ ID NO: 22353 - protein, 874 aa, Mycoplasma genitalium
MNSWTGLSEQAAIKSRQEHGANFLPEKKATPFWLLFLQQFKSLVVILLLLASLLSFVVAIVSGLRSNWNFNHDLIIEWVQPFIILLTVFANSLIGSIQEFKAQKSASALKSLTKSFTRVFRNGELISINVSEVVVGDIIFVDAGDIIPADGKLLQVNNLRCLESFLTGESTPVDKTIDSNEKATILEQTNLVFSGAQVVYGSGVFQVEAVGIKTQVGKIAKTVDDSVTKLSPLQQKLEKIGKWFSWFGLGLFAVVFLVQTALLGFDNFTNNWSIALIGAIALVVAIIPEGLVTFINVIFALSVQKLTKQKAIIKYLSVIETLGSVQIICTDKTGTLTQNQMKVVDHFCFNSTTQTDLARALCLCNNASISKDANKTGDPTEIALLEWKDRSQLDLKTYYRVYEKAFDSIRKLMTVVVQKDNRFIVIVKGAPDVLLPLCNNVQNEVKNIENLLDQSAGQGLRTLAVALKVLYKFDQNDQKQIDELENNLEFLGFVSLQDPPRKESKEAILACKKANITPIMITGDHLKTATVIAKELGILTLDNQAVLGSELDEKKILDYRVFARVTPQQKLAIVSAWKEAGFTVSVTGDGVNDAPALIKSDVGCCMGITGVDIAKDASDLIISDDNFATIVNGIEEGRKTFLTCKRVLLNLFLTSIAGTVVVLLGLFILGQVFKTNLLQQGHDFQVFSPTQLLIINLFVHGFPAVALAVQPVKEKLMVGSFSTKNLFYNRQGFDLIWQSLFLSFLTLLFYSLGIIYAINNRDLQTSGDLINRAGSTCGFFILGASAALNSLNLMVDKPLLMTNPWFFKLVWIGSLASILVFLLIIFINPLGLVFNVLQDLTNHPVLISYSFGGVILYMGMNEVVKLIRLGYGNI

SEQ ID NO: 22354 - protein, 805 aa, Methanocaldococcus jannaschii
MWGVVMNVEEIEEEYKTSIKTGLSTEEAKKRLKIYGYNEIPEKKVHPIIKFLSYFWNPIAWMIEIAAILSAIIKHWVDFVIILILLLVNGVVGFWEEYKAENVIEFLKQKMALNARVLRDGKWQIIPAKELVPGDVVRIRIGDIVPADIILVDGDYLVVDESALTGESLPVEKKIGDIAYSGSIVKKGEMTGIVKATGLNTYFGKTVKLVEKAEKVSSYQKMIIKIGDYLIVLAVILIAIMVAVELFRGKSLIETAQFALVLAVSAIPAAMPAVLSITMAIGALNLAKKDAIVKKLVAIEELAGVDILCSDKTGTLTKNQLVCGEIIALNGFSKEDVVLFAALASREEDADAIDMAILNEAKKLGLMEKIKNYKIKKFIPFDPVIKRTEAEVTNDEEFKVSKGAPQVILDLCNADEELRRKVEEIVDKLAENGYRALGVAVYKNGRWHFAGIIPLYDPPREDAPLAVKKIKELGVIIKMVTGDHVAIAKNIARMLGIGDKIISISELLKKLKRGEIKEEKFDEIVEEADGFAEVFPEHKYKIVDSLQKRGHLVAMTGDGVNDAPALKKADCGIAVSNATDAARAAADIVLLSPGISVIVDAIQEARRIFQRMESYVIYRITETIRILFFVELCILILGIYPITALMIVLLAILNDIPILAIAYDNVVEPKSPVRWRMREILMLSTALGLSGVVSSFLIFYISDVFLHLTIAELQSFVFLKLILAGHATIFVTRIRDRLWKKPYPSKLLFWGVMGTNIIGTIVAAEGIFMAPIGWDLALFMWLYAHVWMLINDEIKMILLKRLKID

SEQ ID NO: 22355 - protein, 535 aa, Methanosarcina barkeri
MIEAAAAISGVIHRWEDFVIISLLLILNAVVGFWQEHKADNAIELLKQKMALNARVLREGQWAQIPARELVPGDIVRIRSGDVVPADLKLLEGEYLQVDESALTGESLPVEKKSDGIAYSGSVIQKGEMNALVVATGMNTYFGETTKLVAGIKSRSHFQKAVLNIGNYLIITAGCIVAIVLVVEELFRHTPFLETLQFALVLIVAAIPAALPAVMSVSMAVGATELAGKGAIVSKLVSIEEMAGMDILCSDKTGTITQNKLKLSELVPFGDFKENDLLIYGSLASREEDNDPIDNAILQKAKDTESLEDKIKTYTVKKFTPFDPVIKHTEATVKGSEGEFKVAKGAPQVILGMSSNKEEIRQKVEEKVNSMASKGYRALGVCAEEERKYRFVGLFGLYDPPHEDSAETIKTANSLNVDVKMVTGDHVAIAKEIASQVGLGTNIITADDFKEKSDSEAQKVVEKADGFAQVFPEHKYKIVELLQKKEHIVGMTGDGVNDVPALKLADAGIAVAGGYGRCKIGCRHRIYKSRSFDNY

SEQ ID NO: 22356 - protein, 828 aa, Methanosarcina barkeri
MPEMLQRLQTTYEGLSSSESSERLKKYGANLLKPKKSSNTLKILLSQFKSPIILILLFAAGLSFFLGDVTDTVIIITIILISSLLGFWQEKGAADAFEKLLSAVEVKATVVRDGEEKEVPIEQIVPGDVIIFSAGDIVPADCLILESKGLFVNEATLTGETYPVEKSTKTLNSETPLAKRTNSLWMGTSVESGSGKALAVTTGKNTEFGKISEELRTSAPETEFERGIAKFGHFLMEVTMLMVITIFAINVYLQRPILDSFLFSLALAVGLTPQLLPAIISVNLSHGAREMAENKVIVKRLASIENLGSMNLLCSDKTGTLTEGELKLHSIRDVKGSQSEKILLYASLNAYYQKGFKNPIDRAILTQNRFEMGEYKSLDEVPYDFIRKRLSVLVSKNENNLMITKGALSNILEICTLAEVEPGKIVEISEVKEKIEQQYKDFSEKEFRTLGVAYREINRQTKIEKEQEKGMTFIGFLLFFDPLKPEIAKTIENMEQLGISLKIITGDNRLVATSIGKEVGFDASRILTGSEIYQMTSEALIGKVNDIDIFAEVEPNQKERIILALKKRGNVVGYLGDGINDASALHAADVGISVDRAADVAKEAAQIVLMEKSLDSLVEGVKGGRKTFANTLKYVFMATSANFGNMFSMAGASLFLPFLPLLPTQILLTNLLTDFPEMTIATDTVDKELVEEPHRWDINFIRKFMMVFGSTSSVFDYLTFGTLLLLLPGMIEQFRTGWFIESVISASMIVLVIRSRKPFFESRPGKYLLIATVLIVVMTLVFPLTPFAALFGFKPLPLQVILTLGAIIGLYIIAAEAIKRIFYKKVKF

SEQ ID NO: 22357 - protein, 835 aa, Aquifex aeolicus VF5
MLKAHSLSPEEILRILKTDRRGLSEEEAKKRLKIYGKNEIEEEEESLIKVFFRQFNNPFVYILFVASGISAYIGKKEDSLIILAIIFVNSLLGFFQEFRAITSLKALKKLTEVKTKVYRDGKLKVIPASELVPGDVVYIQEGDVVPADIRLIESVGLMVDESVLTGESVPVEKNADVVLPEDTPVYNRSNVVFKGTHVVKGWAVGVVYATGRQTEFGKISEKAKEKSPETPLMRALKKFSLAWMVIIFFLLSILFLIGIYQGRDIYEVLLLIVSELVSAVPEGLPLVITFTLVIGAIALSRRKVLIRYLPATETLGSTTFICSDKTGTITEGKLKVQEFFALNEKFLNLISALCNSSDGESGDPVDLALLRWLEENDIDWKKLREEYRTVKVFPFDTKKRYMAVIVEKEGKYYLLVKGAFETLSNFSEGISEELIKVHDVLAENGLRVLFFAYAEIPEPVEDIESLKLKPAGFVGFLDPPKEGVKEAVVNARRAGIRVIMITGDNLKTAVAVAKQTEIYREGDLAVEGKDLSKYSDAELYNLLKRVSVIARALPEDKYRVVKVLQEKGEIVAVTGDGVNDVPALKVADIGVAMGSGTEAAKSVAKMVITDNNLKVIVEAVRWGRIIVRNIKRAITYLLTTSFGEITLLSSAILMKLPLPLYPTQILWINIVTDGVQDKTFPFNKEEIDVMKEKPQKPEKVFLDKRLFLRFLTGGLFIGFINLILFKHLLSVYSYEVAVTITFTSMVVNQWAVGIQTVRDYPFFYKPWRNFQMNPYIFIGIFIGLILQLLAIYVFPNYFHAVPLSLEHWFYVILTTLSVFIFIEIRKLVFTIFSER

SEQ ID NO: 22358 - protein, 832 aa, Bradyrhizobium japonicum USDA 110
MTKPPNNQASQFWRLPTDALCTRLGCSLQGLTATEAAERLGRFGPNSDAPPRIEGAARAVLRRLLEPLSLILLVAGIVSMLTGDDVGGLIIVLILAGSIGLDTIQEGHAVRAAEILRRSVALKAEVRRDGAFCEIDVDHVVPGDLLRVRAGDIIPADGLILESTAFTAGEAALTGEPYPVQKRAGAATDPDDTSNALFRGAVAQTGEAIALVVRTGRDTVFGAAASALAETQAPSPFERDLREFGLVIARATLALVLVVLTVRVVFGRPVLDSLLFAVALAVGLTPELLPMITTVTLSRGALRMAGRKVIVKRLAAIHDLGAMTVLCTDKTGTLTSAEITLARSLDAEGKDNARAAQLGAIAASLGGDRGSLDAALVAGRPDAAQGWTLAGRQAFDFSRRLGSVLATGPEGTLLIVKGAPEAVLALCTMDERARTAALARVRELASEGLRTVAIASRAWSGVLREVETEDETDLAFEGFCAFADPPKPTAAAAIAQLAARGVGLKILSGDDPVVVKRLASLVGLNPERVLSGTDVAALSDAALAVQVRSTDAFGRLAPDQKSRIVRALQAGGEVVGFLGDGINDAPALKVADVGLSVDGATGVAQAAADMILLASDLEVVADGVAEGRRTFANILKYVRMGASSNFGNMLSMAIASMVLPFLPMLPTQILLNNLLYDLSELGIPFDRVSAQATAQPQVWSMSNLARFAAIMGPLSSVFDFLTFGALIMLFHASPGEFRTAWFIESMATQILVIFVIRTNGRPWRNWPDPVLSASSLIALLVAMVVPFTPVGTWFGFVAPPPLMMAGIALLVVVYLACAELLKPFAIRSKRKR

SEQ ID NO: 22359 - protein, 850 aa, Bradyrhizobium japonicum USDA 110
MSATEAKRPAGLSEVEARARLEEDGANELPRPERRSPLRIVMEVLREPMLVLLLCGGLVYLVLGDLREALILLVFGAMSIVITVVQETRTERVLEALRDLSSPRALVVRDGARRRIPGREVVRGDLLVLGEGDRIPADAALVDARDLQIDESLLTGESVPVRKRAAGKAMSADQRPGGEDQPFVYSGSLVVRGEGLALVEATGPRSEIGKIGLSLRGLQTEPPRLRQQTARLVRLCFLGGAVVSVAAVALYGVLRGDWLQALLAGIAIGMAMLPEEFGVVLTVFMAMGAWRISQARVLTRRAAAIEVLGSATVLCTDKTGTLTQNQMSVAELRLLDGARMRPESAGRDDARPEFIELARCGALASSPEPFDPMEKALHLFAQDALRGGDAPDGDRTLVRTYGLRPELLAMTQVWRTAGRADLVACAKGAPEAIARLCRMNAADQDSVRDAASAMARDGLRVLGMAVAACDDASLPPTQEDFAFRFVGLVGLADPLRPHVPEAVRECRAAGIRVVMITGDYPATAVAIANQAGLDVRDVMTGDQVRLADDPELAKRVGHVNVFARVLPEQKLRIVQAMKLNGEIVAMTGDGVNDAPSLKAAHIGIAMGGRGTDVAREASAIVLLDDDFGSIVSAIRLGRRIYDNLRKAMAFIFAVHVPIAGLALLPLVFGLPLIFSPVHIAFLELIIDPVCSLVFEAERDERDAMTRPPRRPDAALFSWALVGWSVLQGALAFALTAIIFVGALRSGLVADEARTLAFVTLVVCIVALVLVNRSFSASFASAFFRPNPALTWIFAGVALVLATALLWPPASSLFRFGPLHADDLMIALGAGLLVLTVLELLKPLWARRLRF

SEQ ID NO: 22360 - protein, 928 aa, Brucella melitensis 16M
MRPHARGWITRCRCRFRCGRRSKMNVAVRTANNKNFKKDERRLSMRAVREASNEIELTLANVGSRRDGLTEGDAITRLYRDGPNEVARERRIPALVQFALAFKNPFIMVLVVLGAISAFTDIWLPLETGEEADPTKVIIIAVMVLASALMRFIQEYRSGRAAEALKAMVRTTATVWRRVSAGTSSAPREIPMRELVVGDIVQLSAGDMIPADLRLIESRDLFISQAVLTGEALPVEKYDTLGAISEKSAMATASQDADMLDLPSICFMGTNVVSGTATAVVVATGQRTYFGSLAKAIVGSRAQTSFDRGINSVSWLLIRFMLIMVPVVFLINGFTKGNWVEAMLFGLAVAVGLTPEMLPMIVSSNLAKGAVAMARRKVVVKRLNAIQNFGAMDVLCTDKTGTLTQDKIILEHHIDVSGKADDKVLRLAWLNSYHQSGVKNLMDQAVVSFANRVPEEVMRTARLYRKVDELPFDFIRRRLSVVVEGVGGEHLLVCKGAVEEMLAICTTVRDGETVRALDAVTREKLIATACAYNADGFRVLVVATREIPGAETSAQYRIADEAGLTVQGFLTFLDPPKETAGPAIAALAEHGVCVKVLTGDNEIVTRKICREVGLEAGIPILGSEIEKLDDEALRVVAEERTVFAKLTPLQKSRVLQALQANGHTVGFLGDGINDAPALRDADVGISVDSGADIAKESADIILLEKSLIVLEEGVVTGRETFGNILKYLNMCASSNFGNVFSVLVASAFIPFLPMLAIHLLIQNLMYDISQLALPWDKMDKEFLAKPRKWDARNIGRFMIWIGPTSSIFDITTFALMWYVFSANSPQMQSLFQSGWFIEGLLSQTLVVHMLRTQKIPFFQSTAALPVMLMSALIIALGIYIPFSPIGEMVGLVPLPWAYFPWLAATLVSYCLVAQGMKVIYVRRFGQWF

SEQ ID NO: 22361 - protein, 883 aa, Bacteroides thetaiotaomicron VPI-5482
MVWKKKLRSSQYTFNSERVFLVATQPGKSIYSCLQTTKLGLTLGEVQERQSIYGRNEVIHEQKKNPFILFIRTFINPFIGVLTGLAIISLFLDVLMAEPGEQEWTGVIIISSMVLFSAVLRFWQEWRASEATDSLMRMVKNTCLAKRAGEQEEEIDITELVPGDIVYLAAGDMVPADIHIIDSKDLFISQASLTGESEPIEKFPEVQGQQFRKGSVIELDNICYMGSNVISGAAKGIVFETGNKTYLGTIAKSLVGHRATTAFDKGISKVSFLLIRFMLVMVPFVFFVNGFTKGDWFEAFIFAVSVAVGLTPEMLPMIVTANLSKGAIAMSKKKTIVKNLNAIQNFGAMDILCTDKTGTLTCDKIVLEKYINADGSDDNSKRILRHAYFNSYFQTGLRNLMDKAILSHVRELNLEHLKDAYTKVDEIPFDFTRRRMSVVIEDRQGKRQIITKGAVEEILDVCSYAEFDREIHPLTDSLKIKAQKISEEMNRQGMRVLAVSQKSFIEKDCNFAIEDEKEMVLIGYLAFLDPPKPSAAEAIEQLYMHGVAVKILSGDNDTVVKAIARQVGIDTGHSLTGIEMEEMDETTLKETVKDTTLFSKLTPLQKTQIISLLQEQGNTVGFLGDGINDAGALRQSDIGISVDSAVDIAKESADIILLEKDLMVLEDGVLEGRKTFGNINKYIKMTASSNFGNMFSVMFASAFLPFLPMMPIHLLIQNLLYDISQTTIPFDRMDPEFLKKPRKWDASDLSRFMIYIGPISSIFDIATYLVMWYVFSCNSPEHQTLFQTGWFVEGLLSQTLIVHMIRTRKIPFIQSRATWPVMGLTFLIMAVGILIPFTAFGRSIGLTALPLGYFPWLIGILLSYCILTQLVKNWYIRKFVRWL

SEQ ID NO: 22362 - protein, 797 aa, Streptomyces avermitilis MA-4680
MTHIDAGAELDPVHPMPLPGRARGLSTAQVAERVARGEVNDVPVRSSRSLGEIVRANVFTRFNAIIGVLWLVMLFVAPFQDSLFGYVIIANTGIGIIQEWRAKKTLDSLALIGEAKPTVRRDGVASEVSTSEIVLDDVIETAPGDKIVVDGVCVETDGLEIDESLLTGEADPVVKHAGDSVMSGSFVVAGGGAFKATKVGREAYAAQLAEEASRFTLVHSELRTGISTILKYVTWMMVPTAIGLVISQLVVKQNDFKNSVARTVGGIVPMVPEGLVLLTSVAFAIGVIRLGRRNVLVQELPAIEGLARVDTVCLDKTGTLTEGGMDVTELRPLGGADEAYVRKVLGALGESDPRPNASLQAIINAYQDSDDWRCTESLPFSSARKYSGASFSEGNGESSTWLLGAPDVLLPADDPALAETEQLNEQGLRVLLLTRAVRDLDDREVKTEARPTALVVLEQRLRPDAADTLRYFAEQNVHAKVISGDNAVSVGAVAGKLGLTGGVVDARALPAERAEMAKGLDKGTVFGRVTPQQKRDMVGALQSRGHTVAMTGDGVNDVLALKDADIGVSMGSGSEATRAVAQIVLLDNSFATLPSVVGEGRRVIGNITRVATLFLVKTVYSVLLAVLVVCWQVEYPFLPRHLTLLSTLTIGVPAFFLALAPNKERAKPHFVRRVMRYSIPGGVLAAVATFVCYLLARHHYTGPGALDAETSAATLTLFLISMWVLAIIARPYTWWRICLVAAMGGAFLLVLVVPSLQQFFALKLVGVTMPWLAVAIAAVAAATLEFLWKWVDRRFPA

SEQ ID NO: 22363 - protein, 780 aa, Thermoplasma acidophilum
MASQKVDIDQILKEVNSGKSGLTEEEAQRRLSQYGYNEIQEKKESRIVKFLKKFWAPVPWMLEATIVITLLLDKLLDTYIIAFLLVFNAAVGFFQESKAENAVELLKQKLSVKARVERSGVWKQVEARVLVPGDVIDIRLGDVVPADSVILSGSLEIDESALTGESVAVTKDTGDIAYSGSVVRRGEALAIVYKTGSATYFGKTTSLVQSAGSKSHIESLIFNIVRDLIVIDVLLVIITAVYSYFIHIPIPTIIPFVLVLLIASIPVALPATFTIAMAYGALDISKKGALVTRLSAIEDAASMDVLCSDKTGTITKNHLTVSDPLPLNATREDLIRYAAYASEMASDDPIDKAILEYAKNANLLPDLSLRSSFLPFDPSTKRTEATIKVEGKTLRVAKGAPQIISELCGMRYEDIMDKVIEIAKRGYRVIAVGAGENSMHLVGLIPLYDPPRDDSRKLISDLKNLGVSVKMVTGDNAPIAEEIANQVGIEGQVCSLHGNQKISDECGIYAEVFPEDKFKIVRSLQEAGHVTGMTGDGVNDAPALKQAEVGIAVSNATDIAKASASIVLTHEGISDIVEAVKEGRKIFQRMLTYTMNKIVKTIQVVIFLTASFFAVRYFVTTPFDIILLLFANDFVTMSIATDNVRYSNRPEKWNVKALIVTSGLIAALLVVEGFIILYLGIYLHFSKDMIHTLIFDMLVFSGLFNVFMVRERRRFWHSRPSRYLLVSIAGDIVGISLISTFGILVTGIPFYSVLIVLGFAFAWMAVLDTIKNYLFRIYGL

SEQ ID NO: 22364 - protein, 248 aa, Citrus limon
GGIPIAMPTVLSVTMAIGSHRLSQQGAITKRMTAIEEMAGMDVLCSDKTGTLTLNKLSVDKSLIEVFVKGTDSDGLLLAAARASRVENQDAIDASIVGMLADPKEARAGITEVHFLPFNPVDKRTAITYIDSNGDWHRTSKGAPEQIIDLCGLKGEMRRKAHQIIDNFAERGLRALGVARQTVPEKTKESEGSPWEFVGLLPLFDPPRHDSAETIRRALDLGVNVKMITGDQLAIGKETGRRLGMGTN

SEQ ID NO: 22365 - protein, 955 aa, Cyanidium caldarium
MADVESGNSQVNGGNEVDGTNGSSSLRAESKPLPADLDKRSLSMSMLETVDLEKDDMDYVMACLKTSPEGLKPDVAARRLAKFGPNALPEKKVNPILEFLMFMWNPLSWVMEAAALVAIFLTIPGGKAPDWEDFLGILLLLLINSTIGFIEERNAGNAVKALMDALAPRAKVQRGGEWLDIDAKDLVIGDIVALKLGDVIPADARIMNGKDIKIDQAALTGESLPVGKEKGDMIYSGSVVKQGEFLALVIATGMNTFFGKAAHLVNQTESTSHLQAIVSAIGLYCMAWISTFVLLLIVTQWPIHLENYRHGINNILVLLIGGVPIAMPVVLSVTLAIGAHELAEQKAIVTRMTAVEELAGMTILCSDKTGTLTLNKLSIDQESFFTMGGYTVDTVDQCMVFAARASRTENQDAIDFAVVNSLPDPKMAREGIEELDFHPFNPVDKRTEITYRDNKDGKVYKATKGAPQIILGMAHNKKEIEKEVHEQIEDFAKRGFRALGIAVAEVPSGEAHGEPGPWSMVGLMPIFDPPRHDTKETIEQAIAMGVEVKMITGDQLAIAKETARRLGMGTNIFNTDVLNLSDQRASIEYGGSVGELVESADGFAGVFPEHKYRIVEVLQRRGHMVGMTGDGVNDAPALKRASVGIAVAGATDAARGASDIVLTEPGLSVIIHAMVMSRQIFQRMKNYSMYACSVTVRIVVTFSILVWAFRFNMPPFLVLILAYLNDGTIMTISKDRVKPSPLPQRWDLKEVFIVASSLGIYLTASTVIFYVTLFKTQFWHDTFKLGMPWLNPRDPNYFQLHSIIYLQASIIGQALIFVTRAHWFFFMDRPGILLMSAFVVAQLVATFICVYANWGFTQIQGTGWGWAGVVWVWNVIWYAPLDIIKIAVRSIITGDKTPIHKLFAARRMFTFDYSKHGREGRMPRSSLQAAQARASVHRSMETYRASLQKNVNSLD

SEQ ID NO: 22366 - protein, 833 aa, Geobacter metallireducens
MKARKGLQRMNQNPVNEERSAEDPSLQTIPLVELFGRLSSSPEGLSPTEAARRLEKVGYNELQEREPSAFRKLLTFFWGPIPWMIEAAALLSALVGHWEDFGIIIVLLMVNAVVGFWEEYQAGNAIAALKQTLALKAKARRGGEWQSVPARELVPGDVIRLRLGDIVPADGRLIEGNPLEVDQSALTGESLPVSRGVGEAVYSGTVVRRGEGNALVYATGRETSFGKTARLVEEARTVSHFQRAVLKIGDYLIIVAIGLVLLIIAVALFRGDPIGETLQFALVLTVAAIPVAMPTILSVTMAVGARILAGRQAIVSRLAAIEELAGMDILCSDKTGTLTKNELTLGAPSCTEGIDPDAVILAAALASRREDADPIDLAILRKLPAGASLEGYRVLRFVPFDPVTKRTEATVSAPDGTTFTVTKGAPQVIVGLASPPPEVRARIDAAVEAFAARGFRSLGVARADKEGAWRMLGILPLFDPPRDDSRETLAAARRMGTRVKMVTGDQLAIAREIGRELGLGDRILDAALLTGADYREASRLADAIDKADGFAQVFPEHKFHIVEALQQQGHIVGMTGDGVNDAPALKKADAGIAVSGATDAARAAADIVLLTPGLSVIIDAVTESRRIFRRMNSYTIYRISETIRVLLFITLSILVFNFYPVTAVMIVLLALLNDGAILAIAVDRQEAAPEPQSWNMPVVLGVSTVLGIVGVVATFGLYYLAERLSGLGRDVIQSLIYLKLSVSGHLTIFAARARGPFWSNRPATALLAATVGTQLVATAIAVYGLFMAPIGWAWGGIVWAYALVWFVIEDRVKLGAYRIFDRRAPGLLEKVRR

SEQ ID NO: 22367 - protein, 977 aa, Heterosigma akashiwo
MQKPPLNRKASDRAMELNKQSPATGGPVLFDRKRSMSIDDVMEEREKQDSSGGPIKLGDIRSEDFRRSFHSGRSHDLDIEDPSSSAAAESFEPSTGLTTEEAEILLKQWGKNELIEKTKSKLEIFIEQFTAPMPIMIWIAILIEAVLENWPDMYILCGLQAINGGVGFYEMVKAGNAVAALKASLQPKAICHRDGQFKNMNATLLVPGDLVILGAGAAVPADCMINEGQIEVDQAALTGESLPVTMLKGDNPKMGSTVARGEVEATVTATGMNTFFGKTANLIQSVDELGHLQKILLYIMAFLIVLSFLLCGITLWYLLDQGEDFKESISFVVVLLVASIPIAIEVVVTATMALGSRELAKMDAIVARLSAIEELAGMNMLCSDKTGTLTLNKMVIQDDCPMFVDGITPEDVILHAALAAKWKEPPKDALDTMVLGACDVSLCNPFTQLDYTPFDPTLKRTEAELKGPDGKTFKVTKGAPHIVLDLCHDKKRIEEAVDFKVLELAERGIRSLAVARTNAKGQWFMLGILTFLDPPRPDTKLTIERARVHGVEVKMVTGDHQVIAKETARVLDMGTNILGCDGLPTLDAEGKLPSGAEMADICQRVVDCNGFAQVFPEHKFVIVEAVRMGGFEVGMTGDGVNDAPALKRADIGIAVQGATDAARAAADIVLTSPGLTVVVEAIIVARKIFARMKSFIVYRVACTLQLLVFFFVGVLWLHPQDYNSEFPRFWGMPVIALIMITLLNDGTIISIAYDNVQSSKNPEVWNLPAVYVVSTVLGMIACVSSILLLHWALDSTSPTSLFNKFGVELEYAEVMAVMYLKVSLSDFLTLFASRTHGPFWVQKPGKLLAAAFLFAVGLSTANSLTWPFGEGMAALPPVAPPPSGHTVWCGSSSRTLARPFCTCGCTSTTSLGSTTPRVSSLNTTAENMLMRMRRLEEGMVVSQQMILLVLQVLERMVRRGICSSNLSGSSLLSRCLY

SEQ ID NO: 22368 - protein, 603 aa, Heterosigma akashiwo
PTMALGSRQLTEKGAIVARLSAIEEMAGMNMLCSDKTGTLTLNKMVIQDDCPTFMDGVTRDDVILASQLAAKWWEPAKDALDTMVLTTGDLKNCEPYKQIEYTPFDPTLKRTEATLQGPDGKEFKVTKGAPHVVLALCWNKGEIEEQVDGKVLELAERGIRSLAVARTDNKGRWNMMGIMTFLDPPRPDTKQTIQDARKHGVEVKMITGDHQVIAKETARQLDMGTDILGCAGLPSWNGQDALPEGMDELAETIMQCNGFAQVFPEHKFLIVEALRRKGYIVGMTGDGVNDAPALKKGDVGIAVAGATERARAAADIVLTAPGLMVVVDAIIYSRQIFARMKSFIVYRVACTLQLLVFFFIGVLFFHPVAYNSSFPDFWYMPVLALITITLLNDGTIISIAYDNVQYNVNPEQWNLPVIFCVSTTLGAVACVSSVLLLHLALASESAGSFLSKFGIALDFPEVMCVMYLKVSISDFLTLFASRTHGPFWVQRPGKALACAFVFAVGLSTIYSLTWPLRPGHEPHLAGHDRPGVGLHPVLVLRPGRSQKHFFTCGCTSTTSLASTTLSVSWMKSTEWVLIEEPWEDTGLTSGSSGFGTMEEGNK

SEQ ID NO: 22369 - protein, 899 aa, Kluyveromyces lactis
MSAATEPTKEKPVNNQDSDDEDEDIDQLIEDLQSHHGLDDESEDDEHVAAGSARPVPEELLQTDPSYGLTSDEVTKRRKKYGLNQMSEETENLFVKFLMFFIGPIQFVMEAAAILAAGLEDWVDFGVICGLLFLNAAVGFIQEYQAGSIVDELKKTLANSAVVIRDGNLVEVPSNEVVPGDILQLEDGVVIPADGRLVTEDCFIQIDQSAITGESLAVDKRFGDSTFSSSTVKRGEAFMIVTATGDSTFVGRAAALVNKAAAGSGHFTEVLNGIGTILLILVIVTLLLVWVASFYRTNKIVRILRYTLAITIVGVPVGLPAVVTTTMAVGAAYLAKKQAIVQKLSAIESLAGVEILCSDKTGTLTKNKLSLHEPYTVEGVDPDDLMLTACLAASRKKKGLDAIDKAFLKSLISYPRAKAALTKYKLLEFHPFDPVSKKVTAIVESPEGERIICVKGAPLFVLKTVEEEHPIPEDVRENYENKVAELASRGFRALGVARKRGEGHWEILGVMPCMDPPRDDTAQTVNEARHLGLRVKMLTGDAVGIAKETCRQLGLGTNIYNAERLGLGGGGDMPGSELADFVENADGFAEVFPQHKYNVVEILQQRGYLVAMTGDGVNDAPSLKKADTGIAVEGATDAARSAADIVFLAPGLSAIIDALKTSRQIFHRMYSYVVYRIALSLHLEIFLGLWIAILNRSLNIDLVVFIAIFADVATLAIAYDNAPYSPKPVKWNLRRLWGMSVILGIILAIGTWITLTTMFVPKGGIIQNFGSIDGVLFLQISLTENWLIFITRAAGPFWSSIPSWQLSGAVLIVDIIATMFCLFGWWSQNWNDIVTVVRVWIFSFGVFCVMGGAYYMMSESEAFDRFMNGKSRRDKPSGRSVEDFLMAMQRVSTQHEKEN

SEQ ID NO: 22370 - protein, 952 aa, Zostera marina
MAGKGLDDIKNETVDLEKIPIEEVFEQLKCTRQGLSTTEGESRLAIFGANKLEEKKENKILKFLGFMWNPLSWVMEAAALMAIVLANGDGNPPDWQDFLGIVVLLVINSTISFIEENNAGNAAAALMAGLAPKTKVLRDGSWSEQEASILVPGDIVSIKLGDIVPADARLLEGDPLKIDQSALTGESLPVTRNPGSEVFSGSTCKQGEIDAVVIATGVHTFFGKAAHLVDSTNNVGHFQKVLTAIGNFCIVSIAIGIVIEIIVMWPIQRRKYRDGIDNLLVLLIGGIPIAMPTVLSVTMAIGSHKLAEQGAITKRMTAIEELAGMDVLCSDKTGTLTLNKLSVDKNLIEVFARGADKELVVLLAARSSRTENQDAIDTAMVGMLADPKEARANIQEVHFLPFNPVDKRTALTYIDEKGNWHRCSKGAPEQIMTLCNCKPDMKAKIHSVIDKYAERGLRSLGVGQQEVPEKNKESPGGPWQFVGVLPLFDPPRHDSAETIRRALDLGVNVKMITGDQLAIGKETGRRLGMGTNMYPSSSLLGDHKDPAVGTIGIDELIEKADGFAGVFPEHKYEIVKRLQDKKHICGMTGDGVNDAPALKKADIGIAVADATDAARGASDIVLTEPGLSVIISAVLSSRCIFQRMKNYTIYAVSITIRIVLGFMLIALIWKFDFSPFMVLIIAILNDGTIMTISKDRVKPSPLPDSWKLKEIFATGVVLGSYMAVMTVVFFWIMKDTSFFSDKFGVRSISNSEDEMMGALYLQVSIISQALIFVTRSRSWSFMERPGLLLVTAFFIAQMCATFIAVYADWGFARVKGVGWGWGGIIWLYSMVTFFPLDILKFITRYVLSGRGWENITENKTAFTSKKDYGREEREAQWATAQRTLHGLQTAESTTNIFPDKGGYRELSEIAEQAKRRAEVARLRELNTLKGHVESVVKLKGLDIETIQQNYTV

SEQ ID NO: 22371 - protein, 265 aa, Dunaliella salina
CSDKTGTLTLNKLSIDKSMVVPVGPMGVDEIMKMGALSANTVTEEPIDMVLWESYPERDTIKRDYKHTKYFPFNPNDKITIATCLEYATGKVFRVLKGSPQVVLGKAWNAAELDATVNQKMVDFANRGFRALGLAIADGDGKEGTKWEMLALLPLFDPPRHDTKDTIEHCQTQGIQVKMITGDHLLIGKETTRMLGMGTEMFPSEVMIKARNGDASQLHGYKNFVEMVETCNTFAQVFPEHKFEIVKILQDANHVVGMTGDGVND

SEQ ID NO: 22372 - protein, 1081 aa, Chlamydomonas reinhardtii
MGNEGEVKVAVNGTSIEEVNFEKIDLKEALSILNTTPHGLSSAEADKRLAEYGPNRLPESKRIPLLVFLGYMWNPLSWAMEAAAIIAIALLDYADFALIVGLLFLNAVISYVEESSADNAIKALAGALAPKCKVIRDGTLQTMEAVNLVPGDVVVMKFGDIVAADVKLFSDDPQHPFDSHSEEVPMQIDQAALTGESLPAKKHTGDVAFSGSAIKAGERHAVVYATGINTFFGRAAALISGTHNVANLQIIMTKIGGVCLVTIGVWVVIELAVQFGHYGHGCTSGEEGCPTLTNMLVILVGGIPIAMPTVLSVTLALGAAKLAKEGAIVARMSAVEEMAGMDILCSDKTGTLTLNKLSIDMNTIYKCEPGITNDDVAKYGALSADVAGEEPIDMVLFNNYANAKDLAARYKKIKWVPFNPTDKFTAITLMDQETGRVFRLLKGSPQVVLGKAYNKDTLADNVNAKMVEFANRGFRSLGVAMAEGDGADGKHEWHMLALLPLFDPPRHDTKDTIEYCHGQGIEVKMVTGDHLLIGKETAKMLGMGTVMYPSEVLIKAKNGDKGALGDFRDVTHMVESCNGFAEVFPEHKYEIVAILQEADHVVGMTGDGVNDAPALKKADVGIAVAGATDAARGAADIVLTEAGLSAIKTAVLGARKIFQRMTTYSKYTVAMTFRICFTFGLLTVIYDWYFPTILIVIMAVFNDGAMIALAKDRVEPSRQPNAWNLKNIFLMGIVYGLYLTLSTWALYQTACKTSFFEDHFPIFSLDDRHITLQNWCTGYITNQLNLNPTASICTMPTYLAQFDSQAACIEEMGGEQIINQCMAEQRYIRGAMLRSLIYNHVSISGQALVLVVRNQGFSLMERAGSLTYIAFVLAQIGSTVISVFGFGGYVPPRHRFTDCQFCSYSDYTPVKFFPSKEVPMAGTESVYTASVLGCLGYVLVAWIWTGIWYVLLDPIKWALCWMLNEDGFRDMATMKHERRQELGRTSQQKAADVGVTGMTVPTASNPLGRASIQKPVTMVLDRASAALVPVHRTSDGLVRVSADPAKARDLARRSRLNEGMQRTSGGAHAAGHTGQKEITRA

SEQ ID NO: 22373 - protein, 1053 aa, Chlamydomonas reinhardtii
  unsure (1)..(1053): unsure at all Xaa locations
MAEQEKPKEEHAPINFDENHEEKQAEELIKVHGRNELEEKHTPSWLIFLRQLYQPMPIMIWIAAIVEGAIENWADMGILLGIQFINATLRLVGQAYETTKAGDAVAALKASLKPLATAKRDGKWANIDAGNLVPGDLVLLASGSAVPADCLINHGTVDIDQAALTGESLPVTMHKGDSAKMGSTVVRGETEATVEFTGKNTFFGKTASMLQQSGGELGHLQKILLTIMFVLVVTSFILFTVVLLVASIPIAIEIVCTTTLALGSRELSRHGAIVTRLAAIEDMAGMNMLCSDKTGTLTLNKMAIQDDTPTYLPGLDQRKLLHLGALAAKWHEPPRDALDTLVLTCETQDLSALDVYEQIDYMPFDPTVKRTEGTIKDKRDGTTFKVTKGAPHIILKLTHDERIHHMVDETVAAFGQRGIRCLAIARTLGDDLNTWHMAGLLTFLDPPRPDTKDTIHKVMAYGVDVKMITGDNILIAKETARVLGMGTNIQDPKSLPTMDAEGKAPKDLGKKYGKIIMEADGFAQVYPEHKYLIVEALRQNGFACGMTGDGVNDAPALKRADVGVAVQGATAPLAPPPTIVLTEPGLSTIVHGIVTARCIFQRMKNFINYRIAATLQLLTFFFIAVFALPPIDYPQGMWPTCNTPAAVGSPTCCPETYTYDNVTSTVTMEWLRDNQGNDEIANNLNGVCFTDGEPWPDFFKMPVLMLMLITLLNDGTLISIGYDHVKPSAMPEKWNLPALFAISIVLGMVACGSSLLLLWAALDSWNTNGIFQKWGLGGMPYGKVTTIIYLKVSVSDFLTLFSARTHDGFFWSARPSPILMGAALLALSLSTILACVWPKGHTDKQLSMGLAYETDPHSNTLMPLWIWIYCVFWWFVQDFMKVAAYWMMHRYNWFDINTSMAINKRDANKVDDRHDPLARGSVGLVEGKLLAAKVEEAQAKVNAAIKHDQATNLGRASANXGRVSANLKQAGMARHSGNPKGADVEGAAQTVENVLLHLDEARGELDPKVQQEIAPAIEGVREAAEKLAANTAAALGGANPEQTLAKISSKRHM

SEQ ID NO: 22374 - protein, 349 aa, Chlamydomonas reinhardtii
MGNEGEVKVAVNGTSIEEVNFEKIDLKEALSILNTTPHGLSSAEADKRLAEYGPNRLPESKRIPLLVILGYMWNPLSWAMEAAAIIAIALLDYADFALIVGLLFLNAVISYVEESSADNAIKALAGALAPKCKVIRDGTLQTMEAVNLVPGDVVVMKFGDIVAADVKLFSDDPQHPFDSHSEEVPMQIDQAALTGESLPAKKHTGDVAFSGSAIKAGERHAVVYATGINTFFGRAAALISGTHNVANLQIIMTKIGGVCLVTIGVWVVIELAVQFGHYGHGCTSGEEGCPTLTNMLVILVGGIPIAMPTVLSVTLALGAAKLAKEGAIVARMSAVEEMAGMDILCSDKT

SEQ ID NO: 22375 - protein, 1228 aa, synthetic construct
MEEVIKNAHTYDVEDVLKFLDVNKDNGLKNEELDDRRLKYGLNELGVEKKKSIFELILNQFDDLLVKILLLAAFISFVLTLLDMKHKKTEICDFIEPLVIVLILILNAAVGVWQECNAEKSLEALKELQPTKAKVLRDGKWEIIDSKYLYVGDIIELSVGNKTPADARIIKIYSTSLKVEQSMLTGESCSVDKYAEKMEDSYKNCEIQLKKNILFSSTAIVCGRCIAVVINIGMKTEIGHIQHAVIESNSEDTQTPLQIKIDLFGQQLSKIIFVICVTVWIINFKHFSDPIHGSFLYGCLYYFKISVALAVAAIPEGLPAVITTCLALGTRRMVKKNAIVRKLQSVETLGCTTVICSDKTGTLTTNQMTTTVFHLFRESDSLTEYQLCQKGDTYYFYESSNLTNDIYAGESSFFNKLKDEGNVEALTDDGEEGSIDEADPYSDYFSSDSKKMKNDLNNNNNNNNNSSRSGAKRNIPLKEMKSNENTIISRGSKILEDKINKYCYSEYDYNFYMCLVNCNEANIFCNDNSQIVKKFGDSTELALLHFVHNFDILPTFSKNNKMPAEYEKNTTPVQSSNKKDKSPRGINKFFSSKNDNSHITSTLNENDKNLKNANHSNYTTAQATTNGYEAIGENTFEHGTSFENCFHSKLGNKINTTSTHNNNNNNNNNSNSVPSERISSWRNECKQIKIIEFTRERKLMSVIVENKKKEIILYCKGAPENIIKNCKYYLTKNDIRPLNETLKNEIHNKIQNMGKRALRTLSFAYKKLSSKDLNIKNTDDYYKLEQDLIYLGGLGIIDPPRKYVGRAIRLCHMAGIRVFMITGDNINTARAIAKEINILNKNEGDDEKDNYTNNKNTQICCYNGREFEDFSLEKQKHILKNTPRIVFCRTEPKHKKQIVKVLKDLGETVAMTGDGVNDAPALKSADIGIAMGINGTEVAKEASDIVLADDNFNTIVEAIKEGRCIYNNMKAFIRYLISSNIGEVASIFITALLGIPDSLAPVQLLWVNLVTDGLPATALGFNPPEHDVMKCKPRHKNDNLINGLTLLRYIIIGTYVGIATVSIFVYWFLFYPDSDMHTLINFYQLSHYNQCKAWNNFRVNKVYDMSEDHCSYFSAGKIKASTLSLSVLVLIEMFNALNALSEYNSLFEIPPWRNMYLVLATIGSLLLHVLILYIPPLARIFGVVPLSAYDWFLVFLWSFPVIILDEIIKFYAKRKLKEEQRTKKIKID

SEQ ID NO: 22376 - protein, 976 aa, Blumeria graminis
MAQNGATVFEEDEKLGEYGNLVRYISNFKDGRRMSTSGASILDLPQKKKWYQFGKTEQVADGFYETPVEWLQTDWKNGLTTTEVEARRKKVGFNELTTEKENMFLTFVSYFRGPILYVMELAVLLAAGLRDWIDFGVIIGILMLNAIVGWYQEKQAADVVASLKGDIALRTTVIRDGQQYEIKARELVPGDIVIVEDGNVVPADCRIISAYDNPNGWAEYQRELEAQAGESNNEKDDDDEIGEKHGSGYALLAIDQSAMTGESLAVDKYVADVIYYTTGCKRGKAYAIVTHSAKMSFVGRTASLVSGAQDQGHFKAIMNSIGTALLVLVVAFILASWVGGFFHHLPIATPEGSSINLLHYALILLIVGVPVGLPVVTTTTLAVGAAYLAKEKAIVQKLTAIESLAGVDVLCSDKTGTLTANQLSIREPFVADGVDVNWMMAVAALASSHNVKSLDPIDKVTILTLKRYPRAKEILSQGWRTEKFTPFDPVSKRITAIVIKDGVTYTCAKGAPKAILNLSNCSKEDAEMYKSKVTEFARRGFRSLGVAVKKGDGDWQLLGMLPMFDPPREDTASTIAEAQVLGLSVKMLTGDAIAIAKETCKMLALGTKVYNSERLIHGGLSGTTQHDLVEKADGFAEVFPEHKYQVVEMLQQRGHLTAMTGDGVNDAPSLKKSDCGIAVEGATEAAQAASDIVFLAPGLSTIVSAIKIARQIFQRMKAYIQYRIALCLHLEIYLVTSMIIINETVRVDLIVFLALFADLATIAVAYDNAHFEIRPVEWQLPKIWIISVVLGILLAIGTWILRGSLFLPNGGMIDNFGSIQGMLFLQISLTENWLIFVTRGDETYPAFALVAAIFGVDVLATLFCIFGWLTGGAGEQSDPATLNALLSTDGRTSIVTVIVVWCYSIAVTIVIAIVYHIMNKAAWLDNLGRFKRSRADTQMENIIMHLSKIAIQHERDENGNSRFALVPKALEAEDDD

SEQ ID NO: 22377 - protein, 953 aa, Mesembryanthemum crystallinum
MVGGNSSMSLQEIKDEKVDLEKIPIEEVFDSLKCSREGLSSAEGANRLQIFGPNKLEEKKDSKFLKFLGFMWNPLSWVMEAAALMAIVLANGDHKPPDWQDFVGIIILLVINSTISFIEENNAGNAAAALMANLAPKTKVLRDGRWGEQEASILVPGDIISIKLGDIVPADARLLEGDALKIDQSALTGESMPVTKNPGEEVFSGSTCKQGELEAVVIATGVHTFFGKAAHLVDSTNQVGHFQKVLTSIGNFCICSIAIGMLIEIIVMYPIQRRKYRDGIDNLLVLLIGGIPIAMPTVLSVTMAIGSHRLSQQGAITKRMTAIEEMAGMDVLCSDKTGTLTLNKLTVDRNLVEVFAKGVEKEYVILLAARASRTENQDAIDAAIVGMLADPKEARAGIREVHFLPFNPVDKRTALTYIDADGNWHRASKGAPEQILTLCRCKEDVKKKAHGVIEKFADRGLRSLAVARQEVPEKTKESPGGPWQFVGLLPLFDPPRHDSAETIKRALNLGVNVKMITGDQLAIGKETGRRLGMGTNMYPSSSLLGQDKDSNVAGLPVDELIEKADGFAGVFPEHKYEIVKRLQDRKHICGMTGDGVNDAPALKRADIGIAVADATDAARSASDIVLTEPGLSVIISAVLTSRAIFQRMKNYTIYAVSITIRVVFGFMFIALIWKFDFAPFMVLIIAILNDGTIMTISKDRVKPSPLPDSWKLKEIFATGIVLGGYQAIMTVVFFWLVRDTTFFVDKFHVKPLTDGQMMAALYLQVSAISQALIFVTRSRSWSFAERPGLMLLGAFVVAQLIATLIAVYANWSFAKIEGMGWGWALAVWIYTLVTYIPLDILKFTIRYALSGRAWNNLLDNKTAFTTKKDYGKEEREAQWAAAQRTMHGLQPPETTNLFPEKSNYRELSEIAEQAKRRAEVARLRELHTLKGHVESVVKLKGLDIDTIQQHYTV

SEQ ID NO: 22378 - protein, 1228 aa, Plasmodium falciparum 3D7
MEEVIKNAHTYDVEDVLKFLDVNKDNGLKNEELDDRRLKYGLNELEVEKKKSIFELILNQFDDLLVKILLLAAFISFVLTLLDMKHKKIEICDFIEPLVIVLILILNAAVGVWQECNAEKSLEALKELQPTKAKVLRDGKWEIIDSKYLYVGDIIELSVGNKTPADARIIKIYSTSLKVEQSMLTGESCSVDKYAEKMEDSYKNCEIQLKKNILFSSTAIVCGRCIAVVINIGMKTEIGHIQHAVIESNSEDTQTPLQIKIDLFGQQLSKIIFVICVTVWIINFKHFSDPIHGSFLYGCLYYFKISVALAVAAIPEGLPAVITTCLALGTRRMVKKNAIVRKLQSVETLGCTTVICSDKTGTLTTNQMTTTVFHLFRESDSLTEYQLCQKGDTYYFYESSNLTNDIYAGESSFFNKLKDEGNVEALTDDGEEGSIDEADPYSDYFSSDSKKMKNDLNNNNNNNNNSSRSGAKRNIPLKEMKSNENTIISRGSKILEDKINKYCYSEYDYNFYMCLVNCNEANIFCNDNSQIVKKFGDSTELALLHFVHNFDILPTFSKNNKMPAEYEKNTTPVQSSNKKDKSPRGINKFFSSKNDNSHITSTLNENDKNLKNANHSNYTTAQATTNGYEAIGENTFEHGTSFENCFHSKLGNKINTTSTHNNNNNNNNNSNSVPSECISSWRNECKQIKIIEFTRERKLMSVIVENKKKEIILYCKGAPENIIKNCKYYLTKNDIRPLNETLKNEIHNKIQNMGKRALRTLSFAYKKLSSKDLNIKNTDDYYKLEQDLIYLGGLGIIDPPRKYVGRAIRLCHMAGIRVFMITGDNINTARAIAKEINILNKNEGDDEKDNYTNNKNTQICCYNGREFEDFSLEKQKHILKNTPRIVFCRTEPKHKKQIVKVLKDLGETVAMTGDGVNDAPALKSADIGIAMGINGTEVAKEASDIVLADDNFNTIVEAIKEGRCIYNNMKAFIRYLISSNIGEVASIFITALLGIPDSLAPVQLLWVNLVTDGLPATALGFNPPEHDVMKCKPRHKNDNLINGLTLLRYIIIGTYVGIATVSIFVYWFLFYPDSDMHTLINFYQLSHYNQCKAWNNFRVNKVYDMSEDHCSYFSAGKIKASTLSLSVLVLIEMFNALNALSEYNSLFEIPPWRNMYLVLATIGSLLLHVLILYIPPLARIFGVVPLSAYDWFLVFLWSFPVIILDEIIKFYAKRKLKEEQRTKKIKID

SEQ ID NO: 22379 - protein, 69 aa, Gossypium hirsutum
VKILQEKKHVVGMTGDGVNDAPALKKADIGIAVADATDAARSAADIVLTEPGLSVIISAVLTSRAIFQR

SEQ ID NO: 22380 - protein, 453 aa, Cucumis sativus
KFLGFMWNPLSWVMEAAAIMAIALANGGGKPPDWEDFVGIICLLVINSTISFIEENNAGNAAAALMAGLAPKTKVLRDGKWSEQEAAILVPGDIVSVKLGDIIPADARLLEGDPLKVDQSALTGESLPVTKNPGDEIFSGSTCKQGEIEAVVIATGVHTFFGKAAHLVDSTHQVGHFQKVLTAIGNFCICSIALGMLIEIIGMCPIQHRKYRDGIDNLFVLLIGGIPIAMPTVLSVTMAIGSHKLSQQGAITKRMTAIEEMAGMDVLCSDKTGTLTLNKLSVDVNLVEVFAKGVDKQHVILLAARASRTENQDAIDAAIVGMLADPKEARAGIREVHFFPFNPVDKRTALTYIDSDGNWHRASKGAPEQILTLCNCKEDVKKKAHAVIDKFAERGLRSLAVGRQEVPEKRKESPGSPWQFVGLLPLFDPPRHDSGETIKRALNLGVNVKMITG

SEQ ID NO: 22381 - protein, 948 aa, Arabidopsis thaliana
MSSLEDIKNETVDLEKIPIEEVFQQLKCSREGLTTQEGEDRIQIFGPNKLEEKKESKLLKFLGFMWNPLSWVMEMAAIMAIALANGDGRPPDWQDFVGIICLLVINSTISFIEENNAGNAAAALMAGLAPKTKVLRDGKWSEQEAAILVPGDIVSIKLGDIIPADARLLEGDPLKVDQSALTGESLPVTKHPGQEVFSGSTCKQGEIEAVVIATGVHTFFGKAAHLVDSTNQVGHFQKVLTAIGNFCICSIAIGMVIEIIVMYPIQRRKYRDGIDNLLVLLIGGIPIAMPTVLSVTMAIGSHRLSQQGAITKRMTAIEEMAGMDVLCSDKTGTLTLNKLSVDKNLVEVFCKGVEKDQVLLFAAMASRVENQDAIDAAMVGMLADPKEARAGIREVHFLPFNPVDKRTALTYIDGSGNWHRVSKGAPEQILELAKASNDLSKKVLSIIDKYAERGLRSLAVARQVVPEKTKESPGAPWEFVGLLPLFDPPRHDSAETIRRALNLGVNVKMITGDQLAIGKETGRRLGMGTNMYPSSALLGTHKDANLASIPVEELIEKADGFAGVFPEHKYEIVKKLQERKHIVGMTGDGVNDAPALKKADIGIAVADATDAARGASDIVLTEPGLSVIISAVLTSRAIFQRMKNYTIYAVSITIRIVFGFMLIALIWEFDFSAFMVLIIAILNDGTIMTISKDRVKPSPTPDSWKLKEIFATGVVLGGYQAIMTVIFFWAAHKTDFFSDTFGVRSIRDNNHELMGAVYLQVSIISQALIFVTRSRSWSFVERPGALLMIAFLIAQLIATLIAVYANWEFAKIRGIGWGWAGVIWLYSIVTYFPLDVFKFAIRYILSGKAWLNLFENKTAFTMKKDYGKEEREAQWALAQRTLHGLQPKEAVNIFPEKGSYRELSEIAEQAKRRAEIARLRELHTLKGHVESVVKLKGLDIETPSHYTV

SEQ ID NO: 22382 - protein, 949 aa, Arabidopsis thaliana
MSGLEDIKNETVDLEKIPIEEVFQQLKCTREGLTTQEGEDRIVIFGPNKLEEKKESKILKFLGFMWNPLSWVMEAAALMAIALANGDNRPPDWQDFVGIICLLVINSTISFIEENNAGNAAAALMAGLAPKTKVLRDGKWSEQEAAILVPGDIVSIKLGDIIPADARLLEGDPLKVDQSALTGESLPVTKHPGQEVFSGSTCKQGEIEAVVIATGVHTFFGKAAHLVDSTNQVGHFQKVLTSIGNFCICSIAIGIAIEIVVMYPIQHRKYRDGIDNLLVLLIGGIPIAMPTVLSVTMAIGSHRLSQQGAITKRMTAIEEMAGMDVLCSDKTGTLTLNKLSVDKNLVEVFCKGVEKDQVLLFAAMASRVENQDAIDAAMVGMLADPKEARAGIREVHFLPFNPVDKRTALTYIDSDGNWHRVSKGAPEQILDLANARPDLRKKVLSCIDKYAERGLRSLAVARQVVPEKTKESPGGPWEFVGLLPLFDPPRHDSAETIRRALNLGVNVKMITGDQLAIGKETGRRLGMGTNMYPSAALLGTDKDSNIASIPVEELIEKADGFAGVFPEHKYEIVKKLQERKHIVGMTGDGVNDAPALKKADIGIAVADATDAARGASDIVLTEPGLSVIISAVLTSRAIFQRMKNYTIYAVSITIRIVFGFMLIALIWEFDFSAFMVLIIAILNDGTIMTISKDRVKPSPTPDSWKLKEIFATGIVLGGYQAIMSVIFFWAAHKTDFFSDKFGVRSIRDNNDELMGAVYLQVSIISQALIFVTRSRSWSFVERPGALLMIAFVIAQLVATLIAVYADWTFAKVKGIGWGWAGVIWIYSIVTYFPQDILKFAIRYILSGKAWASLFDNRTAFTTKKDYGIGEREAQWAQAQRTLHGLQPKEDVNIFPEKGSYRELSEIAEQAKRRAEIARLRELHTLKGHVESVAKLKGLDIDTAGHHYTV

SEQ ID NO: 22383 - protein, 949 aa, Arabidopsis thaliana
MSGLEDIKNETVDLEKIPIEEVFQQLKCTREGLTTQEGEDRIVIFGPNKLEEKKESKILKFLGFMWNPLSWVMEAAALMAIALANGDNRPPDWQDFVGIICLLVINSTISFIEENNAGNAAAALMAGLAPKTKVLRDGKWSEQEAAILVPGDIVSIKLGDIIPADARLLEGDPLKVDQSALTGESLPVTKHPGQEVFSGSTCKQGEIEAVVIATGVHTFFGKAAHLVDSTNQVGHFQKVLTSIGNFCICSIAIGIAIEIVVMYPIQHRKYRDGIDNLLVLLIGGIPIAMPTVLSVTMAIGSHRLSQQGAITKRMTAIEEMAGMDVLCSDKTGTLTLNKLSVDKNLVEVFCKGVEKDQVLLFAAMASRVENQDAIDAAMVGMLADPKEARAGIREVHFLPFNPVDKRTALTYIDSDGNWHRVSKGAPEQILDLANARPDLRKKVLSCIDKYAERGLRSLAVARQVVPEKTKESPGGPWEFVGLLPLFDPPRHDSAETIRRALNLGVNVKMITGDQLAIGKETGRRLGMGTNMYPSAALLGTDKDSNIASIPVEELIEKADGFAGVFPEHKYEIVKKLQERKHIVGMTGDGVNDAPALKKADIGIAVADATDAARGASDIVLTEPGLSVIISAVLTSRAIFQRMKNYTIYAVSITIRIVFGFMLIALIWEFDFSAFMVLIIAILNDGTIMTISKDRVKPSPTPDSWKLKEIFATGIVLGGYQAIMSVIFFWAAHKTDFFSDKFGVRSIRDNNDELMGAVYLQVSIISQALIFLTRSRSWYFVERPGALLMIAFVIAQLVATLIAVYADWTFAKVKGIGWGWAGVIWIYSIVTYFPQDILKFAIRYILSGKAWASLFDNRTAFTTKKDYGIGEREAQWAQAQRTLHGLQPKEDVNIFPEKGSYRELSEIAEQAKRRAEIARLRELHTLKGHVESVAKLKGLDIDTAGHHYTV

SEQ ID NO: 22384 - protein, 949 aa, Arabidopsis thaliana
MASGLEDIVNENVDLEKIPIEEVFQQLKCSREGLSGAEGENRLQIFGPNKLEEKKESKLLKFLGFMWNPLSWVMEAAAIMAIALANGGGKPPDWQDFVGIVCLLVINSTISFVEENNAGNAAAALMAGLAPKTKVLRDGKWSEQEASILVPGDIVSIKLGDIIPADARLLEGDPLKVDQSALTGESLPATKGPGEEVFSGSTCKQGEIEAVVIATGVHTFFGKAAHLVDSTNQVGHFQKVLTAIGNFCICSIAVGIAIEIVVMYPIQRRHYRDGIDNLLVLLIGGIPIAMPTVLSVTMAIGSHKLSQQGAITKRMTAIEEMAGMDVLCSDKTGTLTLNKLSVDKNLIEVYCKGVEKDEVLLFAARASRVENQDAIDAAMVGMLADPKEARAGIREIHFLPFNPVDKRTALTFIDSNGNWHRVSKGAPEQILDLCNARADLRKRVHSTIDKYAERGLRSLAVSRQTVPEKTKESSGSPWEFVGVLPLFDPPRHDSAETIRRALDLGVNVKMITGDQLAIAKETGRRLGMGSNMYPSSSLLGKHKDEAMAHIPVEDLIEKADGFAGVFPEHKYEIVKKLQERKHICGMTGDGVNDAPALKKADIGIAVADATDAARGASDIVLTEPGLSVIISAVLTSRAIFQRMKNYTIYAVSITIRIVFGFMLIALIWKFDFSPFMVLIIAILNDGTIMTISKDRVKPSPTPDSWKLKEIFATGVVLGGYMAIMTVVFFWAAYKTDFFPRTFHVRDLRGSEHEMMSALYLQVSIVSQALIFVTRSRSWSFTERPGYFLLIAFWVAQLIATAIAVYGNWEFARIKGIGWGWAGVIWLYSIVFYFPLDIMKFAIRYILAGTAWKNIIDNRTAFTTKQNYGIEEREAQWAHAQRTLHGLQNTETANVVPERGGYRELSEIANQAKRRAEIARLRELHTLKGHVESVVKLKGLDIETDGHYTV

SEQ ID NO: 22385 - protein, 949 aa, Arabidopsis thaliana
MASGLEDIVNENVDLEKIPIEEVFQQLKCSREGLSGAEGENRLQIFGPNKLEEKKESKLLKFLGFMWNPLSWVMEAAAIMAIALANGGGKPPDWQDFVGIVCLLVINSTISFVEENNAGNAAAALMAGLAPKTKVLRDGKWSEQEASILVPGDIVSIKLGDIIPADARLLEGDPLKVDQSALTGESLPATKGPGEEVFSGSTCKQGEIEAVVIATGVHTFFGKAAHLVDSTNQVGHFQKVLTAIGNFCICSIAVGIAIEIVVMYPIQRRHYRDGIDNLLVLLIGGIPIAMPTVLSVTMAIGSHKLSQQGAITKRMTAIEEMAGMDVLCSDKTGTLTLNKLSVDKNLIEVYCKGVEKDEVLLFAARASRVENQDAIDAAMVGMLADPKEARAGIREIHFLPFNPVDKRTALTFIDSNGNWHRVSKGAPEQILDLCNARADLRKRVHSTIDKYAERGLRSLAVSRQTVPEKTKESSGSPWEFVGVLPLFDPPRHDSAETIRRALDLGVNVKMITGDQLAIAKETGRRLGMGSNMYPSSSLLGKHKDEAMAHIPVEDLIEKADGFAGVFPEHKYEIVKKLQERKHICGMTGDGVNDAPALKKADIGIAVADATDAARGASDIVLTEPGLSVIISAVLTSRAIFQRMKNYTIYAVSITIRIVFGFMLIALIWKFDFSPFMVLIIAILNDGTIMTISKDRVKPSPTPDSWKLKEIFATGVVLGGYMAIMTVVFFWAAYKTDFFPRTFHVRDLRGSEHEMMSALYLQVSIVSQALIFVTRSRSWSFTERPGYFLLIAFWVAQLIATAIAVYGNWEFARIKGIGWGWAGVIWLYSIVFYFPLDIMKFAIRYILAGTAWKNIIDNRTAFTTKQNYGIEEREAQWAHAQRTLHGLQNTETANVVPERGGYRELSEIANQAKRRAEIARLRELHTLKGHVESVVKLKGLDIETAGHYTV

SEQ ID NO: 22386 - protein, 954 aa, Arabidopsis thaliana
MAGNKDSSWDDIKNEGIDLEKIPIEEVLTQLRCTREGLTSDEGQTRLEIFGPNKLEEKKENKVLKFLGFMWNPLSWVMELAAIMAIALANGGGRPPDWQDFVGITVLLIINSTISFIEENNAGNAAAALMAGLAPKTKVLRDGKWSEQEAAILVPGDIISIKLGDIVPADGRLLDGDPLKIDQSALTGESLPVTKHPGQEVYSGSTCKQGELEAVVIATGVHTFFGKAAHLVDSTNQEGHFQKVLTAIGNFCICSIAIGMLIEIVVMYPIQKRAYRDGIDNLLVLLIGGIPIAMPTVLSVTMAIGSHRLSQQGAITKRMTAIEEMAGMDVLCSDKTGTLTLNKLTVDKSMVEVFVKDLDKDQLLVNAARASRVENQDAIDACIVGMLGDPREAREGITEVHFFPFNPVDKRTAITYIDANGNWHRVSKGAPEQIIELCNLREDASKRAHDIIDKFADRGLRSLAVGRQTVSEKDKNSPGEPWQFLGLLPLFDPPRHDSAETIRRALDLGVNVKMITGDQLAIGKETGRRLGMGTNMYPSSALLGQDKDESIASLPVDELIEKADGFAGVFPEHKYEIVKRLQEMKHICGMTGDGVNDAPALKRADIGIAVADATDAARSASDIVLTEPGLSVIVSAVLTSRAIFQRMKNYTIYAVSITIRIVMGFMLLALIWKFDFSPFMVLIVAILNDGTIMTISKDRVKPSPLPDSWKLKEIFATGVVLGTYLAVMTVVFFWAAESTDFFSAKFGVRSISGNPHELTAAVYLQVSIVSQALIFVTRSRSWSYVERPGFWLISAFFMAQLIATLIAVYANWNFARIRGIGWGWAGVIWLYSIVFYIPLDILKFIIRYSLSGRAWDNVIENKTAFTSKKDYGKGEREAQWAQAQRTLHGLQPAQTSDMFNDKSTYRELSEIADQAKRRAEVARLRERHTLKGHVESVVKQKGLDIEAIQQHYTL

SEQ ID NO: 22387 - protein, 949 aa, Arabidopsis thaliana
MSELDHIKNESVDLVRIPMEEVFEELKCTKQGLTANEASHRLDVFGPNKLEEKKESKLLKFLGFMWNPLSWVMEVAALMAIALANGGGRPPDWQDFVGIVCLLLINSTISFIEENNAGNAAAALMAGLAPKTKVLRDNQWSEQEASILVPGDVISIKLGDIIPADARLLDGDPLKIDQSSLTGESIPVTKNPSDEVFSGSICKQGEIEAIVIATGVHTFFGKAAHLVDNTNQIGHFQKVLTSIGNFCICSIALGIIVELLVMYPIQRRRYRDGIDNLLVLLIGGIPIAMPSVLSVTMATGSHRLFQQGAITKRMTAIEEMAGMDVLCCDKTGTLTLNKLTVDKNLVEVFAKGVGKEHVFLLAARASRIENQDAIDAAIVGMLADPKEARAGVREVHFFPFNPVDKRTALTYVDSDGNWHRASKGAPEQILNLCNCKEDVRRKVHGVIDKFAERGLRSLAVARQEVLEKKKDAPGGPWQLVGLLPLFDPPRHDSAETIRRALNLGVNVKMITGDQLAIGKETGRRLGMGTNMYPSSALLGQVKDSSLGALPVDELIEKADGFAGVFPEHKYEIVHRLQQRNHICGMTGDGVNDAPALKKADIGIAVVDATDAARGASDIVLTEPGLSVIISAVLTSRAIFQRMKNYTIYAVSITIRIVFGFMFIALIWQFDFSPFMVLIIAILNDGTIMTISKDRMKPSPQPDSWKLRDIFSTGVVLGGYQALMTVVFFWVMKDSDFFSNYFGVRPLSQRPEQMMAALYLQVSIISQALIFVTRSRSWSYAECPGLLLLGAFVIAQLVATFIAVYANWSFARIEGAGWGWAGVIWLYSFLTYIPLDLLKFGIRYVLSGKAWLNLLENKTAFTTKKDYGKEEREAQWAAAQRTLHGLQPAEKNNIFNEKNSYSELSQIAEQAKRRAEVVRLREINTLKGHVESVVKLKGLDIDTIQQHYTV

SEQ ID NO: 22388 - protein, 931 aa, Arabidopsis thaliana
MEEVFEELKCTKQGLTANEASHRLDVFGPNKLEEKKESKLLKFLGFMWNPLSWVMEVAALMAIALANGGGRPPDWQDFVGIVCLLLINSTISFIEENNAGNAAAALMAGLAPKTKVLRDNQWSEQEASILVPGDVISIKLGDIIPADARLLDGDPLKIDQSSLTGESIPVTKNPSDEVFSGSICKQGEIEAIVIATGVHTFFGKAAHLVDNTNQIGHFQKVLTSIGNFCICSIALGIIVELLVMYPIQRRRYRDGIDNLLVLLIGGIPIAMPSVLSVTMATGSHRLFQQGAITKRMTAIEEMAGMDVLCCDKTGTLTLNKLTVDKNLVEVFAKGVGKEHVFLLAARASRIENQDAIDAAIVGMLADPKEARAGVREVHFFPFNPVDKRTALTYVDSDGNWHRASKGAPEQILNLCNCKEDVRRKVHGVIDKFAERGLRSLAVARQEVLEKKKDAPGGPWQLVGLLPLFDPPRHDSAETIRRALNLGVNVKMITGDQLAIGKETGRRLGMGTNMYPSSALLGQVKDSSLGALPVDELIEKADGFAGVFPEHKYEIVHRLQQRNHICGMTGDGVNDAPALKKADIGIAVVDATDAARGASDIVLTEPGLSVIISAVLTSRAIFQRMKNYTIYAVSITIRIVFGFMFIALIWQFDFSPFMVLIIAILNDGTIMTISKDRMKPSPQPDSWKLRDIFSTGVVLGGYQALMTVVFFWVMKDSDFFSNYFGVRPLSQRPEQMMAALYLQVSIISQALIFVTRSRSWSYAECPGLLLLGAFVIAQLVATFIAVYANWSFARIEGAGWGWAGVIWLYSFLTYIPLDLLKFGIRYVLSGKAWLNLLENKTAFTTKKDYGKEEREAQWAAAQRTLHGLQPAEKNNIFNEKNSYSELSQIAEQAKRRAEVVRLREINTLKGHVESVVKLKGLDIDTIQQHYTV

SEQ ID NO: 22389 - protein, 954 aa, Arabidopsis thaliana
MAGNKDSSWDDIKNEGIDLEKIPIEEVLTQLRCTREGLTSDEGQTRLEIFGPNKLEEKKENKVLKFLGFMWNPLSWVMELAAIIGIALANGGGRPPDWQDFVGITVLLIINSTISFIEENNAGNAAAALMAGLAPKTKVLRDGKWSEQEAAILVPGDIISIKLGDIVPADGRLLDGDPLKIDQSALTGESLPVTKHPGQEVYSGSTCKQGELEAVVIATGVHTFFGKAAHLVDSTNQEGHFQKVLTAIGNFCICSIAIGMLIEIVVMYPIQKRAYRDGIDNLLVLLIGGIPIAMPTVLSVTMAIGSHRLSQQGAITKRMTAIEEMAGMDVLCSDKTGTLTLNKLTVDKSMVEVFVKDLDKDQLLVNAARASRVENQDAIDACIVGMLGDPREAREGITEVHFFPFNPVDKRTAITYIDANGNWHRVSKGAPEQIIELCNLREDASKRAHDIIDKFADRGLRSLAVGRQTVSEKDKNSPGEPWQFLGLLPLFDPPRHDSAETIRRALDLGVNVKMITGDQLAIGKETGRRLGMGTNMYPSSALLGQDKDESIASLPVDELIEKADGFAGVFPEHKYEIEKRLQEMKHICGMTGDGVNDAPALKRADIGIAAADATDAARSASDIVLTEPGLSVIVSAVLTSRAIFQRMKNYTIYAVSITIRIVMGFMLLALIWKFDFSPFMVLIVAILNDGTIMTISKDRVKPSPLPDSWKLKEIFATGVVLGTYLAVMTVVFFWAAESTDFFSAKFGVRSISGNAHELTAAVYLQVSIVSQALIFVTRSRSWSYVERPGFWLISAFFMAQLIATLIAVYANWNFARIRGIGWGWAGVIWLYSIVFYIPLDILKFIIRYSLSGRAWDNVIENKTAFTSKKDYGKGEREAQWAQAQRTLHGLQPAQTSDMFNDKSTYRELSEIADQAKRRAEVARLRERHTLKGHVESVVKQKGLDIEAIQQHYTL

SEQ ID NO: 22390 - protein, 949 aa, Arabidopsis thaliana
MAADISWDEIKKENVDLEKIPVDEVFQQLKCSREGLSSEEGRNRLQIFGANKLEEKVENKFLKFLGFMWNPLSWVMEAAAIMAIVLANGGGRPPDWQDFVGITCLLIINSTISFIEENNAGNAAAALMANLAPKTKVLRDGRWGEQEAAILVPGDLISIKLGDIVPADARLLEGDPLKIDQSALTGESLPATKHQGDEVFSGSTCKQGEIEAVVIATGVHTFFGKAAHLVDSTNNVGHFQKVLTAIGNFCICSIGIGMLIEIIIMYPIQHRKYRDGIDNLLVLLIGGIPIAMPTVLSVTMAIGSHRLSQQGAITKRMTAIEEMAGMDVLCSDKTGTLTLNKLTVDKNLIEVFSKDVDKDYVILLSARASRVENQDAIDTSIVNMLGDPKEARAGITEVHFLPFNPVEKRTAITYIDTNGEWHRCSKGAPEQIIELCDLKGETKRRAHEIIDKFAERGLRSLGVARQRVPEKDKESAGTPWEFVGLLPLFDPPRHDSAETIRRALDLGVNVKMITGDQLAIGKETGRRLGMGTNMYPSSSLLENKDDTTGGVPVDELIEKADGFAGVFPEHKYEIVRKLQERKHIVGMTGDGVNDAPALKKADIGIAVDDATDAARSASDIVLTEPGLSVIVSAVLTSRAIFQRMKNYTIYAVSITIRIVLGFMLVALIWEFDFSPFMVLIIAILNDGTIMTISKDRVKPSPIPDSWKLKEIFATGVVLGTYMALVTVVFFWLAHDTTFFSDKFGVRSLQGKDEELIAVLYLQVSIISQALIFVTRSRSWSFVERPGLLLLIAFFVAQLIATLIATYAHWEFARIKGCGWGWCGVIWIYSIVTYIPLDILKFITRYTLSGKAWNNMIENRTAFTTKKDYGRGEREAQWALAQRTLHGLKPPESMFEDTATYTELSEIAEQAKKRAEVARLREVHTLKGHVESVVKLKGLDIDNLNQHYTV

SEQ ID NO: 22391 - protein, 948 aa, Arabidopsis thaliana
MATEFSWDEIKKENVDLERIPVEEVFEQLKCSKEGLSSDEGAKRLEIFGANKLEEKSENKFLKFLGFMWNPLSWVMESAAIMAIVLANGGGKAPDWQDFIGIMVLLIINSTISFIEENNAGNAAAALMANLAPKTKVLRDGKWGEQEASILVPGDLISIKLGDIVPADARLLEGDPLKIDQSALTGESLPTTKHPGDEVFSGSTCKQGEIEAVVIATGVHTFFGKAAHLVDSTNNVGHFQKVLTSIGNFCICSIGLGMLIEILIMYPIQHRTYRDGIDNLLVLLIGGIPIAMPTVLSVTMAIGSHRLSQQGAITKRMTAIEEMAGMDVLCSDKTGTLTLNKLSVDKSLIEVFPKNMDSDSVVLMAARASRIENQDAIDASIVGMLGDPKEARAGITEVHFLPFNPVDKRTAITYIDESGDWHRSSKGAPEQIIELCNLQGETKRKAHEVIDGFAERGLRSLGVAQQTVPEKTKESDGSPWEFVGLLPLFDPPRHDSAETIRRALELGVNVKMITGDQLAIGIETGRRLGMGTNMYPSTSLLGNSKDESLVGIPIDELIEKADGFAGVFPEHKYEIVKKLQERKHICGMTGDGVNDAPALKKADIGIAVADATDAARSASDIVLTEPGLSVIISAVLTSRAIFQRMKNYTIYAVSITIRIVLGFMLVALIWRFDFAPFMVLIIAILNDGTIMTISKDRVKPSPVPDSWKLNEIFATGVVLGTYMALTTVLFFWLAHDTDFFSKTFGVRSIQGNEEELMAALYLQVSIISQALIFVTRSRSWSFVERPGFLLLIAFVIAQLVATLIAVYANWGFARIVGCGWGWAGGIWVYSIITYIPLDILKFIIRYALTGKAWDNMINQKTAFTTKKDYGKGEREAQWALAQRTLHGLPPPEAMFNDNKNELSEIAEQAKRRAEVARLRELHTLKGHVESVVKLKGLDIDTIQQHYTV

SEQ ID NO: 22392 - protein, 954 aa, Prunus persica
MGGDKAISLEEIKNESVDLERIPIEEVFEQLKCTREGLTGDEGANRLQVFGPNKLEEKKESKLLKFLGFMWNPLSWVMEAAAVMAIALANGGGRPPDWQDFVGIVVLLVINSTISFIEENNAGNAAAALMAGLAPKTKVLRDGRWTEQEASILVPGDIISIKLGDIVPADARLLEGDPLKIDQSALTGESLPVTKNPSEEVFSGSTCKQGEIEAVVIATGVHTFFGKAAHLVDSTNQVGHFQKVLTAIGNFCICSIAVGILIELIVMYPIQKRKYRDGIDNLLVLLIGGIPIAMPTVLSVTMAIGSHRLSQQGAITKRMTAIEEMAGMDVLCSDKTGTLTLNKLSVDRNLIEVFAKGVEKEHVMLLAARASRTENQDAIDAAIVGMLADPKEARVGIREVHFLPFNPVDKRTALTYIDSDGNWHRASKGAPEQILALCNCKEDFKKRVHAVIDKFAERGLRSLAVARQQVPEKTKESPGTPWQFVGLLPLFDPPRHDSAETIRRALNLGVNVKMITGDQLAIGKETGRRLGMGTNMYPSSALLGQDKDASIASLPVDELIEKADGFAGVFPEHKYEIVKRLQERKHICGMTGDGVNDAPALKKADIGIAVADATDAARGASDIVLTEPGLSVIISAVLTSRAIFQRMKNYTIYAVSITIRIVFGFMFIALIWKFDFAPFMVLIIAILNDGTIMTISKDRVKPSPQPDSWKLKEIFATGIVLGGYMALMTVVFFWLMKDTKFFSNTFNVRHLGDRPEQMMAALYLQVSIVSQALIFVTRSRSWSFVERPGLLLLGAFMVAQLVATLIAVYANWAFARIEGCGWGWAGVIWLFSVVTYFPLDLLKFAIRYILSGKAWDNLLENKTAFTTKKDYGKEEREAQWAAAQRTLHGLQPPETNNLFSEKNSYRELSEIAEQAKRRAEVARLRELHTLKGHVESVVKLKGLDIDTIQQHYTV

SEQ ID NO: 22393 - protein, 896 aa, Mesorhizobium loti
MGVRWRYPHADRREGHQPLHVVLMIGEAGQQSVSPQDGAYWSIETNDLLLRLDTSVSGLASSEAASRLAKFGRNTLASTSSASALAVFARQFRSPLVLILIFAACVSAFVGDGQEAAIIGAIVLASCVLSFTQEYGASRATEALKQRISRKAIVLRDGAECSVAAEEIVPGDVIRLSAGNLIPADGIILDARDFNVSEAVLTGETFPAVKTPGRSAPDAALTLRTNAVFTGTSVRSGTATVLAAATGTRTEFASIAAALERQIPETGFARGIRLFGYLMTEIMLAIVILVFFANLLLHRPLIESLLFSLALAVGLTPELLPAIISVTLARGARAMAANGVIVRRLDAIENLGSMDLLCTDKTGTLTEGVIHLDGWLDVDGNPSTDVLLWARLNATLQTGLKNPLDEAIAGVPGEGASLAAFTKVDEIPYDFIRKRLSVVVRPKDAQDLLITKGAVQNVLETCSFVRTAKGLEPLNEMHRAAIDEKFRRWSADGFRVLGLAIRRFESQKTFSRKDEIDLTFAGFLLFLDPPKKGVKETLAELAQRGIAVKVISGDNRYVAAHLAQAIGLRADRIMTGEELSKLTKSALFAGVQHTDLFVEIDPNQKERIVQALRSRGRVVGYLGDGINDAPALHEADIGISVDSAVDVAREAADIILLKQDLGVLVRGVDDGRKTFANTMKYISITTSANFGNMISMAVASLFLPFLPLLAKQILLNNFLSDVPSLAIASDNVDPDQLRRPRHWDIRFVRRFMISFGLVSSLFDFATFAFLLFFARATEAAFQTAWFVESLLTELAIVLIVRTHRAFWASRPSPLLAWLTLAVGIVAIMIPYLPFAAWFGFVPLPLPVLVGLVAITALYLLASEATKRWFFGQESRARKKKLLAGQRSFLDRLVAKV

SEQ ID NO: 22394 - protein, 1103 aa, Dunaliella acidophila
MSGKERTEENGAVKQDTKEQVKKSADNGDKGVDEVDFAKIGLEDAFKYLNCSEHGLSGAEAEARLKQHGPNKLPDNSRNPVLVYFGYMWNPLAWAMEAAAIIAIALVDGADFALIVGLLIINATISFVEESNADKAIKALSAALAPKAMALRNGAMVTIDAVDLVPGDVILIRIGNVVPADVKLLPEHGADDYETPVQIDQAALTGESLPAKKFTGNVAFSGSTVKQGERHAVVYATGVNTFFGRAAALISGTHNVANIQRVMNRIGGLCLITIGVWVVIEVPVQFAHYKHSCVAGKEGCPTLLNMLVILVGAIPIAMPTVLSVTLALGAYKLAREGAIVTRMSAVEEMAGLDVLCSDKTGTLTLNKLSIDPSNVFPVGTMDIPEVMKFGALSANIITEEPIDMVLWESYPEREKLKSEYKHTKYFPFNPNDKITIATVLEIATGRVFRVLKGSPQVVLAKAWNAQALDGPVNEKIKEYAGRGFRSLGIAMAEGDGKDGTKWEMLAVLPMFDPPRHDTKETIERCMKQGIAVKMVTGDHLLIGKETAKMLGMGTEMYPSEVLIKARNGDVEAPHGYKNYVAMVEACNGFAQVFPEHKFEIVEILQEAHHRVGMTGDGVNDAPALKKAHVGVAVADATDAARGAADIVLTEPGLSTIVTAVIGARKIFKRMTTYAKYTISVTFRIAFTFGLLTVIYDWYFPTILIVILAVFNDGAMIALSKDRVVASVLPSTWNLATIFVPGFVYAMWLTLSSWALYQVATHSTFFERMTPLPSLNTQHATLISWCEDEISSKLGVNPQDSLCTYPSYADQLNECKGSVSLSSQVPGVPTILDQCVTEQRYIRDALTRALIYTHLSVSGQAVVFVVRTSGFSLKEVAGVSTYVAFALAQFGATMFGIFGLGGYNKPRQNFDNCQFCDYSTHNRVLFFNSEVEPRAGTESVYTASVIGCGGYVIVAWIWAALFYTALDPLKWGLMWIMNDDGFRDRHAWRKSNHEAMERRSREQLDNKEFAGPSGMVPANFSNPLGRASMSKPVSALLDRKSASLVAINRSSMTVSHDPNHALNIGRRSMIGRPSGPLGRNSNTGQSNPLNSSSVEIKPDAPNKV

SEQ ID NO: 22395 - protein, 822 aa, Glycine max
  unsure (1)..(822): unsure at all Xaa locations
XPRVRPRVRPRVXAHASAHASADAWVISIKLGDIIPADARLLEGDPLSVDQSALTGESLPVTKSPSDEVFSGSTVKKGEIEAVVIATGVHTFFGKAAHLVDSTNQVGHFQKVLTAIGNFCICSIAVGIVIELIVMYPIQHRRYRDGIDNLLVLLIGGIPIAMPTVLSVTMAIGSHRLSQQGAITKRMTAIEEMAGMDVLCSDKTGTLTLNKLSVDRNLIEVFAKGVEKEYVILLAARASRTENQDAIDAAIVGMLADPKEARAGIREVHFLPFNPVDKRTALTYIDSDGNWHRSSKGAPEQILNLCNCKEDVRKRVHGTIDKFAERGLRSLGVARQEVPEKTKDSPGAPWQFVGLLPLFDPPRHDSAETITRALNLGVNVKMITGDQLAIGKETGRRLGMGTNMYPSSALLGQSKDAAISALPVDELIEKADGFAGVFPEHKYEIVKRLQERKHICGMTGDGVNDAPALKKADIGIAVADATDAARSASDIVLTEPGLSVIISAVLTSRAIFQRMKNYTIYAVSITIRIVFGFMFIALIWKFDFAPFMVLIIAILNDGTIMTISKDRVKPSPMPDSWKLREIFATGVVLGSYMALMTVVFFWVMKDTDFFSDKFGVRPLRNSPGEMMAALYLQVSIISQALIFVTRSRSWSFVERPGLLLLGAFFIAQLVATFIAVYANWGFARIKGMGWGWAGVIWLYSVVTYIPLDILKFAIRYVLSGKAWDNLLENKTAFTTKKDYGKEEREAQWATAQRTLHGLQPPETTNLFNDKNSYRELSEIAEQAKRRAEVARLRELHTLKGHVESVVKLKGLDIDTIQQHYTV

SEQ ID NO: 22396 - protein, 527 aa, Glycine max
  unsure (1)..(527): unsure at all Xaa locations
XPEQILNLAHNKSDIERRVHAVIDKFAERGLRSLAVAFQDVPDGRKESPGGPWQFIGLLSLFDPPRHDSAETIRRALNLGVNVKMITGDQLAIGKETGRRLGMGTNMYPSSALLGQDKDESIVALPIDELIEKADGFAGVFPEHKYEIVKRLQARKHICGMTGDGVNDAPALKKADIGIAVADATDAARSASDIVLTEPGLSVIISAVLTSRAIFQRMKNYTIYAVSITIRIVLGFMLLALIWKFDFPPFMVLIIAILNDGTIMTISKDRVKPSPLPDSWKLAEIFTTGVVLGSYLAMMTVIFFWAAYKTNFFPRVFGVSTLEKTAHDDYRKLASAIYLQVSTISQALIFVTRSRGWSYVERPGILLVTAFVIAQLIATLIAVYANWSFAAIEGIGWGWAGVIWLYNIIFYIPLDPIKFLIRYALSGRAWDLVIEQRIAFTRQKDFGKEQRELQWAHAQRTLHGLQPADTKFNERTHVSELNQMAEEAKRRAEIARLRELHTLKGHVESVVRLKGLDIDTIQQAYTL

SEQ ID NO: 22397 - protein, 350 aa, Glycine max
  unsure (1)..(350): unsure at all Xaa locations
MGGISLEEIKNENVDLERIPIEEVFEQLKCSRAGLTSEEGANRLQVFGPNKLEEKKESKFLKFLGFMWNPLSWVMEAAAIMAIALANGGGRPPDWQDFVGIIALLVINSTISFIEENNAGNAAAALMAGLAPKTKVLRDNRWSEQDAAILVPGDIISIKLGDIIPADARLLEGDPLSVDQSALTGESLPVTKSPSDEVFSGSTVKKGEIEAVVIATGVHTFFGKAAHLVDSTNQVGHFQKVLTAIGNFCICSIAVGIIIELIVMYPIQHRKYRDGIDNLLVLLIGGIPIAMPTVLSVTXXAIGSHRLSQQGAITKRMTAIEEMAGXMDVLCSDKTGTLTLXKLSVDXNLI

SEQ ID NO: 22398 - protein, 966 aa, Medicago truncatula
MVEGTMSLDAVIKEAVDLENIPIDEVFDNLKCTKEGLTCEEVQERLELFGYNKLEEKKESKILKFLGFMWNPLSWVMEAAAIMAIAMAHGGRNMDGTKKQGDYQDFVGIIILLIINSTISFIEENNAGNAAAALMARLAPKAKVLRDGKWSEEDASVLVPGDIVSIKLGDIIPADARLLEGDPLKIDQSALTGESLPVTKHPGEGIYSGSTCKQGEIEAIVIATGVHTFFGKAAHLVENTTHVGHFQKVLTSIGNFCICSIAIGMVIEIIVIYGVHGKGYRNGIDNLLVLLIGGIPIAMPTVLSVTMAIGSHKLSQQGAITKRMTAIEEMAGMDVLCSDKTGTLTLNKLTVDKDMIEVFAKGVDKDLVVLMAARASRLENQDAIDCAIVSMLADPKEARTGIKEVHFLPFNPTDKRTALTYIDAAGNMHRVSKGAPEQILNLARNKAEIAQKVHSMIDKFAERGLRSLGVARQEVPEGSKDSPGGPWEFVALLPLFDPPRHDSAETIRRALDLGVSVKMITGDQLAIGKETGRRLGMGTNMYPSSSLLGDNKDQLGAVSIDDLIENADGFAGVFPEHKYEIVKRLQARKHICGMTGDGVNDAPALKIADIGIAVADSTDAARSASDIVLTEPGLSVIISAVLTSRAIFQRMKNYTIYAVSITIRIVLGFMLLNSFWSFDSPPFMVLIIAILNDGTIMTISKDRVKPSPLPDSWKLSEIFATGVILGTYLAIMTVIFFWIVMETNFFPDNFGVHRFRPDLKAPVTSEMTEKLASAVYLQVSTISQALIFVTRSRGWSYTERPGLLLVFAFAIAQLVATVISAQATWKIAGIRGIGWGWAGVIWLFNIVTYVFLDPLKFVVAYQQSGRAWNLVVNQRTAFTNKNDFGKEAREAAWAAEQRTLHGLRSAEIKGFAEKHNHREINTMADEAKRRAGLARLRELHTLKGRVESFAKLRGLDIDTMNGHYTV

SEQ ID NO: 22399 - protein, 965 aa, Medicago truncatula
MVEGTMSLDAVIKEAVDLENIPIDEVFDNLKCTKEGLTCEEVQERLELFGYNKLEEKKESKILKFLGFMWNPLSWVMEAAAIMAIAMAHGGRNMDGTKKQGDYQDFVGIIILLIINSTISFIEENNAGNAAAALMARLAPKAKVLRDGKWSEEDASVLVPGDIVSIKLGDIIPADARLLEGDPLKIDQSALTGESLPVTKHPGEGIYSGSTCKQGEIEAIVIATGVHTFFGKAAHLVENTTHVGHFQKVLTSIGNFCICSIAIGMVIEIIVIYGVHGKGYRNGIDNLLVLLIGGIPIAMPTVLSVTMAIGSHKLSQQGAITKRMTAIEEMAGMDVLCSDKTGTLTLNKLTVDKDMIEVFAKGVDKDLVVLMAARASRLENQDAIDCAIVSMLADPKEARTGIKEVHFLPFNPTDKRTALTYIDAAGNMHRVSKGAPEQILNLARNKAEIAQKVHSMIDKFAERGLRSLGVARQEVPEGSKDSPGGPWEFVALLPLFDPPRHDSAETIRRALDLGVSVKMITGDQLAIGKETGRRLGMGTNMYPSSSLLGDNKDQLGAVSIDDLIENADGFAGVFPEHKYEIVKRLQARKHICGMTGDGVNDAPALKIADIGIAVADSTDAARSASDIVLTEPGLSVIISAVLTSRAIFQRMKNYTIYAVSITIRIVLGFMLLNSFWSFDSPPFMVLIIAILNDGTIMTISKDRVKPSPLPDSWKLSEIFATGVILGTYLAIMTVIFFWIVMETNFFPNFGVHRFRPDLKAPVTSEMTEKLASAVYLQVSTISQALIFVTRSRGWSYTERPGLLLVFAFAIAQLVATVISAQATWKIAGIRGIGWGWAGVIWLFNIVTYVFLDPLKFVVAYQQSGRAWNLVVNQRTAFTNKNDFGKEAREAAWAAEQRTLHGLRSAEIKGFAEKHNHREINTMADEAKRRAELARLRELHTLKGRVESFAKLRGLDIDTMNGHYTV

SEQ ID NO: 22400 - protein, 268 aa, Medicago truncatula
CSDKTGTLTLNKLSVEQNLIEVFAKGVEKDYVILLAARASRTENQDAIDAAIVGMLADPKEARAGVREVHFFPFNPVDKRTALTYIDADGNWHRSSKGAPEQILNLCNCKEDVRKKAHSTIDKFAERGLRSLGVARQEIPEKDKDSPGAPWQFVGLLPLFDPPRHDSAETITRALNLGVNVKMITGDQLAIAKETGRRLGMGTNMYPSSSLLGQSKDAAVFALPVDELIEKADGFAGVFPDTKYWNKRKLQERKTYMWEMTGGGKNDA

SEQ ID NO: 22401 - protein, 266 aa, Medicago truncatula
  unsure (1)..(266): unsure at all Xaa locations
CSDKTGTLPLNKLTVDQNLVEVFAKGVDADAVVLMAARASRLENQDAIDTAIVGMLADPKEARAGIQEVHFLPFNPTDKRTALTYIDQDGKMHRVSKGAPEQILNLAHNRTDIERRVHSVIDKFAERGLRSLAVATKXVPDGRKESPGTPWQFIGLMPLFDPPRHDSAETIRRALNLGVNVKMITGDQLAIGKETGRRLGMGTNMYPSSALLGQNKDESIAALPVDDLIEKADGFAGVFLEHKYEIVKRLQARKHICDDRGWSKRS

SEQ ID NO: 22402 - protein, 951 aa, Phaseolus vulgaris
MGGISLEEIKNENVDLERIPIEEVFEQLKCSRAGLTSDEGANRLQVFGPNKLEEKKESKFLKFLGFMWNPLSWVMEAAAIMAIALANGGGRPPDWQDFVGIIALLVINSTISFIEENNAGNAAAALMAGLAPKTKVLRDGRWSEQDAAILVPGDIISIKLGDIIAADARLLEGDPLSVDQSALTGESLPVTKSSSDEVFSGSTVKKGEIEAVVIATGVHTFFGKAAHLVDSTNQVGHFQKVLTAIGNFCICSIAIGIAIELIVMYPIQHRKYRDGIDNLLVLLIGGIPIAMPTVLSVTMAIGSHRLSQQGAITKRMTAIEEMDGMDVLCSDKTGTLTLNKLSVDRNLIEVFAKGVEKEYVILLAARASRTENQDAIDAAIVGMLADPKEARSGIREVHFLPFNPVDKRTALTYIDSDGNWHRSSKGAPEQIITLCNCKEDVRKKVHAVIDKFAERGLRSLGVARQEVPEKSKDGAGGPWQFVGLLPLFDPPRHDSAETIRRALNLGVNVKMITGDQLAIGKETGRRLGMGTNMYPSSALLGQDKDASISALPVDELIDKADGFAGVFPEHKYEIVKRLQERKHICGMTGDGVNDAPALKKADIGIAVADATDAARSASDIVLTEPGLSVIISAVLTSRAIFQRMKNYTIYAVSITIRIVFGFLFIALIWKFDFAPFMVLIIAILNDGTIMTISKDRVKPSPLPDSWKLREIFATGVVLGSYMALMTVIFFWAMKDTNFFSNKFGVRSLRLSPEEMMAALYLQVSIISQALIFVTRSRSWSFAERPGLLLLGAFLIAQLVATFIAVYANWGFARIKGMGWGWAGVIWLYSVVTYIPLDILKFAIRYILSGKAWDNLLENKTAFTTKKDYGKEEREAQWAAAQRTLHGLQPPETSNLFNDKNSYRELSEIAEQAKRRAEVARLRELHTLKGHVESVVKLKGLDIDTIQQHYTV

SEQ ID NO: 22403 - protein, 245 aa, Sesbania rostrata
TVDKNLIEVFAKGVEKEYVILLAARASRTENQDAIDAAIVGMLADPKEARAGIREVHFLPFNPVDKRTALTYIDSDGNWHRSSKGAPEQILNLCNCKEDVRKRVHTAIDKFAERGLRSLGVARQEVPEKNKDSPGAPWQFVALLPLFDPPRHDSAETITRALNLGVNVKMITGDQLAIAKETGRRLGMGTNMYPSSSLLGQSKDASVSALPVDELIEKADGFAGVFPEHKYEIVKRLQERKHICG

SEQ ID NO: 22404 - protein, 245 aa, Sesbania rostrata
TVDKNLIEVFAKGVDKEHVLLLAARASRTENQDAIDAAVVGTLADPKEARAGIREVHFFPFNPVDKRTALTYIDSDGNWHRASKGAPEQIMTLCNLRDDAKKKIHAIIDKFAERGLRSLAVARQEVPEKSKDSAGGPWQFVGLLSLFDPPRHDSAETIRRALNLGVNVKMITGDQLAIAKETGRRLGMGTNMYPSASLLGQDKDASIAALPIEELIEKADGFAGVFPEHKYEIVKKLQERKHICG

SEQ ID NO: 22405 - protein, 245 aa, Sesbania rostrata
TVDKNLIEVFAKGVDKEHVLLLAARASRTENQDAIDAAVVGTLADPKEARAGIREVHFFPFNPVDKRTALTYIDSDGNWHRASKGAPEQIMTLCNLRDDAKKKIHAMIDKFAERGLRSLAVARQEVPEKSKESAGGPWQFVGLLSLFDPPRHDSAETIRRALHLGVNVKMITGDQLAIAKETGRRLGMGTNMYPSATLLGQGKDSNIAALPVEELIEKADGFAGVFPEHKYEIVKKLQERKHICG

SEQ ID NO: 22406 - protein, 245 aa, Sesbania rostrata
TVDKNLVEVFAKGVDADTVVLMAARASRLENQDAIDTAIVGMLADPKEARAGIQEVHFLPFNPTDKRTALTYIDQDGKMHRVSKGAPEQILNLAHNKTDIERRVHAVIDKFAERGLRSLAVAYQEVPDGRKESAGGPWQFIGLMPLFDPPRHDSAETIRRALNLGVNVKMITGDQLAIGKETGRRLGMGTNMYPSSALLGQDKDESIAALPIDELIEKADGFAGVFPEHKYEIVKRLQARKHICG

SEQ ID NO: 22407 - protein, 245 aa, Sesbania rostrata
TVDKNLVEVFAKGVDADTVVLMAARASRLENQDAIDTAIVGMLADPKEARVGIQEIHFLPFNPTDKRTALTYIDRDGKMHRVSKGAPEQILNLAHNKSDIERRVHVVIDKFAERGLRSLAVAYQEVPDGRKESAGGPWQFIGLMPLFDPPRHDSAETIRRALNLGVNVKMITGDQLAIGKETGRRLGMGTNMYPSSALLGQDKDESISALPIDELIEKADGFAGVFPEHKYEIVKRLQARKHICG

SEQ ID NO: 22408 - protein, 951 aa, Vicia faba
MGGISLEEIKNENVDLERIPVEEVFEQLKCSKEGLSSDEGANRLQVFGPNKLEEKKESKFLKFLGFMWNPLSWVMEAAAIMAIALANGSGRPPDWQDFVGIISLLVINSTISFIEENNAGNAAAALMAGLAPKTRVLRDGRWSEEDTAILVPGDIISIKLGDIIPADARLLEGDALSVDQSALTGESLPATKNPSDESFSGSTVKKGEIEAVVIATGVHTFFGKAAHLVDNTNQVGHFQKVLTAIGNFCICSIALGILIELVVMYPIQHRKYRDGIDNLLVLLIGGIPIAMPTVLSVTMAIGSHRLSQQGAITKRMTAIEEMAGMDVLCSDKTGTLTLNKLSVDKNLIEVFAKNVEKDYVILLAARASRTENQDAIDAAIVGMLANPKEARAGVREIHFFPFNPVDKRTALTYIDSDGNWHRSSKGAPEQILNLCNCKEDVRKKAHSVIDKFAERGLRSLGVARQEVPEKNKDSPGAPWQFVGLLPLFDPPRHDSAETITRALNLGVNVKMITGDQLAIAKETGRRLGMGTNMYPSSSLLGQSKDAAVAALPVDELIEKADGFAGVFPEHKYEIVKRLQERKHICGMTGDGVNDAPALKRADIGIAVADATDAARGASDIVLTEPGLSVIISAVLTSRAIFQRMKNYTIYAVSITIRIVFGFMFIALIWKFDFAPFMVLIIAILNDGTIMTISKDRVKPSPLPDSWKLKEIFATGVVLGSYMALMTVVFFWLMKDTDFFSDKFGVRSIRKNPDEMMAALYLQVSIISQALIFVTRSRSWSFLERPGLLLLGAFMIAQLVATFIAVYANWGFARIKGMGWGWAGVIWVYSLVTYFPLDILKFVIRYVLSGKAWDNLLENKTAFTTKKDYGKEEREAQWATAQRTLHGLQSPETTNLFNDKNSYRELSEIAEQAKRRAEVARLRELHTLKGHVESVVKLKGLDIDTMQQHYTV

SEQ ID NO: 22409 - protein, 952 aa, Vicia faba
MATNKSITLEEIKNETVDLEHIPVEEVFEQLKCTKEGLSLEEGANRLQIFGPNKLEEKKESKLLKFLGFMWNPLSWVMEAAALMAIGLANGDGKPPDWQDFVGIVCLLVINSTISFIEENNAGNAAAALMAGLAPETKVLRDGKWSEQEAAILVPGDIISIKLGDIVPADARLLEGDPLKIDQSALTGESLPVTRSPGQEVFSGSTCKQGEIEAVVIATGVHTFFGKAAHLVDSTNQVGHFQKVLTAIGNFCICSIAVGMLAEIIVMYPIQHRKYRDGIDNLLVLLIGGIPIAMSTVLSVTTAIGSHRLSQQGAITKRMTAIEEMAGMDVLCSDKTGTLTLNKLSVDKNLIEVFEKGVDKEHVMLLAARASRIENQDAIDAAIVGTLADPKEARAGVREVHFLPFNPVDKRTALTYIDSNGNWHRASKGAPEQIMNLCNLREDAKRNIHAIIDKFAERGLRSLAVSRQEVPEKTKESAGGPWQFVGLLSLFDPPRHDSAETIRRALHLGVNVKMITGDQLAIAKETGRRLGMGTNMYPSATLLGQDKDASIAALPVEELIEKADGFAGVFPEHKYEIVKKLQERKHICGMTGDGVNDAPALKKADIGIAVADATDAARGASDIVLTEPGLSVIISAVLTSRAIFQRMKNYTIYAVSITIRIVFGFMFIALIWKFDFSPFMVLIIAILNDGTIMTISKDRVVPSPLPDSWKLNEIFATGIVLGGYLALMTVIFFWAIKETHFFPDKFGVRHLIHDEMMSALYLQVSIVSQALIFVTRSRGWSFLERPGALLVIAFLIAQLIATLIAVYANWGFAKVQGIGWGWAGVIWLYSIVFYIPLDVMKFAIRYILSGKAWNNLLDNKTAFTTKKDYGKEEREAQWAHAQRTLHGLQPPESSGIFNEKSSYRELSEIAEQAKRRAEVARLRELHTLKGHVESVVKLKGLDIDTIQQHYTV

SEQ ID NO: 22410 - protein, 963 aa, Vicia faba
FFSFSHNMAAISLEQIKNESVDLEKIPIEEVFAQLKCTREGLSSTEGESRIQIFGPNKLEEKKESKFLKFLGFMWNPLSWVMEAAAVMAIALANGGGQPPDWQDFVGIVCLLVINSTISFIEENNAGNAAAALMAGLAPKTKVLRDGKWSEQEAAILVPGDIISIKLGDIIPADARLLEGDPLKVDQAALTGESLPVTRHPGQEVFSGSTCKQGEIEAVVIATGVHTFFGKAAHLVDNTNNVGHFQMVLKSIGNFCICSIAVGMLAEIIVMYPIQHRKYRDGIDNLLVLLIGGIPIAMPTVLSVTMAIGSHKLSQQGAITKRMTAIEEMAGMDVLCSDKTGTLTLNKLSVDRNLIEVFIKGMDKEHVILLAARAARTENQDAIDAAIVGMLADPKEARAEITEVHFLPFNPNDKRTALTYIDNKDGTWHRASKGAPEQIIELCNMREDAQKKIHSMIEKFAERGLRSLGVARQEVPEKTKESAGAPWQFVGLLSVFDPPRHDSAETIRQALNLGVNVKMITGDQLAIAKETGRRLGMGTNMYPSATLLGLDKDSSVASMPVEELIEKADGFAGVFPEHKYEIVKKLQERKHICGMTGDGVNDAPALKKADIGIAVADATDAARGASDIVLTEPGLSVIISAVLTSRAIFQRMKNYTIYAVSITIRIVFGFMFIALIWKFDFSPFMILIIAILNDGTIMTISKDRVKPSPLPDSWKLKEIFATGVMLGGYQALMTVIFFWIVQGTKFFPDRFGVRHIHDNPDELTAALYLQVSIVSQALIFVTRSRSGLMLNAPGLLLLGAFLIAQLIATLIAVYANWAFARIQGIGWGWAGVIWLYSIIFYIPLDIIKFATRYFLSGKAWSNLENKTAFTTKKDYGKGEREAQWAHAQRTLHGLEPPESSGIFHEKNSYRELSEIAEQAKRRAEVARLRELHTLKGHVESVVKLKGLDIDTIQQHYTVYKGNT

SEQ ID NO: 22411 - protein, 956 aa, Vicia faba
MAAISLEQIKNESVDLEKIPIEEVFAQLKCTREGLSSTEGESRIQIFGPNKLEEKKESKFLKFLGFMWNPLSWVMEAAAVMAIALANGGGQPPDWQDFVGIVCLLVINSTISFIEENNAGNAAAALMAGLAPKTKVLRDGKWSEQEAAILVPGDIISIKLGDIIPADARLLEGDPLKVDQAALTGESLPVTRHPGQEVFSGSTCKQGEIEAVVIATGVHTFFGKAAHLVDNTNNVGHFQMVLKSIGNFCICSIAVGMLAEIIVMYPIQHRKYRDGIDNLLVLLIGGIPIAMPTVLSVTMAIGSHKLSQQGAITKRMTAIEEMAGMDVLCSDKTGTLTLNKLSVDRNLIEVFIKGMDKEHVILLAARAARTENQDAIDAAIVGMLADPKEARAEITEVHFLPFNPNDKRTALTYIDNKDGTWHRASKGAPEQIIELCNMREDAQKKIHSMIEKFAERGLRSLGVARQEVPEKTKESAGAPWQFVGLLSVFDPPRHDSAETIRQALNLGVNVKMITGDQLAIAKETGRRLGMGTNMYPSATLLGLDKDSSVASMPVEELIEKADGFAGVFPEHKYEIVKKLQERKHICGMTGDGVNDAPALKKADIGIAVADATDAARGASDIVLTEPGLSVIISAVLTSRAIFQRMKNYTIYAVSITIRIVFGFMFIALIWKFDFSPFMILIIAILNDGTIMTISKDRVKPSPLPDSWKLKEIFATGVMLGGYQALMTVIFFWIVQGTKFFPDRFGVRHIHDNPDELTAALYLQVSIVSQALIFVTRSRSGLMLNAPGLLLLGAFLIAQLIATLIAVYANWAFARIQGIGWGWAGVIWLYSIIFYIPLDIIKFATRYFLSGKAWSNLENKTAFTTKKDYGKGEREAQWAHAQRTLHGLEPPESSGIFHEKNSYRELSEIAEQAKRRAEVARLRELHTLKGHVESVVKLKGLDIDTIQQHYTVYKGNT

SEQ ID NO: 22412 - protein, 948 aa, Oryza sativa (japonica cultivar-group)
MTGRAHPPIVIENIPIEEVFEQLKCTREGLSSEEGNRRIEMFGPNKLEEKKESKILKFLGFMWNPLSWVMEMAAIMAIALANGGGKPPDWEDFVGIIVLLVINSTISFIEENNAGNAAAALMANLAPKTKVLRDGRWGEQEAAILVPGDIISIKLGDIVPADARLLEGDPLKIDQSALTGESLPVTKNPGDEVFSGSTCKQGEIEAVVIATGVHTFFGKAAHLVDSTNQVGHFQTVLTAIGNFCICSIAVGIVIEIIVMFPIQHRAYRSGIENLLVLLIGGIPIAMPTVLSVTMAIGSHKLSQQGAITKRMTAIEEMAGMDVLCSDKTGTLTLNKLSVDKNLVEVFTKGVDKDHVLLLAARAFRTETQDAIDAAMVGMLADPKEARAGIREVHFLPFNPVDKGTALTYIDADGNWHRASKGAPEQILTLCNCKEDVKRKVHAVIDKYAERGLRSLAVARQEVPEKSKESAGGPWQFVGLLPLFDPPRHDSAETIRKALHLGVNVKMITGDQLAIGKETGRRLGMGTNMYPSSALLGQNKDASLEALPVDELIEKADGFAGVFPEHKYEIVKRLQEKKHIVGMTGDGVNDAPALKKADIGIAVADATDAARSASDIVLTEPGLSVIISAVLTSRCIFQRMKNYTIYAVSITIRIVLGFLLIALIWKYDFSPFMVLIIAILNDGTIMTISKDRVKPSPLPDSWKLKEIFATGIVLGSYLALMTVIFFWAMHKTDFFTDKFGVRSIRNSEHEMMSALYLQVSIVSQALIFVTRSRSWSFIERPGLLLVTAFMLAQLVATFLAVYANWGFARIKGIGWGWAGVIWLYSIVFYFPLDIFKFFIRFVLSGRAWDNLLENKIAFTTKKDYGREEREAQWATAQRTLHGLQPPEVASNTLFNDKSSYRELSEIAEQAKRRAEIARLRELNTLKGHVESVVKLKGLDIDTIQQNYTV

SEQ ID NO: 22413 - protein, 997 aa, Cryptococcus neoformans var. neoformans
MSDHEKVGHTEEIPTKESSLENKVQGEEVPAAAAADEEPRKKREYKEMEHKTEGDLHAKVDMNTIQFTAADLYDKDKVDIEHVVMEEVYQLLQCTDAGLTEAEATDRIGIFGPNKLEEKSENVLLQFLSFMWNPLSWVMEGAALVAIALSNGGGTPPDWQDFVGIILLLFVNSTIGFVEERNAGNAVKALMDSLAPKARVKRDGQWKEIESSELVPGDLIAFKHGDVCPSDCRLVEAIDVSMDQAALTGESLPVGKHEGDECFSGSTCKQGEAEGIVIATGPNTFFGRAATLVGQDNDQVGHLQQVLARIGTFCLVSIGIFVLLEILILYADFRYPYRRGLDNILVLLIGGIPIAMPTVLSVTLAVGAQQLAKHKAIVTRITAIEELAGVTILCSDKTGTLTTNKLTIDKENVKCYSKWDVEGVCLLAAYASRTENQDAIDGCVVGTLPDPQQARAGIKLLDFKPFNPVDKRTEITYRDEMDGGKLKRATKGMTGIIIEICTRNKTNELEDQLEADVEEFARRGLRALAVAFEDVAGDDPSAEGNGFELVGLLSIFDPPRSDTKKTIDDAMALGVKVKMVTGDQLAIAKETGRRLGLGDHMYPAKVLKEGPEAGSKHANLDEMIMDADGFAGVFPEHKFEIVKRIQNLGHLCAMTGDGANDAPALSRANVGIAVEGATDAARGAADIVLTEPGLSTIVHAIYGSRVIFQRMRNYAIYACAVTIRIVLCFAIMAFAWRFDFPPFMVLIIAVLNDGTIMTLSLDRVLPSTTPDSWDLAEVFSFGVAYGVYLSASTIALYATMENTTFFEDRFGVEPLKGNSYGGHMVIYLQVAIISQALIFVTRSHGPSWTERPSVALMLAFCLAQLVSSIIAAYADWSFSQVHSVSGGWIGIVWIWNIVWYFPLDGIKFIMKKTVIAALQRRKARKAGPAVADAALHRAPSRHESLYSNRTNFLTRAANRLRGGAKISMSQNELQRFSSIQAQQSGAALTRAHSRPAA

SEQ ID NO: 22414 - protein, 952 aa, Lycopersicon esculentum
MAKAISLEEIKNETVDLEKIPIEEVFEQLKCSREGLTSDEGANRLQIFGPNKLEEKKESKILKFLGFMWNPLSWVMEMAAIMAIALANGDGKPPDWQDFVGIVCLLVINSTISFIEENNAGNAAAALMAGLAPKTKVLRDGRWSEQEAAILVPGDIISVKLGDIVPADARLLEGDPLKIDQSALTGESLPVTKNPGDEVFSGSTCKQGELEAVVIATGVHTFFGKAAHLVDSTNNVGHFQKVLTAIGNFCICSIAIGMLVEIIVMYPIQHRKYRDGIDNLLVLLIGGIPIAMPTVLSVTMAIGSHRLSQQGAITKRMTAIEEMAGMDVLCSDKTGTLTLNKLSVDRSLVEVFTKGVDKEYVLLLAARASRVENQDAIDACMVGMLADPKEARAGIREVHFLPFNPVDKRTALTYIDSNGNWHRASKGAPEQILDLCNCKEDVRRKVHSMIDKYAERGLRSLAVARQEVPEKSKESTGGPWQFVGLLPLFDPPRHDSAETIRRALNLGVNVKMITGDQLAIAKETGRRLGMGTNMYPSASLLGQDKDSSIASLPVEELIEKADGFAGVFPEHKYEIVKKLQERKHIVGMTGDGVNDAPALKKADIGIAVADATDAARGRSDIVLTEPGLSVIISAVLTSRAIFQRMKNYTIYAVSITIRIVFGFMLIALIWKYDFSAFMVLIIAILNDGTIMTISKDRVKPSPMPDSWKLNEIFATGVVLGGYQALMTVIFFWAMHDTSFFTDKFGVKDIRESDEEMMSALYLQVSIISQALIFVTRSRSWSFVERPGALLMIAFLIAQLVATLIAVYADWTFARVKGCGWGWAGVIWIFSIVTYFPLDIMKFAIRYILSGKAWNNLLDNKTAFTTKKDYGKEEREAQWALAQRTLHGLQPPEASNLFNEKNSYRELSEIAEQAKRRAEMARLRELHTLKGHVESVVKLKGLDIETIQQHYTV

SEQ ID NO: 22415 - protein, 952 aa, Nicotiana plumbaginifolia
MAKAISLEEIKNETVDLEKIPIEEVFEQLKCTREGLSADEGASRLQIFGPNKLEEKNESKILKFLGFMWNPLSWVMEAAAVMAIALANGDGKPPDWQDFIGIICLLVINSTISFIEENNAGNAAAALMAGLAPKTKVLRDGRWSEQEAAILVPGDIISVKLGDIIPADARLLEGDPLKIDQSALTGESLPVTKNPGDEVFSGSTCKQGELEAVVIATGVHTFFGKAAHLVDSTNNVGHFQKVLTAIGNFCICSIAIGMLVEIIVMYPIQHRKYRDGIDNLLVLLIGGIPIAMPTVLSVTMAIGSHRLSQQGAITKRMTAIEEMAGMDVLCSDKTGTLTLNKLSVDRNLVEVFAKGVDKEYVLLLAARASRVENQDAIDACMVGMLADPKEARAGIREVHFLPFNPVDKRTALTYIDNNNNWHRASKGAPEQILDLCNAKEDVRRKVHSMMDKYAERGLRSLAVARRTVPEKSKESPGGRWEFVGLLPLFDPPRHDSAETIRRALNLGVNVKMITGDQLAIAKETGRRLGMGTNMYPSASLLGQDKDSAIASLPIEELIEKADGFAGVFPEHKYEIVKKLQERKHIVGMTGDGVNDAPALKKADIGIAVADATDAARGASDIVLTEPGLSVIISAVLTSRAIFQRMKNYTIYAVSITIRIVFGFMFIALIWKYDFSAFMVLIIAILNDGTIMTISKDRVKPSPMPDSWKLKEIFATGVVLGGYQALMTVVFFWAMHDTDFFSDKFGVKSLRNSDEEMMSALYLQVSIISQALIFVTRSRSWSFLERPGMLLVIAFMIAQLVATLIAVYANWAFARVKGCGWGWAGVIWLYSIIFYLPLDIMKFAIRYILSGKAWNNLLDNKTAFTTKKDYGKEEREAQWALAQRTLHGLQPPEATNLFNEKNSYRELSEIAEQAKRRAEMARLRELHTLKGHVESVVKLKGLDIETIQQHYTV

SEQ ID NO: 22416 - protein, 954 aa, Nicotiana plumbaginifolia
MADQKGTVSLDDIKKENVDLERIPVDDVFRILISSKEGLASDEAERRLVVFGANKLEEKKENKILKFFGFMWNPLSWVMEVAAVIAIALANGQNRPPDWQDFLGIVVLLVINSTVSFIEENNAGNAAAALMAGLAPKSKVLRDGSWKEMDAAMLVPGDVISIKLGDILPADARLLEGDPLKIDQSALTGESLPVTKHPGEGVFSGSTCKQGEIEAVVIATGISTFFGKAAHLVDSTNNVGHFQKVLTAIGNFCICSILVGIVIEILVMYPIQHRKYRDGIDNLLVLLIGGIPIAMPTVLSVTMAIGSHKLSQQGAITKRMTAIEEMAGMDVLCSDKTGTLTLNKLEVDKNLVEVFAKDIDQDTVILLGARASRVENQDAIDACIVGMLADAKEARAGIQEVHFLPFNPVDKRTAITYIDANGNWHRVSKGAPEQIIELCGLSEDVKRRAHSVIDKFADRGLRSLAVAQQTVPERTKESPGGPWLFVGLLPLFDPPRHDSAETIRRALVLGVNVKMITGDQLAIAKETGRRLGMGTNMYPSSSLLGQHKDENTANLPVDELIEMADGFAGVFPEHKYEIVKKLQERKHICGMTGDGVNDAPALKKADIGIAVADATDAARGASDIVLTEPGLSVIVSAVLTSRAIFQRMKNYTIYAVSITIRIVLGFMLIALIWKFDFSPFMVLIIAILNDGTIMTISKDKVKPSPMPDSWKLREIFATGIVLGTYLAVMTVIFFWAAHQSNFFSDKFGVRSIRDNVHELNSALYLQVSIVSQALIFVTRSRSWSYVERPGLLLLAAFAIAQLVATLIAVYANWGFARIHGIGWGWAGVIWLYSIIFYIPLDILKFAIRYTLSGRAWNNMMENKVAFTSKKDYGKGEREAQWALAQRTLHGLQAPDSSQVFDNKSYKELSEIAEQAKRRAEVARLRELHTLKGHVESVVKLKGLDIETIQQHYTV

SEQ ID NO: 22417 - protein, 952 aa, Solanum tuberosum
MAKAISLEEIKNETVDLEKIPIEEVFEQLKCSREGLTSDEGANRLQIFGPNKLEEKKESKILKFLGFMWNPLSWVMEAAAIMAIALANGNGKPPDWQDFVGIVCLLVINSTISFIEENNAGNAAAALMAGLAPKTKVLRDGRWSEQEAAILVPGDIISVKLGDIVPADARLLEGDPLKIDQSALTGESLPVTKNPGDEVFSGSTCKQGELEAVVIATGVHTFFGKAAHLVDSTNNVGHFQKVLTAIGNFCICSIAVGMLIEIIVMYPIQHRKYRDGIDNLLVLLIGGIPIAMPTVLSVTMAIGSHRLSQQGAITKRMTAIEEMAGMDVLCSDKTGTLTLNKLSVDKTLVEVFVKGVDKEYVLLLPARASRVENQDAIDACMVGMLADPKEARAGIREVHFLPFNPVDKRTALTYIDNNGNWHRASKGAPEQILDLCNCKEDVRRKVHSMIDKYAEAGLRSLAVARQEVPEKSKESAGGPWQFVGLLPLFDPPRHDSAETIRRALNLGVNVKMITGDQLAIAKETGRRLGMGTNMYPSASLLGQDKDSSIASLPVEELIEKADGFAGVFPEHKYEIVKKLQERKHIVGMTGDGVNDAPALKKADIGIAVADATDAARGASDIVLTEPGLSVIISAVLTSRAIFQRMKNYTIYAVSITIRIVFGFMLIALIWKYDFSAFMVLIIAILNDGTIMTISKDRVKPSPMPDSWKLNEIFATGVVLGGYQALMTVLFFWAMHDTKFFSDKFGVKDIRESDEEMMSALYLQVSIISQALIFVTRSRSWSFVERPGALLMIAFLIAQLVATLIAVYADWTFARVKGCGWGWAGVIWIFSIVTYFPLDIMKFAIRYILSGKAWNNLLDNKTAFTTKKDYGKEEREAQWALAQRTLHGLQPPEASNLFNEKNSYRELSEIAEQAKRRAEMARLRELHTLKGHVESVVKLKGLDIETIQQHYTV

SEQ ID NO: 22418 - protein, 235 aa, Populus alba
TVLSVTMAIGSHKLSQQSAITKRMTAIEEMAGMDVLCSDKTGTLTLNKLSIDKNLIEVFAKGVDKDYVILLAARASRVENQDAIDAAMVGMLADPKEARAGIREVHFLPFNPVDKRTALTYIDAAGNWHRASKGAPEQIPPPLCNCREDVKKKVHSCIDKFAERGLRSLAVARQQVPEKSKESPGGPWEFVGLLNLFDPPRHDSAETIRRALNLGVNVKMITGDQLAIAKETGRR

SEQ ID NO: 22419 - protein, 234 aa, Populus alba
TVLSVTMAIGSHRLSQQGAITKRMTAIEEMAGMDVLCSDKTGTLTLNKLTVDRSLIEVFAKGMEKEHVMLLAARASRTENQDAIDAAIVGMLADPKEARAGIREVHFLPFNPVDKRTALTYIDSDGNWHRASKGAPEQILTLCNCKEDVKKKVHSVIDKFAERGLRSLGVAKQEVPEKSKDAAGAPWQLVGLLPLFDPSKHDSAETIRRALHLGVNVKMITGDQLAIGKETGRR

SEQ ID NO: 22420 - protein, 186 aa, Nepenthes alata
CSDKTGTLTLNKLSIDKNLIEMFVKGVEKDHVILLAARASRTENQDAIDAAMVGMLADPKEARAGIREVHFLPFNPVDKRTALTYIDDNGNWHRASKGAPEQILDLCGCREDVRKKVHSVIEKFAERGLRSLAVARQEVPEKNKDSPGGPWQFVGLLPLFDPPRHDSAETIRKALNLGVNVKMITG

SEQ ID NO: 22421 - protein, 198 aa, Nepenthes alata
GMDVLCSDKTGTLTLNKLTVDKNLIEVFAKGIDANTVVLMAARASRTENQDAIDAAIVGTLADPKEARAGIHEVHFLPFNPTDKRTALTYIDGQGKMHRVSKGAPEQILNLAHNKSDIERRVHAVIDKFAERGLRSLAVAYQEVPEGAKESPGGPWQFIGLMPLFDPPRHDSAETIRRALNLGVNVKMITGDQLAIGK

SEQ ID NO: 22422 - protein, 201 aa, Nepenthes alata
TGTLTLNKLTVDKNLIEVFAKGIDANTVVLMAARASRTENQDAIDAAIVGTLADPKEARAGIHEVHFLPFNPTDKRTALTYIDGQGQMHRVSKGAPEQILNMAHNKSDIERRVHAVIDKFAERGLRSLAVAYQEVTEKRMESPGGPWQFIGLMPLFDPPRHDSAETIRRALNLGVSVKMITGDQLAIAKETGRRLGMGTNM

SEQ ID NO: 22423 - protein, 182 aa, Nepenthes alata
CSDKTGTLTLNKLTVDKNLIEVFAKGTDANTVVLMAARASRTENQDAIDAAIVGTLADPKEARAGIHEVHFLPFNPVDKRTALTYIDDNGNWHRASKGAPEQILDLCGCREDVRKKVHSVIEKFAERGLRSLAVARQEVPEKNKDSPGGPWQFVGLLPLFDPPRHDSAETIRKALNLGVNVK

SEQ ID NO: 22424 - protein, 191 aa, Nepenthes alata
KTGTLTLNNLTVDKNLIEVFAKGIDANTVVLMAARASRTENQDAIDAAIVGTLADPKEARAGIHEVHFLPFNPTDKRTALTYIDGQGKMHRVSKGAPEQILNLAHNKSDIERRVHAVIDKFAERGLRSLAVAYQEVPEGAKENPGGPWQFIGLMPLFDPPRHDSAETIRRALNLGVNVKMITGDQLAIGKE

SEQ ID NO: 22425 - protein, 190 aa, Nepenthes alata
GMDVLCSDKTGTLTLNNLTVDKNLIEVFAKGADADTVVLIAARASRTENQDAIDTAIVGMLADPKEARAGIQEVHFLPFNPTDKRTALTYIDGQGQMHRVSKGAPEQILNMAHNKSDIERRVHAAIDKFAERGLRSLAVAYQEVTEKRMESPGGPWQFIGLMPLFDPPRHDSAETIRRALNLGVSVKMIT

SEQ ID NO: 22426 - protein, 1058 aa, Dictyostelium discoideum
MDNNQIPKNSPESSAINSAESSPKSNVSSDVLHENHHKEQQQLQQQLQQEQQQQQLPTTPQSEPTQRVNNNEEGIEMDRIAENSNINVPSDVGESSLKTISGYPSSKNTEAGSSSSGKKEEDYNYRSTWVPKLHQELFENPEVLESRRTKQRASNYRKTLEREKEGIKPLDNILEELKANANGLTKAEAQKRLEEVGPNAIPDVKRYPILEFLYFMWNPLSWTMEVAAIVSIALLDWVDFILICALLLLNATIGFIEENTAGNAVEALKNSLVSQIRCMRDGEWVMLPSPDLVPGDVVMLKIGAIIPADCRVIEAEQVKIDQSSLTGESLPVTKKIGDEVYSGSAMKQGEAKCVVTATGVNTFFGRAANLVQETEGHGHLQVILRNIGLFCISFIAIWVLVELLVDFLGYDGYCHGVGGGRCLPLNNALVLLVGGIPIAMPTVLSVTMAIGATQLSKKKAIVSRLASIEELAAMDILCSDKTGTLTLNILTVDEPLPVGDTPKEDIVFHAFLACSEAKTKMQSIRQSQTIVVIPIQMLTTLVMKSLNITHSTQKIKKQWVFVNANGKQFKTAKGAPQIILREADNYKQVGEAVEKEIENLADRGYRALGVSVSYDAPDFKVWHFEGLIPLFDPPRHDTEDTIKRALEMGVSVKMITGDQLAIAKETARRLGMGGNLFTIPYLENNDLGISEGEVIEMADGFAEMWPEHKYKVVDQLQKRKHVVGMTGDGVNDAPALKKAQIGIAVAGATDAARSVSDIVLTSSGLSVIIDAIISSRKIFQRMRNYVIYSVAATVRICTTFGILTVAWNFKFPTIATVIIAILNDGTMLTISKDRVRARNEPDQWNLFEVFTMALCYGFYLVGSTIVFFAIIHDGTWFHDAINLRILTDNELRGLIYLQVSISGLATIFVSRSQGFSYFERPGNLVIFAFVMSQIVATFIGVYGFRGYPHDSFSDNPDYPVHGTNFQGCGWGWAVCAWIWCFLWYIPMDFIKLGVTYILRGKIEPINKDALRKIYGWFGKEIPKEATQVSHKVAEQQAKRDALHAQETHHKSVVTDNKV

SEQ ID NO: 22427 - protein, 349 aa, Hordeum vulgare
  unsure (1)..(349): unsure at all Xaa locations
AIVGMTGXGVNDAPXLKKADIGIAVDDATDAARSASDIVLTEPGLSVIISAVLTSRCIFQRMKNYTIYAVSITIRIVLGFLLIALIWKFDFAPFMVLIIAILNDGTIMTISKDRVKPSPLPDSWKLNEIFATGVVLGTYLALMTVVFFWIIHRTDFFTNKFGVRSIRENETEKMSALYLQVSIVSQALIFVTRSRSWSFVERPGFLLVIAFLLAQLVATLIAVYANWGFARISGIGWGWAGVIWLFSIVFYFPLDIFKFFIRFVLSGRAWDNLLQNKTAFTTKENYGKGEREAQWATAQRTLHGLQAPEPASHTLFNDKSSYRELSEIAEQAKRRAEIARLRELNTLKG

SEQ ID NO: 22428 - protein, 329 aa, Hordeum vulgare
GMDVLCSDKTGTLTLNKLSVDKNLVEVFAKGVDKEHVLLLAARASRVENQDAIDACMVGMLADPKEARAGIREVHFLPFNPTDKRTALTYIDAEGNWHRASKGAPEQIITLCNFKEDVKRKVHSVIEKYAERGLRSLAVARQEVPEKSKDSAGGPWQFIGLLPLFDPPRHDSAETIRKALVLGVNVKMITGDQLAIGKETGRRLGMGTNMYPSSALLGQSKDGSLESLPVDELIEKADGFAGVFPEHKYEIVKRLQEKKHIVGMTGDGVNDAPALKKADIGIAVDDATDAARSASDIVLTEPGLSVIISAVLTSRCIFQRMKNYTIAAV

SEQ ID NO: 22429 - protein, 240 aa, Hordeum vulgare
DAEGNWHRASKGAPEQIITLCNFKEDVKRKVHSVIEKYAERGLRSLAVARQEVPEKSKDSAGGPWQFIGLLPLFDPPRHDSAETIRKALVLGVNVKMITGDQLAIGKETGRRLGMGTNMYPSSALLGQSKDGSLESLPVDELIEKADGFAGVFPEHKYEIVKRLQEKKHIVGMTGDGVNDAPALKKADIGIAVDDATDAARSASDIVLTEPGLSVIISAVLTSRCIFQRMKNYTIAAVRA

SEQ ID NO: 22430 - protein, 116 aa, Hordeum vulgare
WLFSIVFYFPLDIFKFFIRFVLSGRAWDNLLQNKTAFTTKENYGKGEREAHWATAQRTLHGLQAPEPASHTLFNDKSSYRELSEIADQAQRRAEIARLRELNTLQGHVESVVKLKG

SEQ ID NO: 22431 - protein, 950 aa, Oryza sativa
MGGLEEIKNEAVDLENIPIEEVFEQLKCTREGLSSEEGNRRIEMFGPNKLEEKKESKILKFLGFMWNPLSWVMEMAAIMAIALANGGGKPPDWEDFVGIIVLLVINSTISFIEENNAGNAAAALMANLAPKTKVLRDGRWGEQEAAILVPGDIISIKLGDIVPADARLLEGDPLKIDQSALTGESLPVTKNPGDEVFSGSTCKQGEIEAVVIATGVHTFFGKAAHLVDSTNQVGHFQTVLTAIGNFCICSIAVGIVIEIIVMFPIQHRAYRSGIENLLVLLIGGIPIAMPTVLSVTMAIGSHKLSQQGAITKRMTAIEEMAGMDVLCSDKTGTLTLNKLSVDKNLVEVFTKGVDKDHVLLLAARASRTENQDAIDAAMVGMLADPKEARAGIREVHFLPFNPVDKRTALTYIDADGNWHRASKGAPEQILTLCNCKEDVKRKVHAVIDKYAERGLRSLAVARQEVPEKSKESAGGPWQFVGLLPLFDPPRHDSAETIRKALHLGVNVKMITGDQLAIGKETGRRLGMGTNMYPSSALLGQNKDASLEALPVDELIEKADGFAGVFPEHKYEIVKRLQEKKHIVGMTGDGVNDAPALKKADIGIAVADATDAARSASDIVLTEPGLSVIISAVLTSRCIFQRMKNYTIYAVSITIRIVLGFLLIALIWKYDFSPFMVLIIAILNDGTIMTISKDRVKPSPLPDSWKLKEIFATGIVLGSYLALMTVIFFWAMHKTDFFTDKFGVRSIRNSEHEMMSALYLQVSIVSQALIFVTRSRSWSFIERPGLLLVTAFIAQLVATFLAVYANWGFARIKGIGWGWAGVIWLYSIVFYFPLDIFKFFIRFVLSGRAWDNLLENKIAFTTKKDYGREEREAQWATAQRTLHGLQPPEVASNTLFNDKSSYRELSEIAEQAKRRAEIARLRELNTLKGHVESVVKLKGLDIDTIQQNYTV

SEQ ID NO: 22432 - protein, 994 aa, Rana sylvatica
MENAHTKTTEECLAYFGVNENTGFSQEQVKKNFEKYGPNELPAEEGKSIWELVAEQFEDLLVRILLLAAIIPFVLAWFEEGEETITAFVEPFVILLILIANAIVGVWQERNAEDAIEALKEYEPEMGKVYRSDRKSVQRIKAREIVPGDIVEIAVGDKVPADIRLISIKSTTLRIDQSILTGESVSVIKHTDVVPDLRAVNQDKKNMLFSGTNVGAGKAIGIVIATGANTEIGKIRDEMAATEQEKTPLQQKLDEFGEQLSKVISLICVAVWLINIGHFNDPIHGGSWIKGAVYYFKIAVALAVAAIPEGLPAVITTCLALGTRRMAKKNAIVRSLPSVETLGCTSVICSDKTGTLTTNQMSVCRMFVLDKVEGDVASLNEFTITGSTYAPEGDVQKNDKNVKAGQYDGLVELATICALCNDSSLDFNEAKGVFEKVGEATETALTTLVEKMNVFNTEVKSLSKVERANACNSVIKQLMKKEFTLEFSRDRKSMSVYCTPAKASRAAVGNKMFVKGAPEGVIDRCNYVRVGTTRVPFTSAIKDKINAVVKEWGTGRDTLRCLALATRDTPPKREDMVLEDATKFAEYETDLTFVGCVGMLDPPRKEVMGSIQLCRDAGIRVIMITGDNKGTAIAICRRIGIFSENDDVSTRAYTGREFDDLPPAEQREAVKHASCFARVEPSHKSKIVEFLQSCDEITAMTGDGVNDAPALKKAEIGIAMGSGTAVAKTASEMVLADDNFATIVAAVEEGRAIYNNMKQFIRYLISSNVGEVVCIFLTAALGLPEALIPVQLLWVNLVTDGLPATALGFNPPDLDIMDRPPRSPKEPLISGWLFFRYLAIGGYVGAATVGAAAWWFMYADDGPNVTFYQLSHFMQCSEDNPEFEGHECEVFESPVPMTMALSVLVTIEMCNALNSLSENQSLIRMPPWVNFWLLGSICLSMSLHFLILYVEPLPMIFKLTPLNVEQWFVVLKISFPVILLDELLKFVARNYLEG

SEQ ID NO: 22433 - protein, 866 aa, Triticum aestivum
  unsure (1)..(866): unsure at all Xaa locations
RPPXDWQDFVGIIVLLVINSAPPRPRTRRXAGNAAAALMANLAPKTKVLRDGRWGEQEASILVPGDIVSIKLGDIVPADARLLEGDPLKIDQSGLTGESLPVTKNPGDEVFSGSTCKQGEIEAVVIATGVHHTFFGKAAHLVDSTNQVGHFQQVLTAIGNFCIVSIAVGIVIEIIVMFPIQRRKYRAGIENLLVLLIGGIPIAMPTVLSVTMAIGSHKLSQQGAITKRMTAIEELAGMDVLCSDKTGTLTLNKLSVDKNLVEVFAKGVDKEHVLLLAARASRVENQDAIDACMVGMLADPKEARAGIREVHFLPFNPTDKRTALTYIDAEGNWHRASKGAPEQIITLCNCKEDVKRKVHSVIEKYAERGLRSLAVARQEVPEKSKDSPGGPWQFIGLLPLFDPPRHDSAETIRKALVLGVNVKMITGDQLAIGKETGRRLGMGTNMYPSSALLGQSKDGSLESLPVDELIEKADGFAGVFPEHKYEIVKRLQEKKHIVGMTGDGVNDAPALKKADIGIAVDDATDAARSASDIVLTEPGLSVIISAVLTSRCIFQRMKNYTIYAVSITIRIVLGFMLIALIWKFDFAPFMVLIIAILNDGTIMTISKDRVKPSPLPDSWKLNEIFATGVVLGTYLALMTVVFFWVIHKTDFFTNKFGVRSIRDSEFEMMSALYLQVSIVSQALIFVTRSRSWSFVERPGFLLVTAFLLAQLVATLIAVYANWEFARIKGIGWGWAGVIWLFSIVFYFPLDIFKFFIRFVLSGRAWDNLLQNKTAFTTKENYGKGEREAQWATAQRTLHGLQAPEPASHTLFNDKSSYRELSEIAEQAKRRAEIARLRELNTLKGHVESVVKLKGLDIDTINQNYTV

SEQ ID NO: 22434 - protein, 950 aa, Lilium longiflorum
MAASISLEEIKNETVDLERIPVEEVFTQLKCTKEGLTTAEGEQRLQIFGPTSSRRRKRASSSSFWASCGILSRGSWRLRLSWPLCWPMEGVSLQIGRILLVSWFSSSSIKKTASTRKTRMRMRPMPARHQTNPKPRCSEMVGGQQEAAILVPGDIISIKLGDIVPADARLLEGDPLKIDQSALTGESLPVTKNPGDEVFSGSTCKQGEIEAIVIATGVHTFFGKAAHLVDSTNNVGHFQIVLTAIGNFCICSIALGMLVEVVVMYPIQHRKYREGIDNLLVLLIGGIPIAMPTVLSVTMAIGSHRLSEQGAITKRMTAIEEMAGMDVLCSDKTGTLTLNKLTVDKNLIEVFAKDTDKDGVLLYAARASRVENQDAIDACIVGMLADPKEARAGIQEVHFLPFNPVEKRTANTYIDSNGKWHRASKGAPEQIIDLCNLKEDVKRKVHEIIDKFADRGLRSLGVARQQVPEASKESTGGPWEFMGLLPLFDPPRHDSAETIRRALHLGVNVKMITGDQLAIGKETGRRLGMGTNMYPSSTLLGDKIHEATGLPIDELIEKADGFAGVFPEHKYEIVKRLQDRKHICGMTGDGVNDAPALKKADIGIAVADATDAARSASDIVLTEPGLSVIVSAVLTSRAIFQRMKNYTIYAVSITIRIVLGFMLIALIWRFDFSPFMVLIIAILNDGTIMTISKDRVKPSPMPDSWKLKEIFATGVILGAYLALMTVIFFWIAHDTDHFTKAFGVRPIGDDINQLTSALYLQVSIVSQALIFVTRSRSWSFVERPGLLLVTAFLAAQLVATLIAVYASWGFARIDGIGWGWAGVIWIFSIVTYFPLDILKFIIRYALSGRAWDNLIQNKTAFTSKKDYGKGEREAQWATAQRTLHGLQTADTSNLFNDKNNYRELSEIAEQAKRRAEVARLRELHTLKGHVESVVKLKGLDIDTIQQHYTV

SEQ ID NO: 22435 - protein, 927 aa, Pneumocystis carinii
MSEEGKALIHETVYYKHTSTFEISETTKDLEKGGEEECLLDDEDNDIEALIDELESQGGDQEDNIEDTEFQSQRQVPEELLATDTRIGLTSQEVVNRRKKYGLNKMKEEKENMIIKFLMYFVGPIQFVMEAAAILAASLQDWVDFGVICALLLLNAFVGFIQEFQAGSIVDELKKTLALKATVLRDGRLIDIEAEEVVPGDILQLEEGSIVPADGRIVTEEAYIQVDQSSITGESLAVDKHKGDNIYSSSVVKRGETFMVVTATGDGTFVGHAASLVNKASCGTGHFTDVLNRIGTILLVLVVFTLFVVYISAFYRSSTTITILKYTLAITIIGVPVGLPAVVTTTMAVGAAYLAKKKAIVQKLSAIESLAGVEILCSDKTGTLTKNDLSLAEPYTVEGISCDELMLTACLAASRKKKGLDAIDKAFLKALRNYPVVRSAISKYNLVEFHPFDPVSKKVTAIVESPSGERIACVKGAPLFVLRTVEEDQPVPEDIQNAYKDKVAEFASRGYRSLGIARKTGNSNWEILGIMPCSDPPRCDTARTISEAIRLGLRIKMLTGDAVGIAKETARQLGMGTNVYNAERLGLGGGGDMPGSEVYDFVEAADGFAEVFPQHKYNVVEILQQRGYLVAMTGDGVNDAPSLKKADTGIAVEGASDAARSAADIVFLAPGLSAIIDALKTSRQIFHRMYAYVVYRIALSLHLEIFLGLWIVIFNHLMILELVVFIAIFADIATLAIAYDNAPYSLLPTKWNLPKLWGISLLLGAALAIGSWIALTTIYINDNTFGIVQGYGNVDAVMFLEISLTENWLIFITRANGPFWSSLPSWQLFGAVFLVDVIATIFCIFGWFTGTKEHGLERTSIITVVRVWLFSLGVFCIMAGIYYLLSDSVAFDNIMHGKSVKKNSKQRSLEDFVVALQRMSTKHEKGE

SEQ ID NO: 22436 - protein, 224 aa, Pneumocystis carinii
DDIDALIDDLESQDGDQEDNIEDTEFQSQRQVPEELLATDTRIGLTSQEVINRRKKYGLNKMKEEKENMIIKFLMYFVGPIQFVMEAAAILAAGLQDWVEFGVICALLLLNAFVGFIQEFQAGSIVDELKKTLALKATVLRDGRLIDIEAEEVVPGDILQLEEGSIVPADGRIVTEEAYLQVDQSAITGESLAVDIHKGDSIYSSSVAKPGETFMVVTATGDRT

SEQ ID NO: 22437 - protein, 495 aa, Glomus intraradices
NKHEVPGYKVTGLVPFNPNTKMSNATVVINETNEVFRVATGAPQVIIKLVGGNDDAVHAVNTLAGRGLRALGVARTIPGDLETYELVGMITLLDPPRPDSAETIRRCNEYGVEVKMITGDQLIIAKEVAHRLGMSRVILDAGHLVDPDKSDEEVTQHCERADGFAQVIPEHKYRVVELLQKRGLLVGMTGDGVNDAPALKKANVGIAVHGCTDAARSAADIVLLAPGLSTIVDGITTSRAIFQRMRSYALYRITSTVHFLMFFFCIDLIEDWQMSAILLILIALLNDAATLVIAVDNAKISQKPDKWRLGQLITLSLVLGTLLTAASFAHYYIAKDVFHFDSEKIATVMYLHISSCPHFVIFSTRLSGYFWENIPSITFIIAVLGTQVFAMLISIYGLLTPKIGWGWGVTTICISLGYFVFLDFVKVQLFRYWSFELTAKLWPSKTRRTKLQDRKAYAINHARIVGNISKVRKVVIMSRVLLAFKKKSSTKAIEV

SEQ ID NO: 22438 - protein, 1010 aa, Schizosaccharomyces pombe
MQRNNGEGRPEGMHRISRFLHGNPFKNNASPQDDSTTRTEVYEEGGVEDSAVDYDNASGNAAPRLTAAPNTHAQQANLQSGNTSITHETQSTSRGQEATTSPSLSASHEKPARPQTGEGSDNEDEDEDIDALIEDLYSQDQEEEQVEEEESPGPAGAAKVVPEELLETDPKYGLTESEVEERKKKYGLNQMKEEKTNNIKKFLSFFVGPIQFVMELAAALAAGLRDWVDFGVICALLLLNATVGFVQEYQAGSIVDELKKTMALKASVLRDGRVKEIEASEIVPGDILHLDEGTICPADGRLITKDCFLQVDQSAITGESLAVDKHQNDTMYSSSTVKRGEAFMVVTATADSTFVGRAASLVGAAGQSQGHFTEVLNGIGTILLVLVILTLLCIYTAAFYRSVRLAALLEYTLAITIIGVPVGLPAVVTTTMAVGAAYLAKKKAIVQKLSAIESLAGVEILCSDKTGTLTKNRLSLGEPYCVEGVSPDDLMLTACLASSRKKKGLDAIDKAFLKALRNYPKAKDQLSKYKVLDFHPFDPVSKKITAYVEAPDGQRITCVKGAPLWVFKTVQDDHEVPEAITDAYREQVNDMASRGFRSLGVARKADGKQWEILGIMPCSDPPRHDTARTIHEAIGLGLRIKMLTGDAVGIAKETARQLGMGTNVYNAERLGLSGGGDMPGSEVNDFVEAADGFAEVFPQHKYAVVDILQQRGYLVAMTGDGVNDAPSLKKADAGIAVEGASDAARSAADIVFLAPGLSAIIDALKTSRQIFHRMYAYVVYRIALSLHLEIFLGLWLIIRNQLLNLELIVFIAIFADVATLAIAYDNAPYAMKPVKWNLPRLWGLATIVGILLAIGTWIVNTTMIAQGQNRGIVQNFGVQDEVLFLQISLTENWLIFITRCSGPFWSSFPSWQLSGAVLVVDILATLFCIFGWFKGGHQTSIVAVIRIWMYSFGIFCLIAGVYYILSESSSFDRWMHGKHKERGTTRKLEDFVMQLQRTSTHHEAEGKVTS

SEQ ID NO: 22439 - protein, 919 aa, Schizosaccharomyces pombe
MADNAGEYHDAEKHAPEQQAPPPQQPAHAAAPAQDDEPDDDIDALIEELFSEDVQEEQEDNDDAPAAGEAKAVPEELLQTDMNTGLTMSEVEERRKKYGLNQMKEELENPFLKFIMFFVGPIQFVMEMAAALAAGLRDWVDFGVICALLMLNAVVGFVQEYQAGSIVDELKKSLALKAVVIREGQVHELEANEVVPGDILKLDEGTIICADGRVVTPDVHLQVDQSAITGESLAVDKHYGDPTFASSGVKRGEGLMVVTATGDSTFVGRAASLVNAAAGGTGHFTEVLNGIGTILLVLVLLTLFCIYTAAFYRSVRLARLLEYTLAITIIGVPVGLPAVVTTTMAVGAAYLAEKQAIVQKLSAIESLAGVEVLCSDKTGTLTKNKLSLGEPFTVSGVSGDDLVLTACLAASRKRKGLDAIDKAFLKALKNYPGPRSMLTKYKVIEFQPFDPVSKKVTAYVQAPDGTRITCVKGAPLWVLKTVEEDHPIPEDVLSAYKDKVGDLASRGYRSLGVARKIEGQHWEIMGIMPCSDPPRHDTARTISEAKRLGLRVKMLTGDAVDIAKETARQLGMGTNIYNAERLGLTGGGNMPGSEVYDFVEAADGFGEVFPQHKYAVVDILQQRGYLVAMTGDGVNDAPSLKKADTGIAVEGATDAARSAADIVFLAPGLSAIIDALKTSRQIFHRMYSYVVYRIALSLHLEIFLGLWLIIRNQLLNLELVVFIAIFADVATLAIAYDNAPYSMKPVKWNLPRLWGLSTVIGIVLAIGTWITNTTMIAQGQNRGIVQNFGVQDEVLFLEISLTENWLIFVTRCNGPFWSSIPSWQLSGAVLAVDILATMFCIFGWFKGGHQTSIVAVLRIWMYSFGIFCIMAGTYYILSESAGFDRMMNGKPKESRNQRSIEDLVVALQRTSTRHEKGDA

SEQ ID NO: 22440 - protein, 898 aa, Pichia angusta
MSATEPTKEKVPLQEDDEEEEDIDQLVMELQSNHGADDGDEEDEVQDHSSFKVVPEELLRTDPKVGLTSEEVAKRRKKFGPNQMAEEKENLVLKFCMFFIGPIQFVMEAAAILAAGLEDWVDFGVICGLLMLNACVGFIQEYQAGSIVDELKKTLANTATVIRDGHPVEIAASEVVPGDILQLEDGVVIPADGKLVSDECFLQVDQSALTGESLAVDKRSGDPTFSSSTVKRGEALMIVTATGDSTFVGRAAALVNKASGGQGHFTEVLNGIGTALLVLVIVTLLVVWTSAFTEPQKIVRILRYTLAITIVGVPVGLPAVVTTTMAVGAAYLAKKQAIVQKLSAIESLAGVEILCSDETGTLTKNKLSLHEPYTVEGVEPDDLMLTACLAASRKKKGLDAIDKAFLKSLINYPRARAALTKYKMLEFQPFDPVSKKVTAYVESPEGERIICVKGAPLFVLKTVQEDHPIPEDILEKYENKVAEFASRGFRSLGVARKRGEGHWEILGIMPCMDPPRDDTAKTVNEAKELGLRVKMLTGDAVGIAKETCRQLGLGTNIFDADRLGLSGGGDLSGSELFDFVENADGFAEVFPQHKNNVVEILQKRGYLVTMTGGGVNDAPSLKKADTGIAVEGASDSARSAADIVFLAPGLSAIIDALKTSRQIFHRMYAYVVYRIVLSLHLEIFLGLWIAILNESLNIDLVVFIAIFADVATLAIAYDNAPFDQKPVKWNLPRLWGMSIVMGVILAVGTWITLTTMFLPKGGIIQNFGSIVDGVLFLQISLTENWLIFVTRATGPFWSSIPSWQLSGAVLIVDIIATMFTLFGWWSQNWNDIVTVVRVWIWSFGVFCVLGGAYVIMSESEKFDRFMNGKPLKERPPQRTLEDFMVAMNRVSTQHEKSN

SEQ ID NO: 22441 - protein, 947 aa, Saccharomyces cerevisiae
MSSTEAKQYKEKPSKEYLHASDGDDPANNSAASSSSSSSTSTSASSSAAAVPRKAAAASAADDSDSDEDIDQLIDELQSNYGEGDESGEEEVRTDGVHAGQRVVPEKDLSTDPAYGLTSDEVARRRKKYGLNQMAEENESLIVKFLMFFVGPIQFVMEAAAILAAGLSDWVDVGVICALLLLNASVGFIQEFQAGSIVDELKKTLANTATVIRDGQLIEIPANEVVPGEILQLESGTIAPADGRIVTEDCFLQIDQSAITGESLAAEKHYGDEVFSSSTVKTGEAFMVVTATGDNTFVGRAAALVGQASGVEGHFTEVLNGIGIILLVLVIATLLLVWTACFYRTVGIVSILRYTLGITIIGVPVGLPAVVTTTMAVGAAYLAKKQAIVQKLSAIESLAGVEILCSDKTGTLTKNKLSLHEPYTVEGVSPDDLMLTACLAASRKKKGLDAIDKAFLKSLIEYPKAKDALTKYKVLEFHPFDPVSKKVTAVVESPEGERIVCVKGAPLFVLKTVEEDHPIPEDVHENYENKVAELASRGFRALGVARKRGEGHWEILGVMPCMDPPRDDTAQTINEARNLGLRIKMLTGDAVGIAKETCRQLGLGTNIYNAERLGLGGGGDMPGSELADFVENADGFAEVFPQHKYRVVEILQNRGYLVAMTGDGVNDAPSLKKADTGIAVEGATDAARSAADIVFLAPGLSAIIDALKTSRQIFHRMYSYVVYRIALSLHLEIFLGLWIAILNNSLDINLIVFIAIFADVATLTIAYDNAPYAPEPVKWNLPRLWGMSIILGIVLAIGSWITLTTMFLPNGGIIQNFGAMNGVMFLQISLTENWLIFVTRAAGPFWSSIPSWQLAGAVFAVDIIATMFTLFGWWSENWTDIVSVVRVWIWSIGIFCVLGGFYYIMSTSQAFDRLMNGKSLKEKKSTRSVEDFMAAMQRVSTQHEKSS

SEQ ID NO: 22442 - protein, 947 aa, Saccharomyces cerevisiae
MSSTEAKQYKEKPSKEYLHASDGDDPANNSAASSSSSSSTSTSASSSAAAVPRKAAAASAADDSDSDEDIDQLIDELQSNYGEGDESGEEEVRTDGVHAGQRVVPEKDLSTDPAYGLTSDEVARRRKKYGLNQMAEENESLIVKFLMFFVGPIQFVMEAAAILAAGLSDWVDVGVICALLLLNASVGFIQEFQAGSIVDELKKTLANTATVIRDGQLIEIPANEVVPGEILQLESGTIAPADGRIVTEDCFLQIDQSAITGESLAAEKHYGDEVFSSSTVKTGEAFMVVTATGDNTFVGRAAALVGQASGVEGHFTEVLNGIGIILLVLVIATLLLVWTACFYRTVGIVSILRYTLGITIIGVPVGLPAVVTTTMAVGAAYLAKKQAIVQKLSAIESLAGVEILCSDKTGTLTKNKLSLHEPYTVEGVSPDDLMLTACLAASRKKKGLDAIDKAFLKSLIEYPKAKDALTKYKVLEFHPFDPVSKKVTAVVESPEGERIVCVKGAPLFVLKTVEEDHPIPEDVHENYENKVAELASRGFRALGVARKRGEGHWEILGVMPCMDPPRDDTAQTINEARNLGLRIKMLTGDAVGIAKETCRQLGLGTNIYNAERLGLGGGGDMPGSELADFVENADGFAEVFPQHKYRVVEILQNRGYLVAMTGDGVNDAPSLKKADTGIAVEGATDAARSAADIVFLAPGLSAIIDALKTSRQIFHRMYSYVVYRIALSLHLEIFLGLWIAILNNSLDINLIVFIAIFADVATLTIAYDNAPYAPEPVKWNLPRLWGMSIILGIVLAIGSWITLTTMFLPNGGIIQNFGAMNGVMFLQISLTENWLIFVTRAAGPFWSSIPSWQLAGAVFAVDIIATMFTLFGWWSENWTDIVSVVRVWIWSIGIFCVLGGFYYIMSTSQAFDRLMNGKSLKEKKSTRSVEDFMAAMQRVSTQHDKSS

SEQ ID NO: 22443 - protein, 918 aa, Saccharomyces cerevisiae [sequence omitted]

SEQ ID NO: 22444 - protein, 918 aa, Saccharomyces cerevisiae
MTDTSSSSSSSSASSVSAHQPTQEKPAKTYDDAASESSDDDDIDALIEELQSNHGVDDEDSDNDGPVAAGEARPVPEEYLQTDPSYGLTSDEVLKRRKKYGLNQMADEKESLVVKFVMFFVGPIQFVMEAAAILAAGLSDWVDFGVICGLLMLNAGVGFVQEFQAGSIVDELKKTLANTAVVIRDGQLVEIPANEVVPGDILQLEDGTVIPTDGRIVTEDCFLQIDQSAITGESLAVDKHYGDQTFSSSTVKRGEGFMVVTATGDNTFVGRAAALVNKAAGGQGHFTEVLNGIGIILLVLVIATLLLVWTACFYRTNGIVRILRYTLGITIIGVPVGLPAVVTTTMAVGAAYLAKKQAIVQKLSAIESLAGVEILCSDKTGTLTKNKLSLHEPYTVEGVSPDDLMLTACLAASRKKKGLDAIDKAFLKSLKQYPKAKDALTKYKVLEFHPFDPVSKKVTAVVESPEGERIVCVKGAPLSALKTVEEDHPIPEDVHENYENKVAELASRGFRALGVARKRGEGHWEILGVMPCMDPPRDDTAQTVSEARHLGLRVKMLTGDAVGIAKETCRQLGLGTNIYNAERLGLGGGGDMPGSELADFVENADGFAEVFPQHKYRVVEILQNRGYLVAMTGDGVNDAPSLKKADTGIAVEGATDAARSAADIVFLAPGLSAIIDALKTSRQIFHRMYSYVVYRIALSLHLEIFLGLWIAILDNSLDIDLIVFIAIFADVATLAIAYDNAPYSPKPVKWNLPRLWGMSIILGIVLAIGSWITLTTMFLPKGGIIQNFGAMNGIMFLQISLTENWLIFITRAAGPFWSSIPSWQLAGAVFAVDIIATMFTLFGWWSENWTDIVTVVRVWIWSIGIFCVLGGFYYEMSTSEAFDRLMNGKPMKEKKSTRSVEDFMAAMQRVSTQHEKET

SEQ ID NO: 22445 - protein, 920 aa, Zygosaccharomyces rouxii
MSDERITEKPPHQQPESEGEPVPEEEVEEETEEEVPDEQSSEDDDIDGLIDELQSQEAHEEAEEDDGPAAAGEARKIPEELLQTDPSVGLSSDEVVNRRKKYGLNQMREESENLLVKFLMFFIGPIQFVMEAAAVLAAGLEDWVDFGVICGLLFLNAGVGFIQEFQAGSIVEELKKTLANTATVIRDGSVQEAPANEIVPGDILKLEDGTVIPADGRLVTEECFLQVDQSSITGESLAVDKHYGDEVFSSSTVKRGEGFMIVTATGDNTFVGRAASLVNAAAGGQGHFTEVLNGIGVILLVLVVITLLLIWTACFYRTVRIVPILRYTLGITIVGVPVGLPAVVTTTMAGGAAYLAKKQAIVQKLSAIESLAGVEILCSDKTGTLTKNKLSLHEPYTVEGVSSDDLMLTACLAASRKKKGLDAIDKAFLKSLAQYPKAKGALTKYKVLEFHPFDPVSKKVTAVVESPEGERIICVKGAPLFVLKTVEEDHPIPEDVHENYENKVAELASRGFRALGVARKRGEGHWEILGVMPCMDPPRDDTAATVNEAKRLGLSVKMLTGDAVGIAKETCRQLGLGTNIYDAERLGLGGGGSMPGSEMYDFVENADGFAEVFPQHKFAVVDILQQRGYLVAMTGDGVNDAPSLKKADTGIAVEGATDAARSAADIVFLAPGLSAIIDALKTSRQIFHRMYAYVVYRIALSLHLEIFLGLWIAILNHSLDIDLIVFIAIFADVATLAIAYDNAPFSPSPVKWNLPRLWGMSIMMGIILAAGTWITLTTMFLPKGGIIQNFGSIDGILFLEISLTENWLIFITRAVGPFWSSIPSWQLAGAVFVVDVVATMFTLFGWWSQNWTDIVTVVRIYIWSIGIFCCLGGAYYLMSESETFDRLMNGKPLKENKSTRSVEDFLASMRRVSTQHEKGN

SEQ ID NO: 22446 - protein, 916 aa, Ajellomyces capsulatus
MAHSAASGAASAAHFEKKTPEVAHEEKKPPLPEEEDEDEDMDALIEELESQDGHIDIEDDEDGEPGGARPVPDELLTTDTRHGLTDAEVVARRKKYGLNQMKEEKENLVLKFLSYFVGPIQFVMEAAAILAAGLEDWVDFGVICALLLLNACVGFVQEFQAGSIVDELKKTLALKAVVLRNGRLTEVEAPEVVPGDILQVEEGTIIPADGRIVTEEAFLQVDQSAITGESLAVDKHKGDTCYASSAVKRGEAFMVITATGDNTFVGRGPALVNAASAGTGHFTEVLNGIGTVLLILVILTLLVVWVSSFYRSNSIVTILEFTLAITIIGVPVGLPAVVTTTMAVGAAYLAKKKAIVQKLSAIESLAGVEILCSDKTGTLTKNKLSLAEPYCVSGVDPEDLMLTACLAASRKKKGIDAIDKAFLKSLRYYPRAKSVLTQYKVLEFHPFDPVSKKVSAVVLSPQGERITCVKGAPLSVLKTVEEDHPIPDEVDSAYKNKVAEFATRGFRSLGVARKRGEGSWEILGIMPCSDPPRHDTAKTINEAKTLGLSIKMLTGDAVGIARETSRQLGLGTNVYNAERLGLGGGGTMPGSEVYDFVEAADGFAEVFPQHKYNVVEILQQRGYLVAMTGDGVNDAPSLKKADTGIAVEGASDAARSAADIVFLAPGLSAIIDALKTSRQIFHRMYAYVVYRIALSLHLEIFLGLWIAILNTSLNLQLVVFIAIFADIATLAIAYDNAPFSKTPVKWNLPKLWGMSVLLGIVLAVGTWITLTTMLVGSENGGIVQNFGRTHPVLFLEISLTENWLIFITRANGPFWSSIPSWQLSGAILLVDIIATLFTIFGWFVGGQTSIVAVVRIWVFSFGCFCVLGGLYYLLQGSAGFDNMMHGKSPKKNQKQRSLEDFVVSLQRVSTQHEKSS

SEQ ID NO: 22447 - protein, 988 aa, Aspergillus fumigatus
MAERRISYAPDVENGDHSRHAENEGNLDEYTALNRYISTARDGRRGSTSSAGARSLQQKKKPWYAFWRKDAETGGAFVCPDEWLETDLRTGLASSEIETRRKKGGWNELTTEKTNFFVQFIGYFRGPILYVMELAVLLAAGLRDWIDLGVICGILLLNAVVGWYQEKQAADVVASLKGDIAMKAVVIRDGQEQEILARELVTGDIIVVEEGTVIPADIRLICDYDKPEMFETYKEYLATANDDTLKEKDDDDEDGGIEARVGVSLIAVDQSAITGESLAVDKYMADTCYYTTGCKRGKAYAIVTATAKQSFVGKTAALVQGAKDQGHFKAVMDNIGTTLLVLVMFWILAAWIGGFYRHLKIATPEHEDNNLLHYTLILLIIGVPVGLPVVTTTTLAVGAAYLAEQKAIVQKLTAIESLAGVDILCSDKTGTLTANQLSIREPYVNEGVDVNWMMAVAAIASNHNVKNLDPIDKVTILTLRRYPKAREILSRNWVTEKYTPFDPVSKRITTVCTCDGVRYVCAKGAPKAILNMSQCSEEEAAKFREKAAEFARRGFRSLGVAVQKEGEPWQLLGMYPMFDPPREDTAHTIAEAQHLGLSVKMLTGDALAIAKETCKMLALSTKVYDSERLIHGGLAGSAQHDLVEKADGFAEVFPEHKYQVVEMLQQRGHLTAMTGDGVNDAPSLKKADCGIAVEGSTEAAQAAADIVFLAPGLSTIVDAIKLARQIFQRMKAYIQYRIALCLHLEIYLVTSMIIIDETLNSELVVFIALFADLATIAVAYDNAHYEMRPVEWQLPKIWVISIVLGVLLAGATWIMRASLFLNDGGLIQNFGSPQEMIFLEVALTENWLIFVTRGGKTWPSWQLVGAIFVVDVLATLFCVFGWLSGDYRQTSPPSHAEFSVNGDVDIVTVVVIWGYSIGVTIIIAVVYYILTIIPALDNLGRKTRSKADTKIENMIAHLSKLAIEHETDNNGKSYYTLGARAEVEEDDE

SEQ ID NO: 22448 - protein, 920 aa, Neurospora crassa
MADHSASGAPALSTNIESGKFDEKAAEAAAYQPKPKVEDDEDEDIDALIEDLESHDGHDAEEEEEEATPGGGRVVPEDMLQTDTRVGLTSEEVVQRRRKYGLNQMKEEKENHFLKFLGFFVGPIQFVMEGAAVLAAGLEDWVDFGVICGLLLLNAVVGFVQEFQAGSIVDELKKTLALKAVVLRDGTLKEIEAPEVVPGDILQVEEGTIIPADGRIVTDDAFLQVDQSALTGESLAVDKHKGDQVFASSAVKRGEAFVVITATGDNTFVGRAAALVNAASGGSGHFTEVLNGIGTILLILVIFTLLIVWVSSFYRSNPIVQILEFTLAITIIGVPVGLPAVVTTTMAVGAAYLAKKKAIVQKLSAIESLAGVEILCSDKTGTLTKNKLSLHDPYTVAGVDPEDLMLTACLAASRKKKGIDAIDKAFLKSLKYYPRAKSVLSKYKVLQFHPFDPVSKKVVAVVESPQGERITCVKGAPLFVLKTVEEDHPIPEEVDQAYKNKVAEFATRGFRSLGVARKRGEGSWEILGIMPCMDPPRHDTYKTVCEAKTLGLSIKMLTGDAVGIARETSRQLGLGTNIYNAERLGLGGGGDMPGSEVYDFVEAADGFAEVFPQHKYNVVEILQQRGYLVAMTGDGVNDAPSLKKADTGIAVEGSSDAARSAADIVFLAPGLGAIIDALKTSRQIFHRMYAYVVYRIALSIHLEIFLGLWIAILNRSLNIELVVFIAIFADVATLAIAYDNAPYSQTPVKWNLPKLWGMSVLLGVVLAVGTWITVTTMYAQGENGGIVQNFGNMDEVLFLQISLTENWLIFITRANGPFWSSIPSWQLSGAIFLVDILATCFTIWGWFEHSDTSIVAVVRIWIFSFGIFCIMGGVYYILQDSVGFDNLMHGKSPKGNQKQRSLEDFVVSLQRVSTQHEKSQ

SEQ ID NO: 22449 - protein, 920 aa, Neurospora crassa
MADHSASAAPALSTNIESGKFDEKAAEAAAYQPKPKVEDDEDEDIDALIEDLESHDGHDAEEEEEEATPGGGRVVPEDMLQTDTRVGLTSEEVVQRRRKYGLNQMKEEKENHFLKFLGFFVGPIQFVMEGAAVLAAGLEDWVDFGVICGLLLLNAVVGFVQEFQAGSIVDELKKTLALKAVVLRDGTLKEIEAPEVVPGDILQVEEGTIIPADGRIVTDDAFLQVDQSALTGESLAVDKHKGDQVFASSAVKRGEAFVVITATGDNTFVGRAAALVNAASGGSGHFTEVLNGIGTILLILVIFTLLIVWVSSFYRSNPIVQILEFTLAITIIGVPVGLPAVVTTTMAVGAAYLAKKKAIVQKLSAIESLAGVEILCSDKTGTLTKNKLSLHDPYTVAGVDPEDLMLTACLAASRKKKGIDAIDKAFLKSLKYYPRAKSVLSKYKVLQFHPFDPVSKKVVAVVESPQGERITCVKGAPLFVLKTVEEDHPIPEEVDQAYKNKVAEFATRGFRSLGVARKRGEGSWEILGIMPCMDPPRHDTYKTVCEAKTLGLSIKMLTGDAVGIARETSRQLGLGTNIYNAERLGLGGGGDMPGSEVYDFVEAADGFAEVFPQHKYNVVEILQQRGYLVAMTGDGVNDAPSLKKADTGIAVEGSSDAARSAADIVFLAPGLGAIIDALKTSRQIFHRMYAYVVYRIALSIHLEIFLGLWIAILNRSLNIELVVFIAIFADVATLAIAYDNAPYSQTPVKWNLPKLWGMSVLLGVVLAVGTWITVTTMYAQGENGGIVQNFGNMDEVLFLQMSLTENWLIFITRANGPFWSSIPSWQLSGAIFLVDILATCFTIWGWFEHSDTSIVAVVRIWIFSFGIFCIMGGVYYILQDSVGFDNLMHGKSPKGNQKQRSLEDFVVSLQRVSTQHEKSQ

SEQ ID NO: 22450 - protein, 964 aa, Ustilago maydis
MSDVEHQQEKKVTKHRDIDEEHANSGPKHALVDMSTIELKAEDLYDKAKVDIEAIELEDVWTLLQCNEGGLSEEECSRRRAIFGPNKIETEEPNPILQFLSFMWNPLSWVMEGAAIVAIALSNGEGQGPDWPDFVGIVLLLLINSTIGFIEERNAGNAVKALMDSLAPKARCKRDGKWIEIESSDLVPGDVIAFKIGDIVPGDCRLFDAINVSCDQASLTGESLPVNKKLGDQCFSGSICKQGEAEGVVISTGPNTFFGRAATLIGSDDDTTGHLQQVLSRIGLFCMVTIGLFIVLEILILYAGFRYRYRRGIDNILVLLIGGIPIAMPCVLSVTLAVGAQQLAKHKAIVTRITAIEELAGVDILCSDKTGTLTTNKLTIDTELVKLYSDWANVEDVIRLAAYASRTENQDAIDATIVGTLKDPAEARNGIKLLDFKPFNPVDKRTEITYLEEATGKMKRVTKGMTSIIIDLCKRNKTEAQENALEADVEEFANRGLRGLAVAFEEVPSGEVEAEGNGFELLGLLAIFDPPRHDTKETLDNAQALGVRVKMVTGDQLAIAKETGRRLGLGDRMFNSKVLVEGVLPAGSPYKSLDEMILDVDGFAGVFPEHKYEIVKRLQGLGHLTAMTGDGANDAPALARANVGVAVEGATDAARGAADIVLTEPGLSTIVEAIRQSRIIFGRMKNYAAYAAAITIRVVVGFALLAFIWKSDFPPFMVLIIAFLNDGSIMTLSLDTVKPALEPQHWDLTELFFCGSLYGLYQVASTLALYAVIYETTFFEDKFGVTPLHGNPNDPRLHMIMYLQVAILAQALIFVTRSHGFSWMERPSFALMGAFCLAQLISSIIAAYGDWGFTNVHSIEGGWIGIVWVWNIVWYFPMDLVKFFAKFLLRNIRSKKTPAAAHESLSRTTSRADSMYSNRTSFLKRAQRKAGFGGEKKVHMSNTELQRLGSIQAQEASRRLSRTQ

SEQ ID NO: 22451 - protein, 321 aa, Ustilago maydis
DRMFNSKVLVEGVLPAGSPYKSLDEMILDVDGFAGVFPEHKYEIVKRLQGLGHLTAMTGDGANDAPALARANVGVAVEGATDAARGAADIVLTEPGLSTIVEAIRQSRIIFGRMKNYAAYAAAITIRVVVGFALLAFIWKSDFPPFMVLIIAFLNDGSIMTLSLDTVKPALEPQHWDLTELFFCGSLYGLYQVASTLALYAVIYETTFFEDKFGVTPLHGNPNDPRLHMIMYLQVAILAQALIFVTRSHGFSWMERPSFALMGAFCLAQLISSIIAAYSDWGFTNVHSIEGGWIGIVWVWNIVWYFPMDLVKFFAKFLLRN

SEQ ID NO: 22452 - protein, 895 aa, Candida albicans
MSATEPTNEKVDKIVSDDEDEDIDQLVADLQSNPGAGDEEEEEENDSSFKAVPEELLQTDPRVGLTDDEVTKRRKRYGLNQMAEEQENLVLKFVMFFVGPIQFVMEAAAVLAAGLEDWVDFGVICALLLLNAFVGFIQEYQAGSIVDELKKTLANSALVVRNGQLVEIPANEVVPGDILQLEDGTVIPTDGRIVSEDCLLQVDQSAITGESLAVDKRSGDSCYSSSTVKTGEAFMIVTATGDSTFVGRAAALVNKASAGTGHFTEVLNGIGTTLLVFVIVTLLVVWVACFYRTVRIVPILRYTLAITIIGVPVGLPAVVTTTMAVGAAYLAKKQAIVQKLSAIESLAGVEILCSDKTGTLTKNKLSLHEPYTVEGVEPDDLMLTACLAASRKKKGLDAIDKAFLKSLINYPRAKAALPKYKVIEFQPFDPVSKKVTAIVESPEGERIICVKGAPLFVLKTVEDDHPIPEDVHENYQNTVAEFASRGFRSLGVARKRGEGHWEILGIMPCMDPPRDDTAATVNEARRLGLRVKMLTGDAVGIAKETCRQLGLGTNIYDADRLGLSGGGDMAGSEIADFVENADGFAEGFPTNKYNAVEILQSRGYLVAMTGDGVNDAPSLKKADTGIAVEGATDAARSAADIVFLAPGLSAIIDALKTSRQIFHRMYSYVVYRIALSLHLELFLGLWIAILNRSLDINLIVFIAIFADVATLAIAYDNAPYDPKPVKWNLPRLWGMSIVLGIILAIGTWITLTTMLLPKGGIIQNFGGLDGILFLQISLTENWLIFVTRAQGPFWSSIPSWQLSGAVLIVDIIATCFTLFGWWSQNWTDIVTVVRTWIWSFGVFCVMGGAYYLMSTSEAFDNFCNGRKPQQHTDKRSLEDFLVSMQRVSTQHEKST

SEQ ID NO: 22453 - protein, 962 aa, Uromyces viciae-fabae
MSLKEGSDPVHKKNFDKTFEDEIKGTSALVDIGTIQLTAEDLYDKDKVDLEQVHLEDVWKLLQTTEEGLTAEEVQRRLEIFGPNKLESKEVNPLLLFLSFMWNPLSWVMEGAAIVAIGLSNGQGRPPDWQDFLGIMLLLFINAGIGFYEERSAGNAVKALMDSLAPKAKVRRAGVWSEIDSADLVPGDIVAFKIGDVVPSDCRLYDAINVSIDQAALTGESLPSTKHVGDQCFSGSTCKQGEAEGVVIATGPNTFFGRAATLVGADNDSTGHMQAVLAKIGTFCLVSIGIFVVLEIIILYGGFRYQYRRGIDNILVLLIGGIPIAMPTVLSVTLAVGAQQLAKYKAIVTRITAIEELAGVTILCSDKTGTLTTNKLTIDKSTVKTYADFSADEVCVLAAYASRTENQDAIDTCVVGNVGADVARRGIQLLDFKPFNPVDKRTEITYIDTESGQMRRVTKGMTGVIIELCTHNKTEALEQRLESDVEEFARRGLRALAVAYEDVPNAQVDAPGSGFELIGLLSIFDPPRDDTKQTIDDAQALGVKVKMVTGDQLAIAKETGRRLGMGDHMYPSKVLKDGPEPGGKFSSLDEMILDADGFAGVFPEHKYEIVKRLQGLGHLCAMTGDGANDAPALARANVGIAVEGATDAARGAADIVLTEPGLSTIVHAIRQSRIVFQRMRNYSIYACAVTIRIVVGFAVMAFAFKFDFPPFMVLVIALLNDGTIMTLSLDRVLPSSNPDHWDLTEIFTYAIGYGLCLALSTIVLLAVIIHTQFFEDRFGVQPLKDANDPHVHMIIYLQVAIISQALIFVTRSHGWFFMERPSVALFGAFVIAQLISSLIAAYGDWAFTDVRGISATWIAIVWIWNVIWFLPLDLVKFGMRAVIRMFKPPVALNKPIPANQLTRTTSRPASINESLYSNRASFIQRASRRSVLGGRVHADDRELRRFSSAQAVSSGAALSRAQ

SEQ ID NO: 22454 - protein, 898 aa, Escherichia coli
MFKEIFTRLIRHLPSRLVHRDPLPGAQQTVNTVVPPSLSAHCLKMAVMPEEELWKTFDTHPEGLNQAEVESAREQHGENKLPAQQPSPWWVHLWVCYRNPFNILLTILGAISYATEDLFAAGVIALMVAISTLLNFIQEARSTKAADALKAMVSNTATVLRVINDKGENGWLEIPIDQLVPGDIIKLAAGDMIPADLRILQARDLFVAQASLTGESLPVEKAATTRQPEHSNPLECDTLCFMGTTVVSGTAQAMVIATGANTWFGQLAGRVSEQESEPNAFQQGISRVSMLLIRFMLVMAAGGAVNQWLHQRRLVGSALFALSVAVGLTPEMLPMIVTSTLARGAVKLSKQKVIVKHLDAIQNFGAMDILCTDKTGTLTQDKIVLENHTDISGKTSERVLHSAWLNSHYQTGLKNLLDTAVLEGTDEESARSLASRWQKIDEIPFDFERRRMSVVVAENTEHHQLVCKGALQEILNVCSQVRHNGEIVPLDDIMLRKIKRVTDTLNRQGLRVVAVATKYLPAREGDYQRADESDLILEGYIAFLDPPKETTAPALKALKASGITVKILTGDSELVAAKVCHEVGLDAGEVVIGSDIETLSDDELANLAQRTTLFARLTPMHKERIVTLLKREGHVVGFMGDGINDAPALRAADIGISVDGAVDIAREAADIILLEKSLMVLEEGVIEGRRTFANMLKYIKMTASSNFGNVFSVLVASAFLPFLPMLPLHLLIQNLLYDVSQVAIPFDNVDDEQIQKPQRWNPADLGRFMIFFGPISSIFDILTFCLMWWVFHANTPETQTLFQSGWFVVGLLSQTLIVHMIRTRRVPFIQSCASWPLMIMTVIVMIVGIALPFSPLASYLQLQALPLSYFPWLVAILAGYMTLTQLVKGFYSRRYGWQ

SEQ ID NO: 22455 - protein, 974 aa, Leishmania donovani
MSSKKYELDAAAFEDKPESHSDAEMTPQKPQRRQSVLSKAVSEHDERATGPATDLLPPSKGLTTEEAEELLKKYGRNELPEKKTPSWLIYVRGLWGPMPAALWIAIIIEFALENWPDGAILFAIQIANATIGWYETIKAGDAVAALKNSLKPTATVYRDSKWQQIDAAVLVPGDLVKLASGSAVPADCSINEGVIDVDEAALTGESLPVTMGPEHMPKMGSNVVRGEVEGTVQYTGSLTFFGKTAALLQSVESDLGNIHVILRRVMFSLCAISFMLCMCCFIYLLARFYETFRHALQFAVVVLVVSIPIALEIVVTTTLAVGSKHLSKHKIIVTKLSAIEMMSGVNMLCSDKTGTLTLNKMEIQEQCFTFEEGNDLKSTLVLAALAAKWREPPRDALDTMVLGAADLDECDNYQQLNFVPFDPTTKRTAATLVDRRSGEKFDVTKGAPHVILQMVYNQDEINDEVVDIIDSLAARGVRCLSVAKTDQQGRWHMAGILTFLDPPRPDTKDTIRRSKEYGVDVKMITGDHLLIAKEMCRMLDLDPNILTADKLPQIKDANDLPEDLGEKYGDMMLSVGGFAQVFPEHKFMIVETLRQRGYTCAMTGDGVNDAPALKRADVGIAVHGATDAARAAADMVLTEPGLSVVVEAMLVSREVFQRMLSFLTYRISATLQLVCFFFIACFSLTPKAYGSVDPHFQFFHLPVLMFMLITLLNDGCLMTIGYDHVIPSERPQKWNLPVVFVSASILAAVACGSSLMLLWIGLEGYSSQYYENSWFHRLGLAQLPQGKLVTMMYLKISISDFLTLFSSRTGGHFFFYMPPSPILFCGAIISLLVSTMAASFWHKSRPDNVLTEGLAWGQTNAEKLLPLWVWIYCIVWWFVQDVVKVLAHICMDAVDLFGCVSDASGSGPIKPYSDDMKVNGFEPVKKPAEKSTEKALNSSVSSASHKALEGLREDTHSPIEEASPVNVYVSRDQK

SEQ ID NO: 22456 - protein, 974 aa, Leishmania donovani
MSSKKYELDAAAFEDKPESHSDAEMTPQKPQRRQSVLSKAVSEHDERATGPATDPVPPSKGLTTEEAEELLKKYGRNELPEKKTPSWLIYVRGLWGPMPAALWIAIIIEFALENWPDGAILFAIQIANATIGWYETIKAGDAVAALKNSLKPTATVYRDSKWQQIDAAVLVPGDLVKLASGSAVPADCSINEGVIDVDEAALTGESLPVTMGPEHMPKMGSNVVRGEVEGTVQYTGSLTFFGKTAALLQSVESDLGNIHVILRRVMFSLCAISFMLCMCCFIYLLARFYETFRHALQFAVVVLVVSIPIALEIVVTTTLAVGSKHLSKHKIIVTKLSAIEMMSGVNMLCSDRTGTLTLNKMEIQEQCFTFEEGNDLKSTLVLAALAAKWREPPRDALDTMVLGAADLDECDNYQQLNFVPFDPTTKRTAATLVDRRSGEKFDVTKGAPHVILQMVYNQDEINDEVVDIIDSLAARGVRCLSVAKTDQQGRWHMAGILTFLDPPRPDTKDTIRRSKEYGVDVKMITGDHLLIAKEMCRMLDLDPNILTADKLPQIKDANDLPEDLGEKYGDMMLSVGGFAQVFPEHKFMIVETLRQRGYTCAMTGDGVNDAPALKRADVGIAVHGATDAARAAADMVLTEPGLSVVVEAMLVSREVFQRMLSFLTYRISATLQLVCFFFIACFSLTPKAYGSVDPHFQFFHLPVLMFMLITLLNDGCLMTIGYDHVIPSERPQKWNLPVVFVSASILAAVACGSSLMLLWIGLEGYSSQYYENSWFHRLGLAQLPQGKLVTMMYLKISISDFLTLFSSRTGGHFFFYMPPSPILFCGAIISLLVSTMAASFWHKSRPDNVLTEGLAWGQTNAEKLLPLWVWIYCIVWWFVQDVVKVLAHICMDAVDLFGCVSDASGSGPIKPYSDDMKVNGFEPVKKPAEKSTEKALNSSVSSASHKALEGLREDTHSPIEEASPVNVYVSRDQK

SEQ ID NO: 22457 - protein, 974 aa, Leishmania donovani
MSSKKYELDAAAFEDKPESHSDAEMTPQKPQRRQSVLSKAVSEHDERATGPATDLLPPSKGLTTEEAEELLKKYGRNELPEKKTPSWLIYVRGLWGPMPAALWIAIIIEFALENWPDGAILFAIQIANATIGWYETIKAGDAVAALKNSLKPTATVYRDSKWQQIDAAVLVPGDLVKLASGSAVPADCSINEGVIDVDEAALTGESLPVTMGPEHMPKMGSNVVRGEVEGTVQYTGSLTFFGKTAALLQSVESDLGNIHVILRRVMLALCAISFILCMCCFIYLLARFYETFRHALQFAVVVLVVSIPIALEIVVTTTLAVGSKHLSKHKIIVTKLSAIEMMSGVNMLCSDKTGTLTLNKMEIQEQCFTFEEGNDLKSTLVLAALAAKWREPPRDALDTMVLGAADLDECDNYQQLNFVPFDPTTKRTAATLVDRRSGEKFDVTKGAPHVILQMVYNQDEINDEVVDIIDSLAARGVRCLSVAKTDQQGRWHMAGILTFLDPPRPDTKDTIRRSKEYGVDVKMITGDHLLIAKEMCRMLDLDPNILTADKLPQIKDANDLPEDLGEKYGDMMLSVGGFAQVFPEHKFMIVETLRQRGYTCAMTGDGVNDAPALKRADVGIAVHGATDAARAAADMVLTEPGLSVVVEAMLVSREVFQRMLSFLTYRISATLQLVCFFFIACFSLTPKAYGSVDPNFQFFHLPVLMFMLITLLNDGCLMTIGYDHVIPSERPQKWNLPVVFVSASILAAVACGSSLMLLWIGLEGYSSQYYENSWFHRLGLAQLPQGKLVTMMYLKISISDFLTLFSSRTGGHFFFYVPPSPILFCGAIISLLVSTMAASFWHKSRPDNVLTEGLAWGQTNAEKLLPLWVWIYCIVWWFVQDVVKVLAHICMDAVDLFGCVSDASGSGPIKPYSDDMKVNGFEPVKKPAEKSTEKALNLSVSSGPHKALEGLREDTHVLNESTSPVNAFSPKVKK

SEQ ID NO: 22458 - protein, 257 aa, Trypanosoma brucei
DKTGTLTLNKMEIQEQCFTFEKGHDLRSLLVLSALAAKWREPPRDALDTMVLGAADLDECDNYEQLEFVPFDPTTKRTAATLVDKRSGEKFSVTKGAPHVILQMVYNQDEINDSVVDIIDKLASRGIRCLSVAKTDSAGRWHLCGILTFLDPPRPDTKETIRRSRQYGVDVKMITGDHVLIAKEMCRMLDLDPNILTVEKLPKVDVNNMPSDLGEKYGDMMLSVGGFAQVFPEHKFLIVEALRQRGYTCAMTGDGVN

SEQ ID NO: 22459 - protein, 917 aa, Trypanosoma cruzi
MNQKNDNSVLNNSNNGNFNEQHPPQKSQKRQSVLSKAISEHKEDGVDEVPMLPPSKGLTTAEAKELLAKYGRNELPEKKTPSWLIFARNLWGPMPFVLWVAIIIEFALENWPDGAILLAIQLANATIGWYETIKAGDAVAALKNSLKPVATVHRDGTWQQLDAALLVPGDLVKLASGSAVPADCSINEGVIDVDEAALTGESLPVTMGTDHMPKMGSNVVRGEVDGTVQYTGQNTFFGKTAVLLQSVESDLGNIHVILSRVMVVLTSFSFTLCLICFIYLMVKFKESFRRSLQFSVVVLVVSIPIALEIVVTTTLAVGSKKLSRHKIIVTKLTAIEMMSGVNMLCSDKTGTLTLNKMEIQDQCFTFEKGYDLRSVLVLAALAAKWREPPRDALDTMVLGAADLDECDNYTQTEFVPFDPTTKRTAATLVDKRTNEKFSVTKGAPHVIIQLVYNQDEINDQVVEIIDSLAARGVRCLSVAKTDSQGRWHLCGILTFLDPPRPDTKETIRRSKQYGVDVKMVTGDHVLIAKEMCRMLNLDPNILTADKLPKVDVNDLPDDLGEKYGEMMLGVGGFAQVFPEHKFMIVEALRQYGFTCAMTGDGVNDAPALKRADVGIAVQGATDAARAAADMVLTGPGLSVVVEAMLVSRQVFQRMLSFLTYRISATLQLVCFFFIACFSLTPRNYGSVDADFQFFHLPVLMFMLITLLNDGCLMTIGYDRVVPSKLPQRWNLPVVFTIAIILAAVACSSSLMLLWIALEGWGEETYPNSWFKALGLAQLKQGKVVTLLYLKISISDFLTLFSSRTGGRWFFTMAPGLVLLIGAIISLFVSSMVASFWHTSRPDGLLTEGLAWGDTNSERLLPLWVWIYCIVWWLIQDAVKVGAHMLMEWMDLFGCVSKAYGGKVVEQYMENKITEPAN

SEQ ID NO: 22460 - protein, 925 aa, Trypanosoma cruzi
MNQKNDKSVLNNSNNGNFNEQHPPQKPQKRQSVLSKAISEHKEDGVDEVPMLPPSKGLTTAEAEELLAKYGRNELPEKKTPSWLIFVRNLWGPMPFALWVAIIIEFALENWPDGAILLAIQLANATIGWYETIKAGDAVAALKNSLKPVATVHRDGAWKQLDAALLVPGDLVKLASGSAVPADCSINEGVIDVDEAALTGESLPVTMGTDHMPKMGSNVVRGEVDGTVQYTGQNTFFGKTAVLLQSVESDLGNIHVILSRVMVVLTSFSFTLCLICFIYLMVKFKESFRRSLQFSVVVLVVSIPIALEIVVTTTLAVGSKKLSRHKIIVTKLTAIEMMSGVNMLCSDKTGTLTLNKMEIQDQCFTFEKGHDLRSVLVLAALAAKWREPPRDALDTMVLGAADLDECDNYTQTEFVPFDPTTKRTAATLVDKRTNEKFSVTKGAPHVIIQLVYNQDEINDQVVEIIDSLAARGVRCLSVAKTDSQGRWHLCGILTFLDPPRPDTKETIRRSKQYGVDVKMITGDHVLIAKEMCRMLNLDPNILTADKLPKVDVNDLPDDLGEKYGEMMLGVGGFAQVFPEHKFMIVEALRQYGFTCAMTGDGVNDAPALKRADVGIAVQGATDAARAAADMVLTGPGLSVVVEAMLVSRQVFQCMLSFLTYRISATLQLVCFFFIACFSLTPRNYGSADADFQFFHLPVLMFMLITLLNDGCLMTIGYDRVVPSKLPQRWNLPVVFTIAIILAAVACGSSLMLLWIALEGWSDETYPNSWFKALGLAQLKQGKVVTLLYLKISISDFLTLFSSRTGGRWFFTMAPGLVLLIGAIISLFVSSMVASFWHTSRPDGLLTEGLAWGDTNSERLLPLWVWIYCIVWWLIQDAVKVGTHKLMEWMDLFGCVSRAYGGKVVEQYEDETPNSGNKNESKEPTV

SEQ ID NO: 22461 - protein, 875 aa, Trypanosoma cruzi
MLPPSKGLTTAEAEELLAKYGRNELPEKKTPSWLIFVRNLWGPMPFALWVAIIIEFALENWPDGAILLAIQLANATIGWYETIKAGDAVAALKNSLKPVATVHRDGAWQQLDAALLVPGDLVKLASGSAVPADCSINEGVIDVDEAALTGESLPVTMGTDHMPKMGSNVVRGEVDGTVQYTGQNTFFGKTAVLLQSVESDLGNIHVILSRVMVVLTSFSFTLCLICFIYLLAEFYETFRRSLQFSVVVLVVSIPLALEIVVTTTLAVGSKKLSRHKIVVTKLTAIEMMSGVNMLCSDKTGTLTLNKMEIQDQCFTFEKGYDLRSVLVLAALAAKWREPPRDALDTMVLGAADLDECDNYTQTEFVPFDPTTKRTAATLVDKRTNEKFSVTKGAPHVIIQLVYNPDEINDQVVEIIDSLAARGVRCLSVAKTDSQGRWHLCGILTFLDPPRPDTKETIRRSKQYGVDVKMITGDHVLIAKEMCRMLNLDPNILTADKLPKVDVNDMPDDLGEKYGEMMLGVGGFAQVFPEHKFMIVEALRQYGFTCAMTGDGVNDAPALKRADVGIAVQGATDAARAAADMVLTGPGLSVVVEALLVSRQVFQCMLSFLTYRISATLQLVCFFFIACFSLTPRNYGSVDADFQFFHLPVLMFMLITLLNDGCLMTIGYDRVVPSKLPQRWNLPVVFTIAIILAAVACGSSLMLLWIALEGWGEETYPNSWFKALGLAQLKQGKVVTLLYLKISISDFLTLFSSRTGGRWFFTMAPGLVLLIGAIISLFVSSMVASFWHTSRPDGLLTEGLAWGDTNSERLLPLWVWIYCIVWWLIQDAVKVGAHMLMEWMDLFGCVSKAYGGKVVEQYEDETSNSGNKNESKEPTV

SEQ ID NO: 22462 - protein, 508 aa, Trypanosoma cruzi
DPTTKRTAATLVDKRTNEKFSVTKGAPHVIIQLVYNQDEINDQVVEIIDSLAARGVRCLSVAKTDSQGRWHLCGILTFLDPPRPDTKETIRRSKQYGVDVKMITGDHVLIAKEMCRMLNLDPNILTADKLPKVDVNDLPDDLGEKYGEMMLGVGGFAQVFPEHKFMIVEALRQYGFTCAMTGDGVNDAPALKRADVGIAVQGATDAARAAADMVLTGPGLSVVVEAMLVSRQVFQCMLSFLTYRISATLQLVCFFFIACFSLTPRNYGSADADFQFFHLPVLMFMLITLLNDGCLMTIGYDRVVPSKLPQRWNLPVVFTIAIILAAVACGSSLMLLWIALEGWSDETYPNSWFKALGLAQLKQGKVVTLLYLKISISDFLTLFSSRTGGRWFFTMAPGLVLLIGAIISLFVSSMVASFWHKSRPDGLLTEGLAWGDTNSERLLPLWVWIYCIVWWLIQDAVKVGAHKLMEWMDLFGCVSRAYGGKVVEQYEDETPNSGNKNESKEPTV

SEQ ID NO: 22463 - protein, 245 aa, Trypanosoma cruzi
MNQKNDKSVLNNSNNGNFNEQHPPQKPQKRQSVLSKAISEHKEDDVDEVPMLPPSKGLTTAEAEELLAKYGRNELPEKKTPSWLIFVRNLWGPMPFALWVAIIIEFALENWPDGAILLVIQLANATIGWYETIKAGDAVAALKNSLKPVATVHRDGAWKQLDAALLVPGDLVKLASGSAVPADCSINEGVIDVDEAALTGESLPVTMGTDHMPKMGSNVVRGEVDGTVQYTGQNTFFGKTAVLLQ

SEQ ID NO: 22464 - protein, 1011 aa, Trypanosoma brucei brucei
MLPENLPTDPAAMTPAAVAAALRVDTKVGLSSNEVEERRQAFGINELPSEPPTPFWKLVLAQFEDTLVRILLLAATVSFAMAVVENNAADFVEPFIILLILILNATVGVWQENRAEGAIEALKSFVPKTAVVLRDGDIKTVNAEELVPGDVVEVAVGNRVPADMRVVELHSTTLRADQSILNGESVEAMKQIEAVKGRQERFPACMVYSGTAIVYGKALCVVVRTGASTEIGTIERDVREQEEVKTPLQVKLDEFGVLLSKVIGYICLVVFAVNLVRWYATHKPTKNETFFTRYIQPSVHCLKVAVALAVAAIPEGLPAVVTTCLALGTRRMAQHNALVRDLPSVETLGRCTVICSDKTGTLTTNMMSVLHAFTLKGDGSIKEYELKDSRFNIVSNSVTCEGRQVSSPLEQDGALTKLANIAVLCNDASLHHNAATVQVEKIGEATEAALLVMSEKFANIKGDSAVNAFRTLCEGKWKKNATLEFTRKRKSMSVHVTSTVTGSPASSTNNLFVKGAPEEVLRRSTHVMQDNGAVVQLSATHRKRIIEQLDKISGGANALRCIGFAFKPTKAVQHVRLNDPATFEDVESDLTFVGACGMLDPPREEVRDAIVKCRTAGIRVVVITGDRKETAEAICCKLGLLSSTADTTGLSYTGQELDAMTPAQKREAVLTAVLFSRTDPSHKMQLVQLLKDERLICAMTGDGVNDAPALKKADIGIAMGSGTEVAKSASKMVLADDNFATVVKAVQEGRAIYNNTKQFIRYLISSNIGEVVCILVTGLFGLPEALSPVQLLWVNLVTDGLPATALGFNAPDRDIMEQRPRRMEEPIVNGWLFMRYMVIGVYVGLATVGGFLWWFLRHGFSWHDLTTYTACSDMTNGTCLLLANPQTARAIALSILVVVEMLNALNALSENASLIVSRPSSNVWLLFAIFSSLSLHLIIMYVPFFAKLFNIVPLGVDPHVVQQAQPWSILTPTNFDDWKAVIVFSVPVIFLDELLKFITRRMEKAQEKKKD

SEQ ID NO: 22465 - protein, 1039 aa, Toxoplasma gondii
MDEASRRAAELEAAADKLEQTETVTVNYDTRGLTSDQVADLRKKYGWNEVKPHQVPEWFKVLKKYLSLVPMLLIVAALFSVCVVEDNMRDWFSFALLLFLNNSMVWADYIGQRSAHNAIAAVEKLGAPVCQVKRDGQWQNRQVRDLVPGDVVHLKAGVIMPADGVFVTKGTTITVDESALTGESVPIRKRPGAPLLSGSVVDRGEGEMLVTKTGNDSFYGKTLSLLARAERQGYLETVLHRTSLFITFVASCCAAFLFFWQSFNSDWKLIIPERRYLIALKHAFILIASVAPAAMPVVTTTVLSVGALIITKQNAAVSRLSAIEEAAGVVILFSDKTGTLTKNQLSLFKEESMIEPGYDEETMLLYASLCSDTQEPEPIDRTINAAADMTERAKYQILEYVPFNPVDKRTEATVVSPEGKKFITTKGAPHVIRDLVCYEDQKLREQLNELILNKAKRGLRTLGVAVKPVPDGVAGDAPRWKLVGYLSLFDPPREDTAATIQRANELGIRVIMVTGDQQAIAVETARQLHMGTNIVGPEIWKEEKETGLVQGKALAEFIETVDGFAGVFPEHKYAIVNAMMDAHKLVAMTGDGVNDAPALKRATIGIAVSGATQAARAAADIILFAPGLKTIITVMSLSRQIFKRVESYIIFRIYTSLIILGMWWGCIVILRYQFPSWTLVLMSMINDFVLMSCSRDRVASSTSPMIWSMLRVICLSTWLGFLATVSILLYVVFADPSHCVNWWPRWGLPKFTPDWPLPVSEHFMSYQTNAGVWLLMTVLIQFSFQSVRTRGLFCRYNENNQFPALVIIIPQICAVVVTIFLSIYWKIAWRPGSGPRMVGINWGQAWVTIFWGILWFFVMDATKIGFYKYAWPVITRNVVYKSIAETACQREIENNNVASKVMQNTVHFLEERERNVEKLEEKVEDAFLAAVTDAGELVKNDHGKSHIDRKEHKVSPEPGKTSTEDEVSLPRKDANSFVVSITSEEGACRTGFDDADAGTAKHRVAVDQKNREVSRSSGKTSIPLHPDVGKGCAVPSITR

SEQ ID NO: 22466 - protein, 1228 aa, Plasmodium falciparum
MEEVIKNAHTYDVEDVLKFLDVNKDNGLKNEELDDRRLKYGLNELEVEKKKSIFELILNQFDDLLVKILLLAAFISFVLTLLDMKHKKIEICDFIEPLVIVLILILNAAVGVWQECNAEKSLEALKELQPTKAKVLRDGKWEIIDSKYLYVGDIIELSVGNKTPADARIIKIYSTSLKVEQSMLTGESCSVDKYAEKMEDSYKNCEIQLKKNILFSSTAIVCGRCIAVVINIGMKTEIGHIQHAVIESNSEDTQTPLQIKIDLFGQQLSKIIFVICVTVWIINFKHFSDPIHGSFLYGCLYYFKISVALAVAAIPEGLPAVITTCLALGTRRMVKKNAIVRKLQSVETLGCTTVICSDKTGTLTTNQMTTTVFHLFRESDSLTEYQLCQKGDTYYFYESSNLTNDIYAGESSFFNKLKDEGNVEALTDDGEEGSIDEADPYSDYFSSDSKKMKNDLNNNNNNNNNSSRSGAKRNIPLKEMKSNENTIISRGSKILEDKINKYCYSEYDYNFYMCLVNCNEANIFCNDNSQIVKKFGDSTELALLHFVHNFDILPTFSKNNKMPAEYEKNTTPVQSSNKKDKSPRGINKFFSSKNDNSHITSTLNENDKNLKNANHSNYTTAQATTNGYEAIGENTFEHGTSFENCFHSKLGNKINTTSTHNNNNNNNNNSNSVPSECISSWRNECKQIKIIEFTRERKLMSVIVENKKKEIILYCKGAPENIIKNCKYYLTKNDIRPLNETLKNEIHNKIQNMGKRALRTLSFAYKKLSSKDLNIKNTDDYYKLEQDLIYLGGLGIIDPPRKYVGRAIRLCHMAGIRVFMITGDNINTARAIAKEINILNKNEGDDEKDNYTNNKNTQICCYNGREFEDFSLEKQKHILKNTPRIVFCRTEPKHKKQIVKVLKDLGETVAMTGDGVNDAPALKSADIGIAMGINGTEVAKEASDIVLADDNFNTIVEAIKEGRCIYNNMKAFIRYLISSNIGEVASIFITALLGIPDSLAPVQLLWVNLVTDGLPATALGFNPPEHDVMKCKPRHKNDNLINGLTLLRYIIIGTYVGIATVSIFVYWFLFYPDSDMHTLINFYQLSHYNQCKAWNNFRVNKVYDMSEDHCSYFSAGKIKASTLSLSVLVLIEMFNALNALSEYNSLFEIPPWRNKYLVLATIGSLLLHVLILYIPPLARIFGVVPLSAYDWFLVFLWSFPVIILDEIIKFYAKRKLKEEQRTKKIKID

SEQ ID NO: 22467 - protein, 1115 aa, Plasmodium yoelii
MENILKYAHIYNVEDVLRAVKVDENRGLSENEIRKRIMQYGFNELEVEKKKGILELILNQFDDLLVKILLLAAFVSFALTLLDMKDNEVALCDFIEPVVILMILILNAAVGVWQECNAEKSLEALKQLQPTKAKVLRDGKWEIIDSKYLTVGDIIELSVGNKTPADARIVKIFSTSIKAEQSMLTGESCSVDKYVEKLDESLKNCEIQLKKNILFSSTAIVAGRCTAVVIKIGMNTEIGNIQHAVIESNNEETDTPLQIKIDSFGKQLSKIIFIICVHVWIINFKHFSDPIHESFLYGCLYYFKISVALAVAAIPEGLPAVITTCLALGTRRMVKKNAIVRKLQSVETLGCTTVICSDKTGTLTTNQMTATVFHIFRESNTLKEYQLCQRGDTFFFYETNQDDENDSFFNKLKESPNNESSYKKKISKNIIDDDDDDTDYEREPLINMKSNVNTIISRGSKIIDDKINKYIYSDFDYHFYMCLCNCNEASILCNVNNKIVKTFGDSTELALLHFVHNFNILPNNTKNNKISMEYEKINNITKQNSDLNGGHDSSTYKKNKISDKKSEPTFPSKCVSAWRNECTIMRIIEFTRERKLMSVVVENSKNEYILYCKGAPENIINRCKYYMSKNDIRPLTDSLKNEILNKIKNMGKRALRTLSFAYKKVKSNDINIKNSEDYYKLEHDLIYIGGLGIIDPPRKYVGKAISLCHLAGIRVFMITGDNIDTAKAIAKEINILNHDDTDKYSCCFNGREFEDLPLEKQKYILKNYQQIVFCRTEPKHKKNIVKILKDLGETVAMTGDGVNDAPALKSADIGIAMGINGTQVAKEASDIILADDNFNTIVEAIKEGRCIYNNMKAFIRYLISSNIGEVASIFITAILGIPDSLAPVQLLWVNLVTDGLPATALGFNPPEHDVMKCKPRHRNDNLINGLTLLRYIVIGTYVGIATVSIFIYWYMFYPDMDNHTLINFYQLSHYNQCKTWSNFNVNKVYDMSEDLCSYFSAGKVKASTLSLSVLVLIEMFNALNALSEYNSLFVLPPWRNMYLVLATIGSLFLHCLIIYFPPLAGIFGVVPLTLHDWFLVFLWSFPVIIIDEIIKFYAKKQLNKELGYGQKLKTQ

SEQ ID NO: 22468 - protein, 908 aa, Salmonella typhimurium
MTDMNIENRKLNRPASENDKQHKKVFPIEAEAFHSPEETLARLNSHRQGLTIEEASERLKVYGRNEVAHEQVPPALIQLLQAFNNPFIYVLMALAGVSFITDYWLPLRRGEETDLTGVLIILTMVSLSGLLRFWQEFRTNRAAQALKKMVRTTATVLRRGPGNIGAVQEEIPIEELVPGDVVFLAAGDLVPADVRLLASRDLFISQSILSGESLPVEKYDVMADVAGKDSEQLPDKDKSLLDLGNICLMGTNVTSGRAQAVVVATGSRTWFGSLAKSIVGTRTQTAFDRGVNSVSWLLIRFMLIMVPVVLLINGFSKGDWVEASLFALAVAVGLTPEMLPMIVSSNLAKGAIAMSRRKVIVKRLNAIQNFGAMDVLCTDKTGTLTQDNIFLEHHLDVSGVKSSRVLMLAWLNSSSQSGARNVMDRAILRFGEGRIAPSTKARFIKRDELPFDFVRRRVSVLVEDAQHGDRCLICKGAVEEMMMVATHLREGDRVVALTETRRELLLAKTEDYNAQGFRVLLIATRKLDGSGNNPTLSVEDETELTIEGMLTFLDPPKESAGKAIAALRDNGVAVKVLTGDNPVVTARICLEVGIDTHDILTGTQVEAMSDAELASEVEKRAVFARLTPLQKTRILQALQKNGHTVGFLGDGINDAPALRDADVGISVDSAADIAKESSDIILLEKDLMVLEEGVIKGRETFGNIIKYLNMTASSNFVNVFSVLVASAFIPFLPMLAIHLLIQNLMYDISQLSLPWDKMDKEFLRKPRKWDAKNIGRFMLWIGPTSSIFDITTFALMWYVFAANNVEAQALFQSGWFIEGLLSQTLVVHMLRTQKIPFIQSRATLPVLLTTGLIMAIGIYIPFSPLGAMVGLEPLPLSYFPWLVATLLSYCLVAQGMKRFYIKRFGQWF

SEQ ID NO: 22469 - protein, 908 aa, Salmonella typhimurium
MTDMNIENRKLNRPASENDKQHKKVFPIEAEAFHSPEETLARLNSHRQGLTIEEASERLKVYGRNEVAHEQVPPALIQLLQAFNNPFIYVLMALAGVSFITDYWLPLRRGEETDLTGVLIILTMVSLSGLLRFWQEFRTNRAAQALKKMVRTTATVLRRGPGNIGAVQEEIPIEELVPGDVVFLAAGDLVPADVRLLASRDLFISQSILSGESLPVEKYDVMADVAGKDSEQLPDKDKSLLDLGNICLMGTNVTSGRAQAVVVATGSRTWFGSLAKSIVGTRTQTAFDRGVNSVSWLLIRFMLIMVPVVLLINGFSKGDWVEASLFALAVAVGLTPEMLPMIVSSNLAKGAIAMSRRKVIVKRLNAIQNFGAMDVLCTDKTGTLTQDNIFLEHHLDVSGVKSSRVLMLAWLNSSSQSGARNVMDRAILRFGEGRIAPSTKARFIKRDELPFDFVRRRVSVLVEDAQHGDRCLICKGAVEEMMMVATHLREGDRVVALTETRRELLLAKTEDYNAQGFRVLLIATRKLDGSGNNPTLSVEDETELTIEGMLTFLDPPKESAGKAIAALRDNGVAVKVLTGDNPVVTARICLEVGIDTHDILTGTQVEAMSDAELASEVEKRAVFARLTPLQKTRILQALQKNGHTVGFLGDGINDAPALRDADVGISVDSAADIRKESSDIILLEKDLMVLEEGVIKGRETFGNIIKYLNMTASSNFVNVFSVLVRSAFIPFLPMLAIHLLIQNLMYDISQLSLPWDKMDKEFLRKPRKWDAKNIVRFMLWIGPTSSIFDITTFALMWYVFAANNVEAQALFQSGWFIEGLLSQTLVVHMLRTQKIPFIQSRATLPVLLTTGLIMAIGIYIPFSPLGAMVGLEPLPLSYFPWLVATLLSYCLVAQGMKRFYIKRFGQWF

SEQ ID NO: 22470 - protein, 1002 aa, Porcellio scaber
MENSHCASFQDALQFFGLREETGLTDQQVKDNQAKYGPNELPAEEGKSLLTLILEQFDDLLVKILLLAAIISFVLACFEEGEETVTAFVEPFVILLILIANAIVGVWQERNAESAIEALKEYEPEMGKVVRASKAGVQKIRAREIVPGDIVEISVGDKIPADIRLMKIYSTTLRIDQSILTGESVSVIKHTDPIPDPKAVNQDKKNILFSGTNVAAGKARGIVIGTGLNTAIGAIRTQMAETEEIRTPLQQKLDEFGEQLSKVISIICVAVWAINIGHFNDPAHGGSWIKGAIYYFKIAVALAVAAIPEGLPAVITTCLALGTRRMAKKNAIVRSLPSVETLGCTSVICSDKTGTLTTNQMSVSRMFVIDKAEGNDCSLLEFEITGSTYEPIGDIFLKGQKVKGTDFEGLQEIATISLMCNDSSIDFNEFKNIFEKVGEATETALIVLGEKINPYVVSKVGLDRRSAALVSKQDMDTKWKKEFTLEFSRDRKSMSSYCIPQKPTRLGSGPKMFVKGAAEGVLDRCTHARVGTQKVPMTQGIKDKILAVTRDYGCGRDTLRCLALATIDNPIKPEDMDLGDATKFYTYEVNMTFVGVVGMLDPPRKEVRDSIQQCRLAGIRVIVITGDNKATAEAICRRIGVFGENEDTTGKSYSGREFDELSPAEQLNACMKSRLFSRVEPFHKSKIVEYLQSQNEISAMTGDGVNDAPALKKAEIGIAMGSGTAVAKSASEMVLADDNFSSIVAAVEEGRAIYNNMKQFIRYLISSNIGEVVSIFLTAALGLPEALIPVQLLWVNLVTDGLPATALGFNPPDLDIMQKPPRKADESLISGWLFFRYMAIGGYVGAGTVFAAAYWFMYDPTGPHLNYYQLSHHLSCLGEPENFEGVDCNIFSHPAPMTMALSVLVTIEMLNALNSLSENQSLVAMPPWSNIWLLAAMALSMTLHFIILYVDILSTVFQVMPLSPAQWIAVLKISLPVVLLDETLKLVARRYTDVPAEIIKQW

SEQ ID NO: 22471 - protein, 993 aa, Mizuhopecten yessoensis
MEYAHTKSCEEVLEYFNVETDGLSEEQVKTNTEKYGPNELPTEEGKPLWELILEQFDDLLVKILLLAAIISFVLAWFEESEEQVTAFVEPFVILTILICNAVVGVWQEKNAEDAIEALKEYEPEIAKVVRKGQRGVQKIRASLLVPGDIVEISVGDKIPADIRILHIYSTTLRIDQSILTGESVSVIKHTDPIPDPRAVNQDKKNILFSGTNISAGKCKGIAFGTGLNTAIGKIRDEMMETETEKTPLQQKLDEFGTQLSKVITIICICVWAINIGHFNDPAHGGSWMKGAIYYFKIAVALAVAAIPEGLPAVITTCLALGTRRMAKKNAIVRSLPSVETLGCTSVICSDKTGTLTTNQMSVCKMFVFNKVEGADIQTQQFEITGSTYAPEGDVYLGGKKVKTCDYDGLEEMATICAMCNDSSVDYNDTKGVYEKVGEATETALTVLCEKMNFFNTGRSGLNLREQGTVCNHVIQQMWSKEFTLEFSRDRKSMSVYCTPNKPSKIPGGTNMFAKGAPEGLLDRCTHVRVGKDKVPMSPAIKNEILKYTKAYGTGRDTLRCLALATIDAPPRREDMDLEDSRKFIQYETNMTFVGVVGMLDPPRMEVFDSIKNCRKAGIRVIVITGDNKATAEAICRRIGVFGENESTEGMSFTGREFDDLSHEEQRLAVTKSRLFARVEPAHKSKIVEYLQGEGEISAMTGDGVNDAPALKKAEIGIAMGSGTAVAKSASEMVLADDNFATIVSAVEEGRAIYNNMKQFIRYLISSNIGEVVCIFLTAALGIPEALIPVQLLWVNLVTDGLPATALGFNPPDMDIMKKPPRNAKEGLITGWLFFRYMAIGGYVGCATVGAAAWWFMVYDKGPQLNYYQLTHHSQCLAQDERFLGVDCKVFDHPAPMTMALSVLVVIEMLNALNSLSENQSLLVMPPWCNKWLLGAMALSMGLHFCILYIDVMSTIFQITPLGFEEWFAVLKISMPVILIDETLKFCARKFTDA

SEQ ID NO: 22472 - protein, 994 aa, Placopecten magellanicus
MEYAHTKSTEEVLEYFNVEESGLSEEQVKANTEKYGPNELPTEEGKPLWELILEQFDDLLVKILLLAAIISFVLVWFEESEEQVTAFVEPFVILTILICNAVVGVWQEKNAEDAIEALKEYEPEIAKVVRKGHRGVQKIRASLLVPGDIVEISVGDKIPADVRILQIYSTTLRIDQSILTGESVSVIKHTDPIPDPRAVNQDKKNILFSGTNISAGKCKGIAIGTGLNTAIGKIRDEMMETETEKTPLQQKLDEFGTQLSKVITIICICVWAINIGHFNDPAHGGSWMKGAIYYFKIAVALAVAAIPEGLPAVITTCLALGTRRMAKKNAIVRSLPSVETLGCTSVICSDKTGTLTTNQMSVCKMFVFNKVEGNGIQTQQFEITGSTYAPEGDVYLGGKKVKTCDYEGLEEMATICAMCNDSSVDYNDTKGLYEKVGEATETALTVLCEKMNFFNTSRGGMSLREQGTVCNHVIQQMWSKEFTLEFSRDRKSMSVFCTPNKPTKVPGGSKMFAKGAPEGLLDRCTHVRVGKDKVPMSPAIKNEIMKYTKIYGTGRDTLRCLALATIDAPPRREDMDLEDARKFIQYETNMTFVGVVGMLDPPRMEVFDSIKNCRKAGIRVIVITGDNKATAEAICRRIGVFGENESTEGMSYTGREFDDLSPEEQRLAVMKSRLFARVEPAHKSKIVEYLQGEGEISAMTGDGVNDAPALKKAEIGIAMGSGTAVAKSASEMVLADDNFATIVSAVEEGRAIYNNMKQFIRYLISSNIGEVVCIFLTAALGIPEALIPVQLLWVNLVTDGLPATALGFNPPDMDIMKKPPRNAKEGLITGWLFFRYMAIGGYVGCATVGAAAWWFMVYDKGPQLNYYQLTHHMQCLAEPKMFPGIDCKIFGAPEPMTMALSVLVTIEMLNALNSLSENQSLLVMPPWCNKWLLGAMALSMGLHFCILYIDIMSTIFQITPLGFEEWFAVLKISFPVILIDETLKFFCARKFTDA

SEQ ID NO: 22473 - protein, 1020 aa, Procambarus clarkii
MDDAHCFPVEDVVAKFGVNIENGLSASQVKDYQAKYGPNELPAEEGKSLLQLILEQFYDLLVKILLLAAIISFVLACFEEGEETVTAFVEPFVILLILIANAIVGVWQERNAESAIEALKEYEPEMGKVVRSNKHGVQKVRAREIVPGDIVEVSVGDKIPADIRLVKIFSTTLRIDQSILTGESVSVIKHADAIPDPKAVNQDKKNILFSGTNVSAGKARGVVIGTGLATAIGKIRTQMAETEEIKTPLQQKLDEFGEQLSKVISIICVAVWAINIGHFNDPAHGGSWIKGAIYYFKIAVALAVAAIPEGLPAVITTCLALGTRRMAKKNAIVRSLPSVETLGCTSVICSDKTGTLTTNQMSVSRMFIMDKVEGNDSSLLEFEVTGSTYEPIGDVYLKNTKVKGSDFEGLQELSTISFMCNDSSIDFNEFKNVFEKVGEATETALIVLGEKINPYNMSKSGLDRRSAAIIARHDMETKWKKEFTLEFSRDRKSMSSYCVPLKPTRLGTGPKMFCKGAPEGVLDRCTHVRVGTQKVPLTAGVKEKILSVTRDYGCGRDTLRCLGLATIDNPMKPEDMDLGEASKFYTYEVNMTFVGVVGMLDPPRKEVKDSIQRCRDAGIRVIVITGDNKATAEAICRRIGVFKEDEDTTGMSYSGREFDELSPEEQRQACIRSRLFSRVEPFRKSKIVEYLQGENEISAMTGDGVNDAPALKKAEIGIAMGSGTAVAKSASEMVLADDNFSSIVAAVEEGRAIYNNMKQFIRYLISSNVGEVVSIFLTAALGLPEALIPVQLLWVNLVTDGLPATALGFNPPDLDIMDKPPRRADESLISGWLFFRYMAIGGYVGAATVFAASWWFMYDPTGPHLNYYQLSHHLQCLGDPENFEGLDCNIFSHPAPMTMALSVLVTIEMLNALNSLSENQSLLIMPPWVNFWLLAAMALSMTLHFIILYIDILSTVFQVMPLSVAQWVAVLKISFPVLLLDETLKFIARNYTDGENNLYKCHWIVLAWATYFAYIKIYFF

SEQ ID NO: 22474 - protein, 1002 aa, Procambarus clarkii
MDDAHCFPVEDVVAKFGVNIENGLSASQVKDYQAKYGPNELPAEEGKSLLQLILEQFDDLLVKILLLAAIISFVLACFEEGEETVTAFVEPFVILLILIANAIVGVWQERNAESAIEALKEYEPEMGKVVRSKKHGVQKVRAREIVPVDIVEVSVGDKIPADIRLVKIFSTTLRIDQSILTGESVSVIKHTDAIPDPKAVNQDKKNILFSGTNVSAGKARGVVIGTGLATAIGKIRTQMAETEEIKTPLQQKLDEFGEQLSKVISIICVAVWAINIGHFNDPAHGGSWIKGAIYYFKIAVALAVAAIPEGLPAVITTCLALGTRRMAKKNAIVRSLPSVETLGCTSVICSDKTGTLTTNQMSVSRMFIMDKVEGNDSSLLEFEVTGSTYEPIGDVYLKNTKVKGSDFEGLQELSTISFMCNDSSIDFNEFKNVFEKVGEDTETALIVLGEKINPYNMSKSGLDRRSAAIIARHDMETKWKKEFTLEFSRDRKSMSSYCVPLKPTRLGTGPKMFCKGAPEGVLDRCTHVRVGTQKVPLTAGVKEKILSVTRDYGCGRDTLRCLGLATIDNPMKPEDMDLGEASKFYTYEVNMTFVGVVGMLDPPRKEVKDSIQRCRDAGIRVIVITGDNKATAEAICRRIGVFKEDEDTTGMSYSGREFDELSPEEQRQACIRSRLFSRVEPFHKSKIVEYLQGENEISAMTGDGVNDAPALKKAEIGIAMGSGTAVAKSASEMVLADDNFSSIVAAVEEGRAIYNNMKQFIRYLISSNVGEVVSIFLTAALGLPEALIPVQLLWVNLVTDGLPATALGFNPPDLDITDKPPRRADESLISGWLFFRYMAIGGYVGAATVFAASWWFMYDPTGPHLNYYQLPHHLQCLGDPENFEGLDCNIFSHPAPMTMALSVLVTIEMLNALNSLSENQSLLIMPPWVNFWLLAAMALSMTLHFIILYIDILSTVFQVMPLSVAQWVAVLKISFPVLLLDETLKFIARNYTDVPEQIKQQW

SEQ ID NO: 22475 - protein, 185 aa, Talaromyces emersonii
  unsure (1)..(185): unsure at all Xaa locations
SVKMLTGXAIAIAKETCKMLALGTKVYNSERLIHGGLTGSRVHDLVERADGFAEVFPEHKYQVVEMLQQRGHLTAMTGDGVNDAPSLKKSDCGIAVEGATEAAQAAADIVFLAPGLSTIVDSIKVARQIFQRMKAYIQYRIALCLHLEIYLVTSMIIINETIRADLIVFIALFADLATIAVAYDN

SEQ ID NO: 22476 - protein, 954 aa, Kosteletzkya virginica
MASSKGISLEEIRNETVDLEKIPIEEVFEQLKCTKEGLSSEEGANRLQIFGPNKLEEKKESKILKFLGFMWNPLSWVMEAAAIMAIALANGEGKPPDWQDFVGIVCLLVINSTISFIEENNAGNAAAALMAGLAPKTKVLRDGKWSEQEAAILVPGDIISVKLGDIIPADARLLEGDPLKVDQSALTGESLPVTKHPGQEVFSGSTCKQGEIEAVVIATGVHTFFGKAAHLVDSTNQVGHFQKVLTAIGNFCICSIAVGMLVEIIVMYPIQHRKYRDGIDNLLVLLIGGIPIAMPTVLSVTMAIGSHRLSQQGAITKRMTAIEEMAGMDVLCSDKTGTLTLNKLTVDKNLIEVFVKDGDKDHVLLLAARASRVENQDAIDAAIVGTLADPREARASITEVHFLPFNPVDKRTAITYIDSNGNWHRASKGAPEQILALCNAKEDFKKKVHSIIDKFAERGLRSLAVSRQQVPEKSKESAGAPWQFVGLLSLFDPPRHDSAETIRQTLHLGVNVKMITGDQLAIAKETGRRLGMGTNMYPSASLLGQDKDANIAALPVEELIEKADGFAGVFPEHKYEIVKKLQERKHICGMTGDGVNDAPALKKADIGIAVADATDAARSASDIVLTEPGLSVIISAVLTSRAIFQRMKNYTIYAVSITIRIVFGFLFIALIWKFDFSPFMVLIIAILNDGTIMTISKDRVKPSPLPDSWKLKEIFATGIVLGGYLALMTVIFFWAMHDTDFFSEKFSVRSLRGSENEMMGALYLQVSIVSQALIFVTRSRSWSYAERPGLLLLSAFIIAQLVATLIAVYANWGFARIKGIGWGWAGVIWLYSIVFYVPLDFIKFAIRYILSGKAWLTLFENKTAFTTKKDYGKEEREAQWALAQRTLHGLQPPETSNLFHEKNSYRELSEIAEQAKRRAEVARLRELHTLKGHVESVVKLKGLDIDTIQQHYTV

SEQ ID NO: 22477 - protein, 241 aa, Kosteletzkya virginica
DKTGTLTLNKLTVDRTLIEVFTKGVEKEHVLLYAARASRIENQDAIDAAIVGMLADPKEARAGIREIHFLPFNPVDKRTALTYIDSDGNWHRASKGAPEQILDLCHCKEDVRRKVHSVIDKFAERGLRSLAVARQQVPEKSKDAPGAPWQLIGLFPLFDPPRHDSAETIRRALNLGVNVKMITGDQLAIAKETGRRLGMGTNMYPSSSLLGQDKDASIASLPVDELIEKADGFAGVFPEHK

SEQ ID NO: 22478 - protein, 1000 aa, Heliothis virescens
MEDAHSKSVDEVLGYFGTDPDKGLSADQVKRNQDKYGPNELPAEEGKSIWQLVLEQFDDLLVKILLLAAIISFVLALFEEHEDAFSAFVEPFVILLILIANAVVGVWQERNAESAIEALKEYEPEMGKVIRGDKSGVQKIRAKEIVPGDVVEVSVGDKIPADIRLIKIYSTTIRIDQSILTGESVSVIKHTDPIPDPRAVNQDKKNILFSGTNVAAGKARGIVIGTGLNTAIGKIRTEMSETEEIKTPLQQKLDEFGEQLSKVISVICVAVWAINIGHFNDPAHGGSWIKGAVYYFKIAVALAVAAIPEGLPAVITTCLALGTRRMAKKNAIVRSLPSVETLGCTSVICSDKTGTLTTNQMSVSRMFIFEKIEGGDSSFLEFEITGSTYEPIGDVYLKGQKIKAAEFDALHELGTICVMCNDSAIDFNEFKQAFEKVGEATETALIVLAEKMNPFNVPKTGLDRRSCAIVVRQEIETKWKKEFTLEFSRDRKSMSTYCTPLKPSRLGNGPKLFVKGAPEGVLERCTHARVGTAKVPLNSTLKNRILDLTRQYGTGRDTLRCLALATADSPLKPDEMDLGDSTKFYTYEVNLTFVGVVGMLDPPRKEVFDSIVRCRAAGIRVIVITGDNKATAEAICRRIGVFTEEEDTTGKSFSGREFDDLPVSEQRAACAKARLFSRVEPAHKSKIVEFLQSMNEISAMTGDGVNDAPALKKAEIGIAMGSGTAVAKSAAEMVLADDNFSSIVAAVEEGRAIYNNMKQFIRYLISSNIGEVVSIFLTAALGLPEALIPVQLLWVNLVTDGLPATALGFNPPDLDIMDKPPRKADEGLISGWLFFRYMAIGGYVGAATVGAASWWFMYSPFGPQMSYWQLTHHLQCLSGGDEFKGIDCKIFTDPHPMTMALSVLVTIEMLNAMNSLSENQSLVTMPPWSNMWLVGSMALSFTLHFVILYVEVLSAVFQVTPLSIDEWVTVMKFSIPVVLLDEVLKFVARKISDAQPTWKL

SEQ ID NO: 22479 - protein, 1136 aa, Plasmodium yoelii yoelii
  unsure (1)..(1136): unsure at all Xaa locations
MENILKYAHIYNVEDVLRAVKVDENRGLSENEIRKRIMQYGFNELEVEKKKGILELILNQFDDLLVKILLLAAFVSFALTLLDMKDNEVALCDFIEPVVILMILILNAAVGVWQECNAEKSLEALKQLQPTKAKVLRDGKWEIIDSKYLTVGDIIELSVGNKTPADARIVKIFSTSIKAEQSMLTGESCSVDKYVEKLDESLKNCEIQLKKNILFSSTAIVAGRCTAVVIKIGMNTEIGNIQHAVIESNNEETDTPLQIKIDSFGKQLSKIIFIICVTVWIINFKHFSDPIHESFLYGCLYYFKISVALAVAAIPEGLPAVITTCLALGTRRMVKKNAIVRKLQSVETLGCTTVICSDKTGTLTTNQMTATVFHIFRESNTLKEYQLCQRGDTFFFYETNQDDENDSFFNKLKESPNNESSYKKKISKNIIDDDDDDTDYEREPLINMKSNVNTIISRGSKIIDDKINKYIYSDFDYHFYMCLCNCNEASILCNVNNKIVKTFGDSTELALLHFVHNFNILPNNTKNNKISMEYEKINNITKQNSDLNGGHDSSTYKKNKISDKKSEPTFPSKCVSAWRNECTIMRIIEFTRERKLMSVVVENSKNEYILYCKGAPENIINRCKYYMSKNDIRPLTDSLKNEILNKIKNMGKRALRTLSFAYKKVKSNDINIKNSEDYYKLEHDLIYIGGLGIIDPPRKYVGKAISLCHLAGIRVFMITGDNIDTAKAIAKEINILNHDDTDKYSCCFNGREFEDLPLEKQKYILKNYQQIVFCRTEPKHKKNIVKILKDLGETVAMTGDGVNDAPALKSADIGIAMGINGTQVAKEASDIILADDNFNTIVEAIKEGRCIYNNMKAFIRYLISSNIGEVASIFITAILGIPDSLAPVQLLWVNLVTDGLPATALGKRRPTLITTFLPRFSPRFCSVFTPFSLLTTSHHFSLLRIQPPRARRNEVQAPTQKRQFNKRANPAXIHSHRNIYMDNHTLINFYQLSHYNQCKTWSNFNVNKVYDMSEDLCSYFSAGKVKASTLSLSVLVLIEMFNALNALSEYNSLFVLPPWRNMYLVLATIGSLFLHCLIIYFPPLAGIFGVVPLTLHDWFLVFLWSFPVIIIDEIIKFYAKKQLNKELGYGQKLKTQ

SEQ ID NO: 22480 - protein, 1467 aa, Plasmodium yoelii yoelii
MSSEKQSVIPNRANIKGEVNNNPNNQINDVSNSPINNNSSIVENGQDTVETNKNSVNTNIQNDKIGEKNVNEHSMPQKRRPTERERRTQRIEKAKTEKVDAGRRRGERDRAENKKEENKKEENKKEENKKEENKKEENKKEENKKEENKKEENKKEENKGEENKGEENKGEEKKGEEKKGEEKKGEEKKGEEMDKKAEKVDAEKVDAEKKEEENKGEENKGEEMDKSEKVDAEKKGDEQKGDEKKGDEKKGDEKKGDEGGKNEKEDGEETDNKEMLGKAKLEEENQLVESNVEKEEGYRNHYASESIENLCKEFDLADVNTGLNFEQVKINRERYGENHIEKDSITPIWLIFLSQYYSPVVMLLLIAALASLALNEVVEGISIITIVTLNACLATYMEKSSGDAIAKLAEMASPQCTVLRNGQKMIIPSRDVVVGDVVVITAGDSISADLRLIEVIELKTNESLLTGESEDIKKSLVPTDYTTPFCTNLCFATTSVTNGCGKGIVISTGLNTQVGKIASQLKKSSEGSKLTPLQVSLNRLGGLIGLIAIIVLMFIITLAILINYRDPAHADKDPLLVIIIIGVGFAVSSVPEGLPMVVTITLSAGAKDMVRKNANVRKLPAVETLGCCSVICSDKTGTLTEGKMTAINIVTFCKNSKLHDKNELTKTYDFYPTKGFDPSGGIFDSLELTSEIKKKIVLAKNKNISYDSILKNYGNPENKNLNVYKTRSLMLAAYLNSYDTTLSKNLKTGKWEIQGNMSEGPIVVAAAKAGYNIFNDSENDSENYLKKFKRLEDLEITFNSSRKMKVIFYKLIENNKFENINLKNHQKNVTYTHIAFIKGAPDKLIDISTNLLKETQEEIQVSWDKQINENEKLILTNKNIELSQKALRVLAVCIKPLTDKQIEQLRTYEDADERLQFIKTDEQGGFIPLGYIASFDPPRSGVKEAIQTCRNAQVKVIMITGDQKTTAIAIGKLIGLINNKKSEDEIRDNEQHGVDNNGSSSSNGDMIQAIECSELHINKNPNEPILPDDELDKFVDNILIYSRAQPEDKITIVQSLKRKGYLVAMTGDGVNDAPALKAADIGVAMGINGTEVAKGASEMILIDDNFCTVVSAIDVGRTIYSNIQKFVCFLLGTNIGEILYLSISIITQMPFPLEALQILFLNLMTDGCPAVALSREPPNADNMKTPPRPKKQPIMTKKWWLYGIIPHTIFEAICVLLSLAFSLYICTGSYTLNDIHNSCKTVNIQNASNPSESFEYKYFCSTYEYRVSPDYIGWITNLNFWDPRENKPVTFWGAAKGKIKNITPTHESIHQDIRIIMQDGCLGNLEEDEYGWCKPPSNVTAQSNDEHINGTFNKHFEDISSKGSKRGRTIAFISAVWCEMLRAYTVRSWEPFYKVFNRNMWMHLACSISATMTFLATCIPGITAILNTTCLLWWQYLFGIFWAMVNLILDEIIPKVIYRRKYMSIKN

SEQ ID NO: 22481 - protein, 1003 aa, Halocynthia roretzi
METSFAKSKEEVLDYFGVSETKGLSLDQVKENQEKYGKNELPAEEGKSVWEMLVEQFEDLLVRILLLAAIISFVLALFEDSEETITAFVEPLVILLILIANAVVGVWQERNAESAIEALKEYEPEMGKVLRQDRASVQRIRAKEIVPGDIVEVAVGYKVPADIRLISIKSTTLRVDQAILTGESVSVIKHTDCVPDLRAVNQDKKNMLFSGTNIAAGKATGIVIGTGSQTEIGKIRNEMAETENEKTPLQQKLDEFGEQLSKIITLICIAVWAINIGHFNDPVHGGSWIKGAVYYFKIAVALAVAAIPEGLPAVITTCLALGTRRMAKKNAIVRSLPSVETLGCTSVICSDKTGTLTTNQMSVCRMFVCKNIDSENNANFHQFTVAGSTYEPVGDVMIDGKKVNPGSFDALAELSTICALCNDSSLDFNENKGIYEKVGEATETALTVLCEKLNVFKTDVSGMSKAQRANACNQVIKNIMKKVFTLEFSRDRKSMSAYCEPSNPESPIGAKMFVKGAPEGILDRCTHVRIGNQKIWMTASIREQIMKLIKEYGTGRDTLRCLALGTIDNPPNPDQMDLTESTKFAQYESAITFVGVVGMLDPPRTEVFQAIQECKAAGIRVIVITGDNKATAEAICRRIGIFGEDECTEGLAYTGREFDDLSEEEQFQACLRARLFARVEPSHKSKIVGYLQRNGDVTAMTGDGVNDAPALKKAEIGIAMGSGTAVAKTAAEMVLADDNFTSIVSAVEEGRAIYNNMKQFIRYLISSNIGEVVCIFLAAALGVPEALIPVQLLWVNLVTDGLPATALSFNPPDLDIMNKQPRSTKDNLINGWLLCRYCVIGGYVGAATVGASTWWFVMAETGPQMSWWQVTHYMQCLTNPELFEGISCKIFVDPHPMTMALSVLVIIELCNALNSISENQSIIVMPPWRNMWLIGAIMLSLSLHFVILHVDPFPMVFQICPLSFTEWMMVLKISLPVIFIDEILKYVARNYIENESIAEKKTQ

SEQ ID NO: 22482 - protein, 898 aa, Escherichia coli O157:H7
MFKEIFTRLIRHLPSRLVHRDPLPGAQQTVNTVVPPSLSAHCLKMAVMPEEELWKTFDTHPEGLNQAEVESAREQHGENKLPAQQPSPWWVHLWVCYRNPFNILLTILGAISYATEDLFAAGVIALMVAISTLLNFIQEARSTKAADALKAMVSNTATVLRVINDKGENGWLEIPIDQLVPGDIIKLAAGDMIPADLRILQARDLFVAQASLTGESLPVEKAATTRQPEHSNPLECDTLCFMGTTVVSGTAQAMVIATGANTWFGQLAGRVSEQESEPNAFQQGISRVSMLLIRFMLVMAPVVLLINGYTKGDWWEAALFALSVAVGLTPEMLPMIVTSTLARGAVKLSKQKVIVKHLDAIQNFGAMDILCTDKTGTLTQDKIVLENHTDISGKTSERVLHSAWLNSHYQTGLKNLLDTAVLEGTDEESARSLASRWQKIDEIPFDFERRRMSVVVAENTEHHQLVCKGALQEILNVCSQVRHNGEIVPLDDIMLRKIKRVTDTLNRQGLRVVAVATKYLPAREGDYQRADESDLILEGYIAFLDPPKETTAPALKALKASGITVKILTGDSELVAAKVCHEVGLDAGEVVIGSDIETLSDDELANLAQRTTLFARLTPMHKERIVTLLKREGHVVGFMGDGINDAPALRAADIGISVDGAVDIAREAADIILLEKSLMVLEEGVIEGRRTFANMLKYIKMTASSNFGNVFSVLVASAFLPFLPMLPLHLLIQNLLYDVSQVAIPFDNVDDEQIQKPQRWNPADLGRFMIFFGPISSIFDILTFCLMWWVFHANTPETQTLFQSGWFVVGLLSQTLIVHMIRTRRVPFIQSCASWPLMIMTVIVMIVGIALPFSPLASYLQLQALPLSYFPWLVAILAGYMTLTQLVKGFYSRRYGWQ

SEQ ID NO: 22483 - protein, 994 aa, Rana esculenta
MEQAHTKTTEECLAYFGVNENTGLSLDQVKKNFDKFGPNELPAEEGKSLWELVAEQFEDLLVRILLLAAIISFVLAWFEEGEETVTAFVEPFVILLILIANAVVGVWQERNAEDAIEALKEYEPEMGKVYRSDRKSVQRIKARELVPGDIVEVAVGDKVPADIRLISIKSTTLRIDQSILTGESVSVIKHTEVVPDTRAVNQDKKNMLFSGTNVGAGKAVGVVIATGPNTEIGKIRDEMAATEQEKTPLQQKLDEFGEQLSKVISLICVAVWLINIGHFNDPIHGGSWIKGAIYYFKIAVALAVAAIPEGLPAVITTCLALGTRRMAKKNAIVRSLPSVETLGCTSVICSDKTGTLTTNQMSVCRMFVIDKVEGDVTSLNEFTITGSTYAPEGDVQKNDKNVKAGQYDGLVELATICALCNDSSLDFNESKGVFEKVGEATETALTTLVEKMNVFNTDVKSLSKVERANACNSVIKQLMKKEFTLEFSRDRKSMSVYCIPAKASRAAVGNKMFVKGAPEGVIDRCNYVRVGTTRVPLTSAIKDKILSVVKEWGTGRDTLRCLALATRDTPPKREDMVLDEATRFIEYETDLTFVGCVGMLDPPRKEVMGSIQLCREAGIRVIMITGDNKGTAIAICRRIGIFGEDDDVSGRAFTGREFDDLPPAEQREACKRASCFARVEPAHKSKIVEFLQSFDEITAMTGDGVNDAPALKKAEIGIAMGSGTAVAKTASEMVLADDNFSTIVAAVEEGRAIYNNMKQFIRYLISSNVGEVVCIFLTAALGLPEALIPVQLLWVNLVTDGLPATALGFNPPDLDIMDRPPRSPKEPLISGWLFFRYMAIGGYVGAATVGAAAWWFMYADDGPNVTFYQLSHFMQCTEDNPDFEGHECEIFESPVPMTMALSVLVTIEMCNALNSLSENQSLIRMPPWSNFWLLGSICLSMSLHFLILYVEPLPMIFKLTPLNVEQWFIVLKMSFPVILLDELLKFVARNYLEG

SEQ ID NO: 22484 - protein, 902 aa, Salmonella enterica subsp. enterica serovar Typhi
MLKTITRQLFARLNRHLPYRLVHRDPLPGAQTAVNATIPPSLSERCLKIAAMEQETLWRVFDTHPEGLNAAEVTRAREKHGENRLPAQKPSPWWVHLWVCYRNPFNILLTILGGISYATEDLFAAGVIALMVGISTLLNFVQEARSTKAADALKAMVSNTATVLRVINENGENAWLELPIDQLVPGDIIKLAAGDMIPADLRIIQARDLFVAQASLTGESLPVEKVATTREPRQNNPLECDTLCFMGTNVVSGTAQAVVMATGADTWFGQLAGRVSEQDNEQNAFQKGISRVSMLLIRFMLVMAPVVLIINGYTKGDWWEAALFALSVAVGLTPEMLPMIVTSTLARGAVKLSKQKVIVKHLDAIQNFGAMDILCTDKTGTLTQDKIMLENHTDISGKPSEHVLHCAWLNSHYQTGLKNLLDTAVLEGVDETAARQLSGRWQKIDEIPFDFERRRMSVVVAEDSNVHQLVCKGALQEILNVCTQVRHNGDIVPLDDNMLRRVKRVTDTLNRQGLRVVAVATKYLPAREGDYQRIDESDLILEGYIAFLDPPKETTAPALKALKASGITVKILTGDSELVAAKVCHEVGLDAGDVVIGSDIEGLSDDALAALAARTTLFARLTPMHKERIVTLLKREGHVVGFMGDGINDAPALRAADIGISVDGAVDIAREAADIILLEKSLMVLEEGVIEGRRTFSNMLKYIKMTASSNFGNVFSVLVASAFLPFLPMLPLHLLIQNLLYDVSQVAIPFDNVDEEQIQKPQRWNPADLGRFMVFFGPISSIFDILTFCLMWWVFHANTPETQTLFQSGWFVVGLLSQTLIVHMIRTRRLPFIQSRAAWPLMAMTLLVMVVGVSLPFSPLASYLQLQALPLSYFPWLIAILAGYMTLTQLVKGFYSRRYGWQ

SEQ ID NO: 22485 - protein, 908 aa, Salmonella enterica subsp. enterica serovar Typhi
MTDMNIENRKLNRPASENDKQHKKVFPIEAEAFHSPEETLARLNSHRQGLTIEEAGERLKVYGRNEVAHEQVPPVLVQLLQAFNNPFIYVLMALAGVSFITDYWLPLRRGEETDLTGVLIILTMVSLSGLLRFWQEFRTNRAAQALKKMVRTTATMLRRGPGNIGAVQEEIPIEELVPGDVVFLAAGDLVPADVRLLASRDLFISQLILSGESLPVEKYDVMADVAGKDSEQLPDKDKSLLDLGNICLMGTNVTSGRAQAVVVATGSRTWFGSLAKSIVGTRTQTAFDRGVNSVSWLLIRFMLIMVPVVLLINGFSKGDWVEASLFALAVAVGLTPEMLPMIVSSNLAKGAIAMSRRKVIVKRLNAIQNFGAMDVLCTDKTGTLTQDNIFLEHHLDVSGVKSSRVLMLAWLNSSSQSGARNVMDRAILRFGEGRIAPSTKARFIKRDELPFDFVRRRVSVLVEDAQHGDRCLICKGAVEEMMMVATHLREGDRVVALTETRRELLLAKTEDYNAQGFRVLLIATRKLDGSGNNPTLSVEDETELTIEGMLTFLDPPKESAGKAIAALRDNGVAVKVLTGDNPVVTARICLEVGIDTHDILIGTQVEAMSDAELASEVEKRAVFARLTPLQKTRILQALQKNGHTVGFLGDGINDAPALRDADVGISVDSAADIAKESSDIILLEKDLMVLEEGVIKGRETFGNIIKYLNMTASSNFGNVFSVLVASAFIPFLPMLAIHLLIQNLMYDISQLSLPWDKMDKEFLRKPRKWDAKNIGRFMLWIGPTSSIFDITTFALMWYVFAANNVEAQALFQSGWFIEGLLSQTLVVHMLRTQKIPFIQSRATLPVLLTTGLIMAIGIYIPFSPLGAMVGLEPLPLSYFPWLVATLLSYCLVAQGMKRFYIKRFGQWF

SEQ ID NO: 22486 - protein, 997 aa, Felis catus
MENAHTKTVEEVLGYFGVNESTGLSLEQVKKLKERWGSNELPAEEGKTLLELVIEQFEDLLVRILLLAACISFVLAWFEEGEETITAFVEPFVILLILVANAIVGVWQERNAENAIEALKEYEPEMGKVYRQDRKSVQRIKAKDIVPGDIVEIAVGDKVPADIRLTSIKSTTLRVDQSILTGESVSVIKHTDPVPDPRAVNQDKKNMLFSGTNIAAGKAMGVVVATGVNTEIGKIRDEMVATEQERTPLQQKLDEFGEQLSKVISLICIAVWIINIGHFNDPVHGGSWIRGAIYYFKIAVALAVAAIPEGLPAVITTCLALGTRRMAKKNAIVRSLPSVETLGCTSVICSDKTGTLTTNQMSVCRMFILDKVEGDTCSLNEFTITGSTYAPIGEVHKDDKPVKCHQYDGLVELATICALCNDSALDYNEAKGVYKKFGEATETALTCLVEKMNVFDTELKGLSKIERANACNSVIKQLMKKEFTLEFSRDRKSMSVYCTPNKPSRTSMSKMFVKGAPEGVIDRCTHIRVGSTKVPMTPGVKQKVMSVIREWGSGSDTLRCLALATHDNPLRREEMNLEDSANFIKYETNLTFVGCVGMLDPPRIEVASSVKLCRQAGIRVIMITGDNKGTAVAICRRIGIFGQDEDVTSKAFTGREFDELSPSAQRDACLNARCFARVEPSHKSKIVEFLQSFDEITAMTGDGVNDAPALKKSEIGIAMGSGTAVAKTASEMVLADDNFSTIVAAVEEGRAIYNNMKQFIRYLISSNVGEVVCIFLTAALGFPEALIPVQLLWVNLVTDGLPATALGFNPPDLDIMNKPPRNPKEPLISGWLFFRYLAIGCYVGAATVGAAAWWFIAADGGPRVSFYQLSHFLQCKDDNPDFEGVDCAIFESPYPMTMALSVLVTIEMCNALNSLSENQSLLRMPPWENIWLVGSICLSMSLHFLILYVEPLPLIFQITPLNLTQWLMVLKISLPVILMDETLKFVARNYLEPAILE

SEQ ID NO: 22487 - protein, 783 aa, Ferroplasma acidarmanus
MIKSSDSLEDLFKKLNTSKAGLSGNEASSRLHTYGYNEVSEKKESSILKFLKKFWTPISWMLELTIIITFILGKYDDSLIILFLLIFNGVISFTQESKADNAVELLKKKLSAQARVLRDGKWNVIETKFLVPGDIVHLRLGDVVPADIKIIDDELEIDQSALTGESLSVTRKKGDTIYSSSVVKRGECNGLVTETGSKTYFGKTTELVEIAKTKSHIEELIMKIIKDLIAIDTILVIALILFSIYRGVDITEVIPFALVILIASIPVALPATFTIAMSLGALHMSKRGEIVTRLSAIEDAASMDTLCMDKTGTITENKLTIKTPKVYTGDELSLIKYASYASQRKSEDPIDDAILDYADLKSVKIDYANRSKFTPFDPSIKRTEAIINEAGKSVKIVKGAPQVISELTGNVPETYENDIKYFSSQGFRIISVAAGTDKLEILGVIPLYDPPRKDSRDLITELKQLSVSPVMITGDNSLIAEEVAGEIGLEKKLCNAENIKGNYAGASDCSVFAEVFPEDKYYIVKALQKSGHIVGMTGDGVNDSPALKQAEFGVAVASATDVAKASASVVLTHSGLTDIVDGIKSGRRIYQRMLTYTLNKIIKVIQIVFFLTLSFFVVGFFVTTAFDVILLIFANDFVTMAIATDNVGYSIKPERWNVNSLISSSVILAAFLVVESFIFLYIGLYAGLRISQIHTFIFDMLVFSGQFTVYMVRERKRFSNSMPSKILLLSSIVDIIIISFISYYGILVTAIPLKFILISIGLTFIWMVFMDTIKNVVFRHYKL

SEQ ID NO: 22488 - protein, 902 aa, Salmonella typhimurium LT2
MLKIITRQLFARLNRHLPYRLVHRDPLPGAQTAVNATIPPSLSERCLKVAAMEQETLWRVFDTHPEGLNAAEVTRAREKHGENRLPAQKPSPWWVHLWVCYRNPFNILLTILGGISYATEDLFAAGVIALMVGISTLLNFVQEARSTKAADALKAMVSNTATVLRVINENGENAWLELPIDQLVPGDIIKLAAGDMIPADLRIIQARDLFVAQASLTGESLPVEKVAATREPRQNNPLECDTLCFMGTNVVSGTAQAVVMATGAGTWFGQLAGRVSEQDNEQNAFQKGISRVSMLLIRFMLVMAPVVLIINGYTKGDWWEAALFALSVAVGLTPEMLPMIVTSTLARGAVKLSKQKVIVKHLDAIQNFGAMDILCTDKTGTLTQDKIVLENHTDISGKPSEHVLHCAWLNSHYQTGLKNLLDTAVLEGVDETAARQLSGRWQKIDEIPFDFERRRMSVVVAEDSNVHQLVCKGALQEILNVCTQVRHNGDIVPLDDNMLRRVKRVTDTLNRQGLRVVAVATKYLPAREGDYQRIDESDLILEGYIAFLDPPKETTAPALKALKASGITVKILTGDSELVAAKVCHEVGLDAGDVIIGSDIEGLSDDALAALAARTTLFARLTPMHKERIVTLLKREGHVVGFMGDGINDAPALRAADIGISVDGAVDIAREAADIILLEKSLMVLEEGVIEGRRTFSNMLKYIKMTASSNFGNVFSVLVASAFLPFLPMLPLHLLIQNLLYDVSQVAIPFDNVDEEQIQKPQRWNPADLGRFMVFFGPISSIFDILTFCLMWWVFHANTPETQTLFQSGWFVVGLLSQTLIVHMIRTRRLPFIQSRAAWPLMAMTLLVMVVGVSLPFSPLASYLQLQALPLSYFPWLIAILVGYMTLTQLVKGFYSRRYGWQ

SEQ ID NO: 22489 - protein, 908 aa, Salmonella typhimurium LT2
MTDMNIENRKLNRPASENDKQHKKVFPIEAEAFHSPEETLARLNSHRQGLTIEEASERLKVYGRNEVAHEQVPPALIQLLQAFNNPFIYVLMALAGVSFITDYWLPLRRGEETDLTGVLIILTMVSLSGLLRFWQEFRTNRAAQALKKMVRTTATVLRRGPGNIGAVQEEIPIEELVPGDVVFLAAGDLVPADVRLLASRDLFISQSILSGESLPVEKYDVMADVAGKDSEQLPDKDKSLLDLGNICLMGTNVTSGRAQAVVVATGSRTWFGSLAKSIVGTRTQTAFDRGVNSVSWLLIRFMLIMVPVVLLINGFSKGDWVEASLFALAVAVGLTPEMLPMIVSSNLAKGAIAMSRRKVIVKRLNAIQNFGAMDVLCTDKTGTLTQDNIFLEHHLDVSGVKSSRVLMLAWLNSSSQSGARNVMDRAILRFGEGRIAPSTKARFIKRDELPFDFVRRRVSVLVEDAQHGDRCLICKGAVEEMMMVATHLREGDRVVALTETRRELLLAKTEDYNAQGFRVLLIATRKLDGSGNNPTLSVEDETELTIEGMLTFLDPPKESAGKAIAALRDNGVAVKVLTGDNPVVTARICLEVGIDTHDILTGTQVEAMSDAELASEVEKRAVFARLTPLQKTRILQALQKNGHTVGFLGDGINDAPALRDADVGISVDSAADIAKESSDIILLEKDLMVLEEGVIKGRETFGNIIKYLNMTASSNFGNVFSVLVASAFIPFLPMLAIHLLIQNLMYDISQLSLPWDKMDKEFLRKPRKWDAKNIGRFMLWIGPTSSIFDITTFALMWYVFAANNVEAQALFQSGWFIEGLLSQTLVVHMLRTQKIPFIQSRATLPVLLTTGLIMAIGIYIPFSPLGAMVGLEPLPLSYFPWLVATLLSYCLVAQGMKRFYIKRFGQWF

SEQ ID NO: 22490 - protein, 1200 aa, Mus musculus
MAVVGNAVPCGARPGGARDNGSPQPGSRLRPGLAAGPALIANGDELVAAVWPYRRLALLRRLTVLPFAGLLYPAWLGAAASGCWGWGSSWTQIPEAALLALATICLAHALTVLSGHWSVHAHCALTCTPEYDPNKVTFVKVVPTPNNGSTELVALHRDKGEDGLEVLSFEFQKIKYSYDALEKKQFLSVAFPVGNAFSYYQSNRGFQEDSEIRAAEKKFGSNKAEMVVPDFSELFKERATAPFFVFQVFCVGLWCLDEYWYYSVFTLSMLVAFEASLVQQQMRNMSEIRKMGNKPHMIQVYRSRKWRPVASDDIVPGDIVSIGRSPQENLVPCDVLLLRGRCIVDEAMLTGESVPQMKEPIEDLSPDRVLDLQADARLHVIFGGTKVVQHIPPQKATSGLKPVDNGCVAFVLRTGFNTSQGRLLRTILFGVKRVTANNLETFIFILFLLVFAIAAAAYVWVEGTKDPSRNRYKLFLECTLILTSVVPPELPIELSLAVNTSLIALAKLYMYCTEPFRIPFAGKVEVCCFDKTGTLTSDSLVVRGVAGLRDGKEVTPVSSIPIETHRALASCHSLMQLDDGTLVGDPLEKAMLTAVDWTLTKDEKVFPRSIKTQGLKIHQRFHFASALKRMSVLASYEKLGSTDLCYIAAVKGAPETLHSMFSQCPPDYHHIHTEISREGARVLALGYKELGHLTHQQAREIKREALECSLKFVGFIVVSCPLKADSKAVIREIQNASHRVVMITGDNPLTACHVAQELHFIDKAHTLILHPPSEKGQPCEWRSIDSSIVLPLTLGSPKALALEHALCLTGDGLAHLQAVDPQQLLCLIPHVQVFARVAPKQKEFVITSLKELGYVTLMCGDGTNDVGALKHADVGVALLANAPERVVERRRRPRDSPVLSNSGPRVSRSTKQKSALLSPEEPPASHRDRLSQVLRDLEEESTPIVKLGDASIAAPFTSKLSSIQCICHVIKQGRCTLVTTLQMFKILALNALILAYSQSVLYLEGVKFSDFQATLQGLLLAGCFLFISRSKPLKTLSRERPLPNIFNLYTILTVMLQFSVHFLSLVYLYREAQARSPEKQEQFVDLYKEFEPSLVNSTVYIMAMAMQMATFAINYKGPPFMESLPENKPLVWSLAVSLLAIIGLLLGSSPDFNSQFGLVDIPVEFKLVIGQVLALDFCLALLADRVLQFFLGTPKLRVPS

SEQ ID NO: 22491 - protein, 1169 aa, Mus musculus
MSADSSLLMGSTPPSYGTLTTGTSIDPLSSSASSVRLSGYCGSPWRAIGYHAAVWMLAGIPWLLFRWKPLWGVRLRLKPCSLAHAETLVIEIKDKEGSSRQLFTVQVQTEALVQGSLELPPQAQAEDGRSQAAVGVTPEGTWQDTSELHRQEEAKQVLRYYVLQGQRYVWMETQQAFCQVSLLDHSRTCDDVHCSSSGLSLQDQATRKTIYGPNVISIPVKSYLQLLADEALNPYYGFQAFSIALWLADHYYWYALCIFLISAISICLALYKTRKQSLTLRDMVKLSVRVQVCRPGGEEEWVDSSELVPGDCLVLPQEGGVMPCDAALVAGECVVNESSLTGESTPVLKTALPEGPKPYCPETHRRHTLFCGTLILQARAYVGPRVLAVVTRTGFCTAKGGLVSSILHPRPISFKFYKHSMKFVAALSVLALLGTVYSIVILYRNRVPVREIVIRALDLVTVVVPPALPAAMTVCTLYAQSRLRAQGIFCIHPLRINLGGKLRLVCFDKTGTLTEDGLDVMGVVPLKGQVLLPLVPEPRHLPLGPLLRALATCHALSQLHDTPVGDPMDLKMVESTGWVLEEGPAAGSAPGSQVLVVMRPPPGGPRQQEEPPVPVSVLCRFPFSSALQRMDVVVTWPGATQPEAYVKGSPELVASLCSPETVPSDFSQVLQSYTAAGYRVVALAGKPLPIAPSLEAAQQLTRDTVERELSLLGLLVMRNLLKPQTAPVIQTLRKTGIRTVMVTGDNLQTAVTVARACGMVGAQEHLAVIHATHPEQGQPAALEFLPTESSAVMNGAKATGYPTVPEPQFCHLALSGSTFAVLRKHFPKLLPKVLVQATVFARMAPEQKTELVCELQRLQYCVGMCGDGANDCGALKAADVGISLSQAEASVVSPFTSSMASIECVPTVIREGRCSLDTSFSVFKYMALYSLTQFISVLILYTINTNLGDLQFLAIDLVITTTVAVLMSRTGPALTLVRARPPGALLSVPVLGSLLLQVALVAGIQLGGYFLVIAQPWFVPLNRTVPAPDNLPNYENTVVFSLSGFQYLILAAAVSKGAPFRQPLYTNVPFLVALALLGSVLVGLILVPGLLQGPLGLRNIVDSSFKLLLLGLVAFNFVGAFMLESVLDQCLPACLRWLRPKRASKKQFKRLQQELAEHPWPTLPVGSVR

SEQ ID NO: 22492 - protein, 1169 aa, Mus musculus
MSADSSLLMGSTPPSYGTLTTGTSIDPLSSSASSVRLSGYCGSPWRAIGYHAAVWMLAGIPWLLFRWKPLWGVRLRLKPCSLAHAETLVIEIKDKEGSSRQLFTVQVQTEAVVQGSLELPPQAQAEDGRSQAAVGVTPEGTWQDTSELHRQEEAKQVLRYYVLQGQRYVWMETQQAFCQVSLLDHGRTCDDVHCSSSGLSLQDQATRKTIYGPNVISIPVKSYLQLLADEALNPYYGFQAFSIALWLADHYYWYALCIFLISAISICLALYKTRKQSLTLRDMVKLSVRVQVCRPGGEEEWVDSSELVPGDCLVLPQEGGVMPCDAALVAGECVVNESSLTGESTPVLKTALPEGPKPYCPETHRRHTLFCGTLILQARAYVGPRVLAVVTRTGFCTAKGGLVSSILHPRPISFKFYKHSMKFVAALSVLALLGTVYSIIILYRNRVPVREIVIRALDLVTVVVPPALPAAMTVCTLYAQSRLRTQGIFCIHPLRINLGGKLRLVCFDKTGTLTEDGLDVMGVVPLKGQVLLPLVPEPCHLPLGPLLRALATCHALSQLHDTPVGDPMDLKMVESTGWVLEEGPAAGSAPGSQVLVVMRPPPGGPRQQEEPPVPVSVLCRFPFSSALQRMDVVVTWPGATQPEAYVKGSPELVASLCSPETVPSDFSQVLQSYTAAGYRVVALAGKPLPIAPSLAAAQQLTRDTVERELSLLGLLVMRNLLKPQTAPVIQTLRKTGIRTVMVTGDNLQTAVTVARACGMVGAQEHLAVIHATHPEQGQPAALEFLPTESSAVMNGAKATGYPTVPEPQSCHLALSGSTFAVLRKHFPKLLPKVLVQATVFARMAPEQKTELVCELQRLQYCVGMCGDGANDCGALKAADVGISLSQAEASVVSPFTSSMASIECVPTVIREGRCSLDTSFSVFKYMALYSLTQFISVLILYTINTNLGDLQFLAIDLVITTTVAVLMSRTGPALTLVRARPPGALLSVPVLGSLLLQVALVAGIQLGGYFLVIAQPWFVPLNRTVPAPDNLPNYENTVVFSLSGFQYLILAAAVSKGAPFRQPLYTNVPFLVALALLGSVLVGLILVPGLLQGPLGLRNIVDSSFKLLLLGLVAFNFVGAFMLESVLDQCLPACLRWLRPKRASKKQFKRLQQELAEHPWPTLPVGSVR

SEQ ID NO: 22493 - protein, 1216 aa, Mus musculus
MEKSKKDGHQAVLNEGEENELEVFGYHTQNLRRALCLVTAILTLGAVQLMFYWRPEWWVWTSCIPCPLQEADTILLRTTDEFRRYMRKKVFCLHLSTLKFPISKNPEEPLVADHHSVINQAVMKPELKLRCIQVQKIRYVWDFLKKRFQKVGLLEDSNSCFDIHHTFGLGLTNEEQEVRRLVCGPNSIEVEIQPIWKLLVKQVLNPFYVFQAFTLTLWLSQGYIEYSVAIIILTVISIVLSVYDLRQQSVKLHKLVEEHNKVQVTITVRDKGLQELESRLLVPGDILILPGKISLPCDAILIDGSCVVNEGMLTGESIPVTKTPLPQTENTMPWKSHSLEDYRKHVLFCGTEVIQVKPSAQGLVRAVVLQTGYNTAKGDLVRSILYPRPLNFKLYNDAFKFMVFLACVGVVGFFYALGVYMYHEVPPRETATMALILLSATVPPVLPAALTIGNVYAQKRLKKEKIFCISPQRINMCGQINLVCFDKTGTLTEDGLDLWGTVPTAGNCFQAVHSFASGEAVPWGPLCAAMTSCHSLILLDGTIQGDPLDLKMFEGTGWNMEDSQVASCKFGMADSSTVIKPGPKASQSPVDSITILRQFPFSSGLQRMSVIAQLAGDLHLHVYMKGAPEMVARFCRSETVPKNFSQELRNYTVQGFRVIALAHKTLKMERLSDMDHLAREKVESELAFLGLLIMENRLKKETRPVLKELSEARIRTVMVTGDNLQTAITVAKNSEMIPVGSQVVIVEANEPGDLVPASVTWQLVGTQEPGSGKKDTYIDIGNSSVPAGKGYHFAMSGKSYQVLFHHFYSMLPQILVNGTIFARMSPGQKSSLVEEFQKLNYYVGMCGDGANDCGALKMAHAGISLSEQEASVASPFTSKTANIECVPHLIREGRAALVSSFGVFKYLTMYGIIQFIGTSLLYWQLQLFGNYQYLLQDVAITLMVSLTMSINHAYPKLAPYRPAGQLLSPQLLLSVFMNSCFTCIVQVCTFLTVKQQPWYCEVYKYSECFLVNQSNLSANVSLDRNWTGNATLVPASVLSFEGTTLWPIVTFNCISAAFIFSKGKPFRKPIYANYLFSLLLASAAGLTIFILFCDFQDLYRKMEFIPTPTSWRVSILIAAFVQFCVAFFVVDAVLQNRELWLFIKKEFGFYSKSQYRILQRKLAEDSTWPPVNRTDYAVNGKNGFYVNRAYESPEEVPKGKLKLEEQASEQHFWTRL

SEQ ID NO: 22494 - protein, 878 aa, Mus musculus
MGDHLEKSQHALLNEGDENEMEIFGYRTQGCRKALCLIGSIFSLGMLPLVFYWRPAWRVWANCVPCSLQEADVVLLKTTDEFKIYSWKKVIWISLSALSSTSGLTPDHPLITDEGYIINRAIRKPDLKVRYIKVQKIRYVWNNLEGQFQKIGSLEDWLSSAKIHQKFGLGLTSEEQEIRRLICGPNAIDVEITPIWKLLIKEVLNPFYIFQLFSVCLWFSEDYKEYALAIILMSVISIALTVYDLRQQSVKLHHLVESHNSITVSVYERKAGAQDLESRLLVPGDLLILTGSRVQMPCDAILIDGSCVVDEGMLTGESIPVTKTPLSQTASSVPWKMQSEADPRRHVLFCGTEVIQAKAAGSGAVRAVVLQTGFNTAKGDLVRSILYPKPMNFKLYRDAIRFLLCLVGTATIGMVYTLCVYVLSGEPPEEVVRKALDVITIAVPPALPAALTTGIIYAQRRLKKKGIFCISPQRINVCGQLNLVCFDKTGTLTRGGLDPWGVVPCDQNGFQAVHSFASGKALPQGPLCAAMASCHSLILLDGTIQGDPLDLKMFEATKWEMTASGDDFHIKEMLAHTIVVKPTDMVAQVPAEGLAIVHQFPFSSALQRMTVIVQEMGGGRLAFMKGAPERVASFCQPDTVPTSFISELQIYTTQGFRVIALAYKKLEMDCPTTALMREKVESDLVFLGLLILENRLKEETKPVLEELISARIRTVMITGDNLQTAITVARKSGMVSEGQKVILVEANEATGSSSASISWKLVEEKKPGPFGSQDTYINIREEVPENGRDGSYHFALSGKSFHVISQYFSSLLPKLVMNNFLGSSCVFAFSWVLLYVSIVIPRIPLVQLSVKLKIFQDMAEKAVFSMAAGFNYTGHLKK

SEQ ID NO: 22495 - protein, 650 aa, Mus musculus
MGSTPPSYGTLTTGTSIDPLSSSASSVRLSGYCGSPWRAIGYHAAVWMLAGIPWLLFRWKPLWGVRLRLKPCSLAHAETLVIEIKDKEGSSRQLFTVQVQTEALVQGSLELPPQAQAEDGRSQAAVGVTPEGTWQDTSELHRQEEAKQVLRYYVLQGQRYVWMETQQAFCQVSLLDHSRTCDDVHCSSSGLSLQDQATRKTIYGPNVISIPVKSYLQLLADEALNPYYGFQAFSIALWLADHYYWYALCIFLISAISICLALYKTRKQSLTLRDMVKLSVRVQVCRPGGEEEWVDSSELVPGDCLVLPQEGGVMPCDAALVAGECVVNESSLTGESTPVLKTALPEGPKPYCPETHRRHTLFCGTLILQARAYVGPRVLAVVTRTGFCTAKGGLVSSILHPRPISFKFYKHSMKFVAALSVLALLGTVYSIVILYRNRVPVREIVIRALDLVTVVVPPALPAAMTVCTLYAQSRLRAQGIFCIHPLRINLGGKLRLVCFDKTGTLTEDGLDVMGVVPLKGQVLLPLVPEPRHLPLGPLLRALATCHALSQLHDTPVGDPMDLKMVESTGWVLEEGPAAGSAPGSQVLVVMRPPPGGPRQQVSCRVTGPWGLGVGLSQPLSSPPTHRKSHQCQSASSAASPSPLPCSGWMW

SEQ ID NO: 22496 - protein, 1174 aa, Mus musculus
MGDHLEKSQHALLNEGDENEMEIFGYRTQGCRKALCLIGSIFSLGMLPLVFYWRPAWRVWANCVPCSLQEADVVLLKTTDEFKIYSWKKVIWISLSALSSTSGLTPDHPLITDEGYIINRAIRKPDLKVRYIKVQKIRYVWNNLEGQFQKIGSLEDWLSSAKIHQKFGLGLTSEEQEIRRLICGPNAIDVEITPIWKLLIKEVLNPFYIFQLFSVCLWFSEDYKEYALAIILMSVISIALTVYDLRQQSVKLHHLVESHNSITVSVYERKAGAQDLESRLLVPGDLLILTGSRVQMPCDAILIDGSCVVDEGMLTGESIPVTKTPLSQTASSVPWKMQSEADPRRHVLFCGTEVIQAKAAGSGAVRAVVLQTGFNTAKGDLVRSILYPKPMNFKLYRDAIRFLLCLEPPEEVVRKALDVITIAVPPALPAALTTGIIYAQRRLKKKGIFCISPQRINVCGQLNLVCFDKTGTLTRGGLDPWGVVPCDQNGFQAVHSFASGKALPQGPLCAAMASCHSLILLDGTIQGDPLDLKMFEATKWEMTASGDDLHIKEMLAHTIVVKPTDMVGQVPAEGLAIVHQFPFSSALQRMTVIVQEMGGGRLAFMKGAPERVASFCQPDTVPTSFISELQIYTTQGFRVIALAYKKLEMDCPTTALMREKVESDLVFLGLLILENRLKEETKPVLEELISARIRTVMITGDNLQTAITVARKSGMVSEGQKVILVEANEATGSSSASISWKLVEEKKPGPFGSQDTYINIREEVPENGRDRSYHFALSGKSFHVISQYFSSLLPKILINGTIFARMSPGQKSSLVEEFQKLDYFVGMCGDGANDCGALKMAHVGISLSEQEASVASPFTSKTPNIECVPHLIKEGRAALVTSFCMFKYMALYSMIQYVGVLLLYWKTNSLSNYQFLFQDLAITTLIGVTMNLNGANPKLVPFRPAGRLISPPLLLSVVLNILLSLAMHIVGFILVQKQPWYIMDYHSVCPVRNESASALAASPSVPEKTRSNSTFASFENTTIWFLGTINCIFVALVFSKGKPFRQPTYTNYIFVLVLILQMGVCLFILFADIPEMHRRLDLLCTPVLWRVYILIMISSNFVVSLAVEKAIIENRALWIAVKRCFGYQSKSQYRIWQRNLANDSSWPPLNQTSYSDMQGVSYSNPVFESNEEQL

SEQ ID NO: 22497 - protein, 898 aa, Mus musculus
MPCDAILIDGSCVVDEGMLTGESIPVTKTPLSQTASSVPWKMQSEADPRRHVLFCGTEVIQAKAAGSGAVRAVVLQTGFNTAKGDLVRSILYPKPMNFKLYRDAIRFLLCLVGTATIGMVYTLCVYVLSGEPPEEVVRKALDVITIAVPPALPAALTTGIIYAQRRLKKKGIFCISPQRINVCGQLNLVCFDKTGTLTRGGLDPWGVVPCDQNGFQAVHSFASGKALPQGPLCAAMASCHSLILLDGTIQGDPLDLKMFEATKWEMTASGDDFHIKEMLAHTIVVKPTDMVAQVPAEGLAIVHQFPFSSALQRMTVIVQEMGGGRLAFMKGAPERVASFCQPDTVPTSFISELQIYTTQGFRVIALAYKKLEMDCPTTALMREKVESDLVFLGLLILENRLKEETKPVLEELISARIRTVMITGDNLQTAITVARKSGMVSEGQKVILVEANEATGSSSASISWKLVEEKKPGPFGSQDTYINIREEVPENGRDGSYHFALSGKSFHVISQYFSSLLPKILINGTIFARMSPGQKSSLVEEFQKLDYFVGMCGDGANDCGALKMAHVGISLSEQEASVASPFTSKTPNIECVPHLIKEGRAALVTSFCMFKYMALYSMIQYVGVLLLYWKTNSLSNYQFLFQDLAITTLIGVTMNLNGANPKLVPFRPAGRLISPPLLLSVVLNILLSLAMHIVGFILVQKQPWYIMDYHSVCPVRNESASALAASPSVPEKTRSNSTFASFENTTIWFLGTINCIFVALVFSKGKPFRQPTYTNYIFVLVLILQMGVCLFILFADIPEMHRRLDLLCTPVLWRVYILIMISSNFVVSLAVEKAIIENRALWIAVKRCFGYQSKSQYRIWQRNLANDSSWPPLNQTSYSDMQGVSYSNPVFESNEEQL

SEQ ID NO: 22498 - protein, 77 aa, Mus musculus
MCGLKVSALKAPVLKPHPCPRLPGPVSTGTKDPSRNRYKLFLECTLILTSVVPPELPIELSLAVNTSLIALAKLCEC

SEQ ID NO: 22499 - protein, 1293 aa, Rattus norvegicus
MKAQSSGRSWDSKAERYPKDSLRPYMTISGFFGDSHSPVVDSTLTCTFMILGDVPIGEIFGYRTQGCRKALCLIGSIFSLGMLPLVFYWRPAWRVWANCVPCSLQEADIVLLRTTVPVEVGRAGSLRAILEMLQSSHDDATRKATGDLEERGEQRTFQSHCGTPLENLVFSKRERVSETVRGKDEFKIYSWKKVMWISLSALSSTSGLTPDHPLIADEEFIINRAIRKPDLKVRYIKVQKIRYVWNNLEGQFQKIGSLEDCLSSAKIHQKFGLGLTSEEQEIRSEEKESGIEPFYECTGDVFSFIAVDEWPICGFSCRRLICGPNAIDVEIIPIWKLLVKEVLNPFYIFQLFSVCLWFSEDYKEYALAIILMSVISIALTVYDLRQQSVKLHHLVESHNSITVSVYERKAGAQDLESRLLVPGDLLILTGSRVQMPCDAVLIDGSCVVDEGMLTGESIPVTKTPLSQTASSAPWKMQSEADPRRHILFCGTEVIQAKAAGSGTVRAVVLQTGFNTAKGDLVRSILYPKPMNFKLYRDAIRFLLCLVGTATIGMIYTLCVYVLSGEPPEEVVRKALDVITIAVPPALPAALTTGIIYAQRRLKKKGIFCISPQRINVCGQLNLVCFDKTGTLTRGGLDLWGVVPCDQNGFQAVHSFASGEAVPWGPLCAAMATCHSLILLDGTIQGDPLDLKMFEATQWEMTVSGDDFHNKEMLAHTMVVKPPDTVGQRMTVIVQETGGGRMAFMKGAPERVASFCQPDTVPTTFISELQVYTTQGFRVIALAYKKLETDCPTTTLMRSVKSELEVDRENRCHNLKYRYFEPRKGCAELDVVLMLFTGLLCFLSSVMEKVESDLIFLGLLILENRLKEETRPVLEELISARIRTAMITGDNLQTAITVARKSGMVSEGQKVILVEANEATDSSSASITWKLVEEKKHGLFGSQDTYINIREEVPENGREGNYHFALSGKSFQVISQHFSSLLPKILINGTIFARMSPGQKSSLVEEFQKLDYFVGMCGDGANDCGKTNSLSNYQFLFQDLAITTLIGVTMNLNGANPKLVPFRPAGRLISPPLLLSVILNILLSLAMHIVGFILVQKQPWYSMDYHSVCPVRNESVSALSASPNVPEKTRSNSTFASFENTTIWFLGTINCIVVALVFSKGKPFRQPTYTNYIFVLVLILQMGVCLFILFADIPELHRRLDLLCTPVLWRVYILIMVSSNFVVSLAVEKAIIENRALWTAVKRCFGYHSKSQYRVWQRNLATDSSWPPLNQTSYSDMQGVSYSNPVFESNEEQL

SEQ ID NO: 22500 - protein, 2326 aa, Rattus norvegicus
MDNILKTINLFKNTKGNKIFFGSFNPNLSDHDQFPYIYQIAAKDTYLFHGMVSLMFHFGWTWIGLVISDDDQGIQFLSDLREEMQRHAICLAFVNMIPETMQIYKTRVKIYDQQLMTSSAKVVIIYGEVNSTLELSFRRWAYLGAQRIWITTSQWDVITHKKDFSLDFSHGTVTFAHHHNDIAVFRNFMQTINTSMYPVDISQSMLQWNHFNCSISKNKKKMDCFTFKNPLEWLIQHTFDMVLSEEGYNLYNAVYAVAHTYHKLILQQVESQKMEEPKGLFTDCQQVTSLLKTIEFTNPVGELVDTKHKENQCATYDIFITWNFPQGLGLKVKIGSYFPCLPQSQQLHISEDWEWVTGETLIPPSVCSMTCTAGFRKIHQKETADCCFDCVQCQENEIANDTADMEQCVKCPDDSYANLEQSQCLQRVVTFLAYEDPLGMALGCMALSFSAITILVLVTFVKYKDTPIVKANNRILSYILLISLVFCFLCSLLYIGHPNQATCILQQTTFAIFFTVAISTVLAKTITVVTAFKLTTPERRIKKIMIKGAINLLIPICTLIQLVLCAVWLVISPPFIDRDIQSEHGKELLGQRKLKIEKKILLSFLDECNRCAPWFIVSGSLTLRAWERLGKDLDKETTLKIEKKILLSFLDECNRCAPWFIVSGSLTLRAWERLGKDLDKETTPCIWLRRTTLANWLDPVSNRAMGTGAIQAALSKITQGASSGNGDTSIDNSANSYITTLIMMHNGSFPSLPGQGIRKLVNSTCRRVLPTCPPYKAFPPKFTPCQSPFHRPKQFLPGFEFSPPLSNAQYDRKRNKTGKRNFWPWYQWVLSNEQGAYTSLTPFARLLGEEFTLYNISAIRTNNNTSLVGVKINSLIANDAAVGAPFCLILCSLTEPNCFWRIKKSEDNDGDLRSDCGFVLFTDEDPIEEDFYNRIINFRIPGRKYEFFLVLFFATDEINKNPNLLSNMSLSFSIIVGLCEDTLGVLEKAYSHKNNNFELINYYCRMKQCCDVELTGPSWTTSLKLSIYSRKPKIFFGSFNPNLSDHDQFPYIYQIAAKDTYLFHGMVSLMFHFGWTWIGLVISDDDQGIQFLSDLREEIQRHEICLAFVNMIPETMQIFKTRLKIYDQQLMTSSAKVVVIYGEMNSTLELSFRRWAYLGAQRIWITTSQWDVTTHKKDFSLDFFHGTVTFAHHHNDIAVFRNFMQTINTSKYPIDISQSMLHWNHFNCSISKNNNKMDCLTFNNSLEWLAQHTFDMALSDEGYNLYNAVYAVAHTYHELIFQQVESQKMEEPKGICADCQQVASLLKTRVFTNPVGELVNMNHKENQCAKYDIFMIWNFPQGLGLKVKIGSYFPCLPQSQQLHISENWEWVTGETVVVCSVTCTAGFRKIHQKQTADCCFDCVQCQENEIANDTDMEQCVRCPDDSYANLEQTQCLQRAVTFLAYEDPLGMALGCMALSFSAITTLVLVTFVKYRDTPIVKANNRILSYILLISLVFCFLCSLLFIGHPNQATCILQQTTFAIFFTVAISTVLAKTITVVTAFKLTTPGRRIRRMMIKGATNLLIPICTLIQLVLCGIWLVTSPPFIDRDTQSEHGKIVIICNKGSDIAFHFVLGYLGSLALGSFTVAFLARNLPDRFNEAKFLTFSMLVFYSVWITFLPVYHSTRGKHSTFQATVEMAKEERKIINKGQEDEMEIHGYNLCRWKLAMVCVGVICTGGFLLLLLYWMPEWRVKATCVRAAVKDCEVVLLRTTDEFRIWFCAKIHFLSLENQPNLNAKSLVNKVSNGHAVCLTEENRCEMNKYSQILINGTCIVNESMLTGESVPVTKTNLPNPSVDVKEIEEEQYSPETHKQHTLFCGTTVIQTRFYTGEFVKAIVVRTGFRTSKGQLVRSILYPKPTDFKLFRDDYLFLLCLVVVAGIGFIYTIVNTILNEKEVQEIIIKSLDIITITVPPALPAGIVYAQRRLKKVGIFCISPQRINICGQLNLVCFDKTGTLTEDGLDLWGIQRVENTRFLLPEDNVCNEMLFPFSSALQRMSVVARTLGDKRMDAYMKGAPEVIASLCKPETVPVDFEKELEDYTKQGFHVIALAHRKLESKLTWHKNKLKQETPAVLEDLHKANIRTVMVTGNNMLTAVSVARDCGTILPQDKVIIAEALHPKDGKVAKINWHYTDSLTQCSESLEDLQVTRYHFAMNGKSFLVILEHFQDLVPKLMLHGTVFARMAPDQKTQLVEALQNVDYFVGICFWRINFNEVKDEALGMTCSFILETVQKPTDKDYFNQTLNVLKVHFYFPHVHVQGFHICSFESEMGPKDSSLALAMVSFILSFK

SEQ ID NO: 22501 - protein, 1330 aa, Rattus norvegicus
MPWKSHSLEDYRKHVLFCGTEVIQVKPSGQGPVRAVVLQTGYNTAKGDLVRSILYPRPLNFKLYNDAFKFMVFLACIGVVGFFYALGVYLYHEVIILSIDVASIALPQTVSWTLDFETNKDSKLLHSSYATDICRYVPPRETVTMALILLTATVPPVLPAALTIGNVYAQKRLKKKKIFCISPQRINMCGQINLVCFDKVGSKLTRGQGFRLRKYSGSREIAEGEHVLEADGCCCQGLQIPTTHLWEPGISLASSSPPHLDSGLRLDRLYCKLTNILAGGGSCLALGSVFQPVDHCLLVGDKLSDSFLFAQLSEENFFQKIMVSPKEKGGPTVLGKRGKNPNSALKRQQVPPWGASCVVALAESPHTEPLSDKISGQDNQQGQSNKALAQCHVEVGSFQGSHAKRRRFRMTSSAVTGTLTEDGLDLWGTVPTAGNCFQAVHSFASGEAVPWGPLCAAMASCHSLILLDGTIQGDPLDLKMFEGTGWNMEDGQVASCKYSTADSGTVIKPGPNASQSPVDSITILRQFPFSSGLQRMSVIAQLAGDLRLHVYMKGAPEMVARFCSSETVPKNFPQELRNYTVQGFRVIALAHKTLKMEKVSDVERLAREKVESELAFLGLLIMENRLKNETRPVLQELSEARIRTVMVTGMCASRAQQVTRRSGKCVTEEGGPVTLQHLRAGTTFSEAATVSSLPRPPILSRIEQETQRERCWLGVCSLEMYTWVGGEINSYKTTQKSQNTFNGQQQTNGETSSFQWLSLCHLGDNLQTAITVAKNSEMIPVGSQVIIVEANEPGDLVPASVTWQLVGTQEPGSEKKVAQQAPERSLIPHKSTGIRTAPCLAGKLARVSQGSQQCFRSPCRNHAFRFQDTYIDIGNSSVPCGKGYHFAMSGKSYQVLFHHFYSMLPQILVNGTVFARMSPGQKSSLVEEFQKLNYYVGMCGDGANDCGALKMAHAGISLSEQEASVASPFTSKVANIECVPHLIREGRAALVSSFGVFKYLTMYGIIQFIGTSLLYWQLQLFGNYQYLLQDVAITLMVSLTMSINHAYPKLAPYRPAGQLLSPQLLLSVFMNSCFTCIVLVCTFLSVKQQPWYCEVYKYSECFLVNQSNFSTNMGLERNWTGNATLVPASVLSFEGTTLWPIVTFNCISAAFIFSKGKPFRKPIYTNYIYRRMEVSVARCASVMTQMCQGYAWTAVYSYTFNQTFCRVEMELYSSPVTVGVALTSSKQTCLVDAILQNRELWLFIKKEFGFYSKSQYRILQRKLAEDSTWPPTNRTDYAVNGKNGLYINRAYESPEQVNFFEVLNLMLLTQQTFHDRRQLVNQTREQQPPD

SEQ ID NO: 22502 - protein, 1226 aa, Anopheles gambiae str. PEST
FLKAKACAPSEGNLTCQNPRKDHVTSTMGTGTKRLTAGSGSLDELVQYATIHIPLPVVLSGAVMPFMVVYALWLYLWVFVYGIEEYQDAGLLFLAGIGFTQIFVCLCCFWSVHVQTFLNCRRTKVPCAGAVVKVVPTENNGSSELVRIRQTKAEGDAKLDGELTYWFLFQKTKYIWDPNKAQFRSVEFPIHKTYEEYFESKGHLDDADVTLAQATYGDNEMEMVVPEFLELFKERATAPFFVFQIFSVLLWCLDEYMYYSLFTLCMLVIFECVLVQQQLRSLSEIRKMGNKPYQINVFRNRRWRPISSAKLVPGDLVSVTRSQDENIVPCDLLLIRGSCIVDESMLTGESVPQMKESLENNTDEHDKVLDIEADGKLHVLFRGTKVVQHSAPSKGAMRSPDNGCIGYVLRTGFNTSQGKLLRTILFGVKRVTENNLETFAFILFLLVFAVAAATYVWIKGTEDPERNRYKLFLECTLILTSIIPPDLPIELSLAVNTSLLQLSKVYVYCTEPFRMPFAGKVQICCFDKTGTLTSDNLLVEGVAGLKQDTSIVPIGEIPEATAHVLGSCHSLVQLDEGLVGDPLEKATLTAIDWNLTKGDSCVPKRGKFKALRIYHRFHFSSSLKRMSVLAGYLMPFSNETCYIGTVKGAPEVIVKMLKTVPEHYERTYLEYSRRGARVLALGYKSFGTLDNNTVRELKRDDVERDLEFAGFIIISCPLKPDSKYAIKEIIQASHKVMMITGDNPLTACHVAKELRFSRRTIVILTPPEELNGSTTGAGEWHWESINRELRLPLDSRTVKELYKEYDFCITGEGLQYLGRERHAYLQQLIPYATVFARFAPKQKEYVLTTLKKLGYYTLMCGDGTNDVGALKHAHVGVSLLSHMPSRSERKQQREQQEEKEEKKKALKASGPNAGAIEDGSNNRRQLTPRERAIMRARENQSAAQERLQKALKEMDEEQVQIVKLGDASIAAPFTSRLTSINCVCHIIKQGRCTLVTTLQMFKILALNALISAYCQSVLYIDGVKHSDAQLTLHGLLTAACFLFITRSKPLKVLSKQAPLPNIFNLYSVTTILAQFAVHFSALIYMVHEANARTPPREGKVKLNVDLAPDEKQEFEPNIVNSTVYIIGIAMQIATVAVNYKGHPFMESLRENRLLSYAIFSSSAIVFCLALGIVPDLLEMFEVIDFDADFRRILVGVLIADMVLAYLVDRVCSFLFGETRGKTDIIT

SEQ ID NO: 22503 - protein, 1036 aa, Anopheles gambiae str. PEST
KTFLCYVGFLLTFGILRLVMHWRQHWLLLATHRECSLDRAEKVLIHEAYQRKHDLYYVKDVITLSGDVVSTMRYFSCKKLRYIWCDQAKKFVKLQGLDVEVPSVLIHHTKGLSVYEQSIRRLIYGSNEIFIPLRSVLTLLFLEVLNPFYVFQIFSVVLWFFYEYYYYAVVIILMSAFGITVSIIQTQRNQRALYSTVRSTDTAMVVRDTMLSESIETRFLVPGDVLEIPATGCTMQCDAVLLSGNCILDESMLTGESVPVTKTPLPLRRDLIYNRKEHARHTLFCGTRVIQTRYIGSEKVLVKVLNTGNITAKGGLVRSILYPPPVDYKFEKDSYKFITVLGIVAFCGFVYTLYTKISRSIGAVKIIVESLDLITIAVPPALPAAMTVGRMYAQKRLKRSNIYCISPRAINVSGSIDCVCFDKTGTLTEDGLDMWGVLPKDSTNSFQIPLKDVGRLPMSDHLLFGMVTCHSITFVNGEMRGDPLDLKIFESTGWILEEANVSDETKYDMLFPTIVKPPRGDSCDELNLELDVAYDNSNDIGIVREFSFTSALQRMSVVTRKVSDNHFNVYVKGSPEMISSLCRPESIPEDFQSKLGFYAHQGYRIIAIAYKQLDKKLNYPKVQKIAREKVECELEFLGFVILENRLKTDTEEVIESLNAANIRSVMVTGDNLLTAASVAHDCGMILAGQNLVTVTAHADKANPDRYFLSYDITGQPQLTHSIDTCTITTQLSDKEHRIVIEPASDHDCHSLATDIGSIKVVANGVPGKLGPGGGSSFRFALTGKTWAIINEHFPELVSTITTYGTVFARMSPDQKQHLITGLQQLGYYVAMCGDGANDCGALKAAHTGISLSEAESSVASPFTSKNPTIACVPNVIKEGRAALVTSFGIFKFMAAYSLVQFASVVILYSIDSNLTDWQYLYIDLFIISIVAFFFGKTSSYDGPLVKQTPSNSLISLAPLLSLALHMMVAIGMQLAGWYHVQAQPWFEPFNYTSDRELNDHGCFENYTIFAISCYQYLILAIVFSKGAPYRKSIFSN

SEQ ID NO: 22504 - protein, 797 aa, Giardia lamblia ATCC 50803
MEVSMTVSASLQELRRLFIYCTEPFKIMNAGKLRICCFDKTGTLCDCEVKVVGFISNSEDDRANHLERIISSAELVKRANRSLENRSFTGDLVSHLVLSSAQSLFVHHDKLIGDPLEQAIYADGKIYSIQTDGVVSLALTHPWQVTVTRRFALSNRLKRMSVVATATCNSKAISKTIVATKGAPEVIKELCTPQSVPYWHDDCLNELAAQGYRILSFAYRELESSDETLTRANAEDGLTFLGFIVTDSNLKPDTREAIEIIKASGHRCAVISGDNVISVGVVSIRSGILPASRPLYNLERFDECAQTCLFTRLNIRTHHSAPTEFDFPSELEVTEKNVKAIARQYSLAVTNNSAFIALLAHSKCGPMFIPRIHVFARMTPEQKADIIRVMQGTAPTLFCGDGSNDVEGLRSADVGVALWEATDYKEKKAEADRIEASAKESAIVRQQRIQAAVAQIPKPSILGPSGTPASQQLIYTEARRRSAEKNTKLTDEMRYLIWEQNKYWSEVRRVSRSGSTSLVDKIFGMSNDGIMSGWSQAFDIEDEGKSLQLGDAAIAAPFTAKSGTIGGVLDIIRQGRCSLVTLIMTYKTLALKCIVGAYSMSVLTLDGVRYSEQQLMASGVSQMFILFNINKSKPLRRISRIPAPDNIISAYALVSLALQVLVHVLIMSLLVHLLSTEKTTVPFDVKFQPSLVNTVVFLLGMYQDLAINVVNYPGEPYMLSLTQFKKLWRGVIVSVVATLVLTMQWLPELNEALGLITMDGHVQRTVMTFGLLDVLLCLGIERASFHILGPKPISDDA

SEQ ID NO: 22505 - protein, 591 aa, Giardia lamblia ATCC 50803
MGLIHSEELVDVRLLSPRKWSRNPLKVTTCALYAIVLLVVILSGARAAMLYNSLPAASKALEYPLRKLNLFEEMKIAPPPLSPTILNGLLYHDVGIHFRVVLFLLLVPIAVHIITILIEFWVVEVRAVMSFSLVKNPRDASVIFATPRCGSGQPCFLTMHHEVQHTGKSPVATSPEDFSYVSYFYFQQIKYVWIDKENKFISVSDDLSSQQTSLEVLLRSADKGLSSAEHSQATILYGENRLAVPLLTLGHLFVEHILSPFFMFQLFTSILWLFDDFAVYSFFTSVMLLFMEGGNILTKFNRMKESRKMISNPCQVEVHRDCEWVVASSTSLVPGDLVRFTVDNLQAAMERQSSQAEKQRKSAQDTQLKQLGVPSIHILLSRMGRMFLSGSYPTENYAIMQREKNIGFSTQIPADLLITKNVAVVDESLLTGESAVQMKDSIWESDLLLNKTLDDAKEIPFNQDRDASHILYAGTTLVSVSSEPVEAVVLRTGFEMSQGQLIRKILFDTERTSATTKDAVQFLVIMFVIACIASIYTFVRGYVTQICPLNRLILERFNSLCLCYSPRASYGGFHDGFRFTSRAPPLIYILH

SEQ ID NO: 22506 - protein, 372 aa, Saccharomyces pastorianus
IQSKLILDCILIITSVVPPELPMELTMAVNSSLAALSKFYVYCTEPFRIPFAGRIDVCCFDKTGTLTGEDLVFEGLAGISEDGENIRHLYSAAEAPESTILVIGAAHALVKLDDGDVVGDPMEKATLKAIGWAVEKKNTTFREGTGKLNVIRRFQFSSALKRSASIASHDDTLFAAVKGAPETIRERLSNIPKNYDDIYKSFTRSGSRVLALASKQLPKLSQPKIEELTRDEVESDLIFNGFLIFHCPLKEDAIETIKMLNESSHRSVMITGDNPLTAVHVAKEVGIVFGETLILDRAGKSDDGQLLFRDVEETITIPFDPSKDTFDHSQLFDRYDIAVTGYALSALDGHSQLRDLLRQAWVYARVSPSQKE

SEQ ID NO: 22507 - protein, 133 aa, Saccharomyces pastorianus
EIQRVTEAGSLQTFFQFQKKRFLWHEDEQVFSSPKFLVDESPKVGDFQKSKGHSGDLTHLRRLYGENSFDIPIPTFMELFKEHAVAPLFVFQVFCVALWLLDEFWYYSLFNLFMIISMEAAAVFQRLTALKEF

SEQ ID NO: 22508 - protein, 2400 aa, Plasmodium falciparum 3D7
MYKNIFFPHDNIKKETYKVYYYHTNNLIHDEYRISYIECYKKKKKKIVTILHYVFCILSLGLLPLILSWFPIFYFRLLHSACTLNECEKVLIITKDGNKYIKKIKKIKFNHNVCYVMNDVFFSEDQSMSSMYNDKEQNKNNFNYFSRDYTFRDQNIMNERKDNINLKDHIKLSGHINLKDNIKLSGHINLKDNIKLSGHINLKDNIKLSGHINFKDNINFKDSIYPCDEILHVDNIPLHNNLNINSHQPFDETTEYNKSRLQDNNRITYIFEFLDIRYVYIKKKNIFVELYFNINYPFSYMHLMCTGLRNEKLINDRKILYGECNLNIKSDSFIILLFKEIMNPFFIFQIFAMIVWSLDNYIEYTISILFITSISIILELKNTIKNQKKIKNMLNYTCPINVYRYNTSYIISSSELVPGDIYEIKNNMTIPCDTIILSGSVTMSEHMLTGESVPIHKEQLPFEGNAIINKNNKYESNDEKDDYLRIYNNHASINMIKRNHLIEETLGKKDREYKSNTHDLCSMNKLCYINNTYDDVHMKNNKMDYNNNNNNKKKKKINNLNFVKGTYINSNDLLYDDKIGVNIFEDDVNNMKHKFNQRNINYYNKDTNNLEYNNKHRYIYDCLLKKVEAISQKNKIIYSNEDINKYMLYGGTYVLSLYNINKIKYNNKEENRILGLVIKTGFITTKGKIVNNILYHKKKELNLINDSYKFLIILIIYAFFSVFILLYITLSNNEYTNHIIIKCLDIITDAIPPALPTTLTVGISIAISRLKKKFSISCLCPHKINIAGQINTMVFDKTGTLTENNLQFIGIITQNKKNKNMLSDFIHIKEMNTESYIHSKDDNMIHNKNSIISEYYIKDNMKNLHTSSKKKSITKERSNFLVQTIKSCLLKDHYIKEKKKEYYTNNTYCNDLHINDSTCSSYLLNSETKDAYCEYYNIDHLCDINKKNMDINSKNELMGKYSKNELMGKYSKNELMGKTIKNELMGKYSKNELMGKYSKNELMGKYSKNELMGKYSKNELMGKYSKNELMGKYSKNELMGKTIKNQVGVDTNIYHMNCDNDYNYDYPCDYNCNNCNDTYHRLEYHNINKDNSFNIPPEKNKSYNNISEHIKINYPLLFEALACCHTLSKVNNKIMGDVLEILMFNFTNCDMLINNNSFIIKEKKKNCSYDFQKIDGDKNIGANDERCHLNNNLVSYNILKRFEFQSRLQRMSVIVKSTYGNNNDDNNDDDNNNDDDNNDDNNNDDNNNDDNNDDNNNNNYYYNIFCKGSPEKIKELCLKSKIPNNYDEILNKYTKQGMRILSISYKRVKSKNINLLNVKRSFVESNLHFLGFLIFTNNMEKNAPDIIHNLQTSGCQCIMSTGDNVLTSIHVAKKCGIINSNVESIIIGDVIPVVGKNNKQKKKLVWYNHKNDTYLKGHDKTCIDNEFTSIQSQMNSDNICGDNICGDNICGDNIYGDNICGDNIYGDNINGDNINGDNINGDNIYGDNINGDNINGDNINTYDNIYGDNYNLDYCPTEYHKCTYNNSILYRNNFLYKKENKKDKNYKNISTLYEHRTNDIQFDKLCDILINKDPRNVNIVLTGKAFIFLKKKFYSFHLPYYEECKNIVHYIMKKKHKKIKNIINNHNSNLYYHYNIIDTFVKRMNKEYMCFNKLLYKIQQKLLYNLIHNLYKKKKYMNNYYDIDEVHLIGNNNNNNKNNSKEKKLPLKNKMKHIRKNESNDNITFNTYTSNNIYLSKYKYVHHKNYYYPDSCTNLRKKKNSLFYNLKKYIYYEKKKYLQHCLLKHDNYKKVELPRIKDINYSYQMESIKTRNFIHSLSEQFAIFSNLILSFYIIKNDDNNVYNKNYIYNKNYIYNKNSICNKNYICNKNYIYNKNNIYNKNNIYNKKNILTHAKSVLLSGSSKKFLKFFSNIIRRHKLKEKKNKKNIKRYKMNHVNNTSKGHIILNMCTHGFKKDYSSLKNKYRIVNNKGYMLKNDNVYDRHMYNLTDMYRGTQYGCSKKKNKNIYMNNNNNILKNKINRFLEHLLVDKCKRNICHKYTDIKNIKLSIYEYILRTCTVYARMKPKDKSDLILSLKKLPNNSYVGMCGDGANDCLALSCADIGISLCNNNESSICSSFTSNKLCLHSIVHILIEGRASLVNSFQLFKFISLYSIMQCSQVLILYSISNKLTDNQYIFIDIVTILPLSIFMCWTSASEKLSKNIPIGKLFSFPILISIYGQIIIQLFFVMISLVLLMNLSFYKYDKNKVMKEKSDDTYLYKAQNTLLYILCSFQNLFMCISLNIKNEWRKSVFTNIAFIIWMSFLLLMNTCITFFSSEIFLVGWIIDLLKQYLSLITFPFYFRIFLFFILFFNFLCSYSYEKYIIKYFEKREIQKKYNHNHMSSIFCSPQELDTTNVFVTCN
